United States Patent Application Publication US 2011/0183924 A1 - sequence listing, part 172

SEQ ID NO: 432554 - DNA, 7310 bp, Homo sapiens
  misc_feature (4759)..(4759): n is a, c, g, or t
  misc_feature (5219)..(5219): n is a, c, g, or t
  misc_feature (5764)..(5764): n is a, c, g, or t
  misc_feature (6301)..(6301): n is a, c, g, or t
  misc_feature (6554)..(6554): n is a, c, g, or t
agcgctagtgtgtccgcctagttcaagtgtgcgtggagattaggtccaagcgcccgcccagaggcaggcagtccgcgagcccagccgccgctgtcgccgccagtagcagccttcgccagcagcgccgcggcggaaccgggcgcaggggagcgagcccggccccgccagcccagcccagcccagccctactccctccccacgccagggcagcagccgttgctcagagagaaggtggaggaagaaatccagaccctagcacgcgcgcaccatcatggaccattatgattctcagcaaaccaacgattacatgcagccagaagaggactgggaccgggacctgctcctggacccggcctgggagaagcagcagagaaagacattcacggcatggtgtaactcccacctccggaaggcggggacacagatcgagaacatcgaagaggacttccgggatggcctgaagctcatgctgctgctggaggtcatctcaggtgaacgcttggccaagccagagcgaggcaagatgagagtgcacaagatctccaacgtcaacaaggccctggatttcatagccagcaaaggcgtcaaactggtgtccatcggagccgaagaaatcgtggatgggaatgtgaagatgaccctgggcatgatctggaccatcatcctgcgctttgccatccaggacatctccgtggaagagacttcagccaaggaagggctgctcctgtggtgtcagagaaagacagccccttacaaaaatgtcaacatccagaacttccacataagctggaaggatggcctcggcttctgtgctttgatccaccgacaccggcccgagctgattgactacgggaagctgcggaaggatgatccactcacaaatctgaatacggcttttgacgtggcagagaagtacctggacatccccaagatgctggatgccgaagacatcgttggaactgcccgaccggatgagaaagccatcatgacttacgtgtctagcttctaccacgccttctctggagcccagaaggcggagacagcagccaatcgcatctgcaaggtgttggccgtcaaccaggagaacgagcagcttatggaagactacgagaagctggccagtgatctgttggagtggatccgccgcacaatcccgtggctggagaaccgggtgcccgagaacaccatgcatgccatgcaacagaagctggaggacttccgggactaccggcgcctgcacaagccgcccaaggtgcaggagaagtgccagctggagatcaacttcaacacgctgcagaccaagctgcggctcagcaaccggcctgccttcatgccctctgagggcaggatggtctcggacatcaacaatgcctggggctgcctggagcaggtggagaagggctatgaggagtggttgctgaatgagatccggaggctggagcgactggaccacctggcagagaagttccggcagaaggcctccatccacgaggcctggactgacggcaaagaggccatgctgcgacagaaggactatgagaccgccaccctctcggagatcaaggccctgctcaagaagcatgaggccttcgagagtgacctggctgcccaccaggaccgtgtggagcagattgccgccatcgcacaggagctcaatgagctggactattatgactcacccagtgtcaacgcccgttgccaaaagatctgtgaccagtgggacaatctgggggccctaactcagaagcgaagggaagctctggagcggaccgagaaactgctggagaccattgaccagctgtacttggagtatgccaagcgggctgcacccttcaacaactggatggagggggccatggaggacctgcaggacaccttcattgtgcacaccattgaggagatccagggactgaccacagcccatgagcagttcaaggccaccctccctgatgccgacaaggagcgcctggccatcctgggcatccacaatgaggtgtccaagattgtccagacctaccacgtcaatatggcgggcaccaacccctacacaaccatcacgcctcaggagatcaatggcaaatgggaccacgtgcggcagctggtgcctcggagggaccaagctctgacggaggagcatgcccgacagcagcacaatgagaggctacgcaagcagtttggagcccaggccaatgtcatcgggccctggatccagaccaagatggaggagatcgggaggatctccattgagatgcatgggaccctggaggaccagctcagccacctgcggcagtatgagaagagcatcgtcaactacaagccaaagattgatcagctggagggcgaccaccagctcatccaggaggcgctcatcttcgacaacaagcacaccaactacaccatggagcacatccgtgtgggctgggagcagctgctcaccaccatcgccaggaccatcaatgaggtagagaaccagatcctgacccgggatgccaagggcatcagccaggagcagatgaatgagttccgggcctccttcaaccactttgaccgggatcactccggcacactgggtcccgaggagttcaaagcctgcctcatcagcttgggttatgatattggcaacgacccccagggagaagcagaatttgcccgcatcatgagcattgtggaccccaaccgcctgggggtagtgacattccaggccttcattgacttcatgtcccgcgagacagccgacacagatacagcagaccaagtcatggcttccttcaagatcctggctggggacaagaactacattaccatggacgagctgcgccgcgagctgccacccgaccaggctgagtactgcatcgcgcggatggccccctacaccggccccgactccgtgccaggtgctctggactacatgtccttctccacggcgctgtacggcgagagtgacctctaatccaccccgcccggccgccctcgtcttgtgcgccgtgccctgccttgcacctccgccgtcgcccatctcctgcctgggttcggtttcagctcccagcctccacccgggtgagctggggcccacgtggcatcgatcctccctgcccgcgaagtgacagtttacaaaattattttctgcaaaaaagaaaaaaaagttacgttaaaaaccaaaaaactacatattttattatagaaaaagtattttttctccaccagacaaatggaaaaaaagaggaaagattaactatttgcaccgaaatgtcttgttttgttgcgacataggaaaataaccaagcacaaagttatattccatcctttttactgatttttttttcttctatctgttccatctgctgtattcatttctccaatctcatgtccattttggtgtgggagtcggggtagggggtactcttgtcaaaaggcacattggtgcatgtgtgtttgctagctcacttgtccatgaaaatattttatgatattaaagaaaatcttttgaaatggctgttttttaaggaagagaatttatgtggcttctcatttttaaatcccctcagaggtgtgactagtctctttatcagcacacacttaaaaaatttttaatattgtctattaaaaataggacaaacttggagagtatggacaactttgatattgcttggcacagatggtattaaaaaaaccacactcctatgacagctctttgcctgctccttgcttgatgttttctggaagtgtgtgtggggtcaaggatggtgtggggcacctgtatctactcctaatgtttttgaccctgctgtgttcaatcttcttacacttcagtttcttcattttaaaaaggaaaaggtaatttcttcacagtctcctatgagttggacagaaagtcatggatgtgtaaaggacttcttgatgataagccccaccttcatttttccacggcaccaaacagccctgtgacatctgcattcaccccactcgtttttatttttgctgcagtgaacagcttgagttgtctcttaagagtcatctcatcccttgctattcgagatgacccacagatggcagctgttcagcatcacctgggagttcattggaaatacagaatctcaggccccacccctgaatgtcgaatactgtgtgtactgctctagcttctccagagtaaaagatagtctctataggatgccgtctgctctggcaccaggccccctgagcccatgccttttatctgacgtttgttttgcaacccattacatcacttgcccccgggcatcctttaaatttcatccttggctaattctcattgtaaccggttccagcttgctttaaatgattgggtggatggaattctccccattgacaattgacaggtggcaattaattgttcatgcctcagtgggatgaatccattacatctctttcctgcctaatatttttatctacctccgacttttttgtagggactttgttgatatcctcatgaaggcccatctctcctctctctggcttgtccatcccttgacaaaaccttaatgactgttctgggtaccaaatctgtggcaggagtgtgacccagctgccacccacctcctccatcactggaccagctcatagttgtcccttggacatggggttagtgcccaacaagtgtagtcatttggctaagtgagttactaggagggagaacagattcaatttcctgaggtggtgaggagagactgaaggctttgccagttctttggcctatgccaggctctctggtacttctgcnggtggcatgagctgtgtgaagcgcctctaaatttaaggctccaaagctctccaacacaaacaagactttagggtctgcgttatggacgccaagggaagaaatacaacctcaacatcagtgcctgtcaagggaggcagatgtgagctcgtctgcctgccaccggccatttggactaccttgggcaagtgacctccttaaatggggccgataatgttgctttccttctctccctggcacacagtaggcatttaataagtggcaatgggtattgtccctagagttgtataaaaaaccagctctagcagggcgtggtggtgcatgtccgtagtgccagctgcttgggaggctgaggtgaggatcacttgagcccaggagttttgagtccagcctgaacaacataacaagaccctgtctgtaaaatgggggaaaaagtcagctgtgctttgttatgctgtttaanatattcttaaagaaaaaggcctgattacagaaaaataccattaaggggaaccctctttcagtctctgtgctgagggtagtagtaggctgagtaatggtcccccaagatatccatttccgagtccctggaacccatgattgttaattcatatgacaaataagactttgcagatgggattaagaatcttgaggtggggagattggttctggattatctgggtgggtccttagggagcaggcatgtcggcatcagaggaaatgtgacgacagaagcaggggttggagtgatgtgaggccacaagccaatgaatgcggacagcctctagaagctagaaaagccagggaaacagattctccctgagagcctccagatagaatgcaggtctacagacccattttgggtctctattctccagaacttgagataatacgtttgtgttgttttaagccacttcatttgtgataatttgttacagcaaccataggaagctaatatgtgctccatcgttcatgccctggggagctggctgcctccctgacgtcagngacccgtggtataggcatgacctgctggagaaactgccctagcttcaaaggcctgagtgtgcaacattggcccttgggaggctgccttagctgctggacttgatctcctaagccttaaaagcgccattcatggagaggggagaaggaagcttccaagttctgagagcccaaaaaggccagaatagctgggcccagcaggagatgtaaggcttcctgttgtctcagatgcaggagccagagggcagcccagctccaggtaggcaccagccacagaactggaaagcccttgggaggctgaggtcctgccttctctatagcttatcttggcccctctctgtgtgtcagcctccctcctctccctgcagcccagctttgggtgcacacctccccatggtggcagaggtcaattccacagtgcctagtgttgacattttcttgacacgagactagtcccaattccaaatgtccaggaggcacttggcccagtctgacctggtgtgataaagtgatgcctgtcagtggataaggctggggccnttgctcatgggctagattgggtatcacctttaggataacccaaaaggtggcctcataagaactgtctcagttcatcaattttcacattttagcatctctgatattgagatagagcatacaattgatctcactttaggattaatggtgtcttacaattgctgttggccagatagcagtcatgacttagtgtcattgcctgcctatttgagacaggaatgtgagtcctgtcttttgtctcaaaaacttccattantcttacctcctggtaagatcaagctccagtatcaaaagttgcatagtgggtacccagagagaaaatgctgatgatcatagtgtagtactggcttacgaaatgctagccagggtgcaatggctcatgcctataatcccagcactttggcaggctgaggtgggcggatcgctcgagcccagaagttcaagaccagcctgagcaacatgatgaaactccgtctttactaaaaatacaaaattagccggatgtggtgccgcatgcctgtaatcccagctacttgggtggctgaggcaggcgaattacttcaacctgggagatggaggttgcagtgagccgagatcatgctgaaggaaggaagggagtaagggagggagggaggcgagagagagagaaagaaaaagaaatgctgcattttcagttctattgatggcacagcaggcaacggtgtgtgaaaaacaggcacttaaagactctgggccgggcacggtggcccatgcctgtaatcccagcactttgggaggctgaggcgggtgaatcatgaggtcaggagttcgagactagcctgaccaacatggtgaaactatgtctctactaaaaatacaaaaaattagctgggtgtggtggtgggtgcctgtaatctcagctactcgggaggctgaggcaggagaattgcttgaacccgggaggcggaggttgcggtgagccgagatcgcgctactgcactccagcctgggtgacagtgtgaaactttgtctc

SEQ ID NO: 432555 - DNA, 3683 bp, Homo sapiens
agcgctagtgtgtccgcctagttcaagtgtgcgtggagattaggtccaagcgcccgcccagaggcaggcagtccgcgagcccagccgccgctgtcgccgccagtagcagccttcgccagcagcgccgcggcggaaccgggcgcaggggagcgagcccggccccgccagcccagcccagcccagccctactccctccccacgccagggcagcagccgttgctcagagagaaggtggaggaagaaatccagaccctagcacgcgcgcaccatcatggaccattatgattctcagcaaaccaacgattacatgcagccagaagaggactgggaccgggacctgctcctggacccggcctgggagaagcagcagagaaagacattcacggcatggtgtaactcccacctccggaaggcggggacacagatcgagaacatcgaagaggacttccgggatggcctgaagctcatgctgctgctggaggtcatctcaggtgaacgcttggccaagccagagcgaggcaagatgagagtgcacaagatctccaacgtcaacaaggccctggatttcatagccagcaaaggcgtcaaactggtgtccatcggagccgaagaaatcgtggatgggaatgtgaagatgaccctgggcatgatctggaccatcatcctgcgctttgccatccaggacatctccgtggaagagacttcagccaaggaagggctgctcctgtggtgtcagagaaagacagccccttacaaaaatgtcaacatccagaacttccacataagctggaaggatggcctcggcttctgtgctttgatccaccgacaccggcccgagctgattgactacgggaagctgcggaaggatgatccactcacaaatctgaatacggcttttgacgtggcagagaagtacctggacatccccaagatgctggatgccgaagacatcgttggaactgcccgaccggatgagaaagccatcatgacttacgtgtctagcttctaccacgccttctctggagcccagaaggcggagacagcagccaatcgcatctgcaaggtgttggccgtcaaccaggagaacgagcagcttatggaagactacgagaagctggccagtgatctgttggagtggatccgccgcacaatcccgtggctggagaaccgggtgcccgagaacaccatgcatgccatgcaacagaagctggaggacttccgggactaccggcgcctgcacaagccgcccaaggtgcaggagaagtgccagctggagatcaacttcaacacgctgcagaccaagctgcggctcagcaaccggcctgccttcatgccctctgagggcaggatggtctcggacatcaacaatgcctggggctgcctggagcaggtggagaagggctatgaggagtggttgctgaatgagatccggaggctggagcgactggaccacctggcagagaagttccggcagaaggcctccatccacgaggcctggactgacggcaaagaggccatgctgcgacagaaggactatgagaccgccaccctctcggagatcaaggccctgctcaagaagcatgaggccttcgagagtgacctggctgcccaccaggaccgtgtggagcagattgccgccatcgcacaggagctcaatgagctggactattatgactcacccagtgtcaacgcccgttgccaaaagatctgtgaccagtgggacaatctgggggccctaactcagaagcgaagggaagctctggagcggaccgagaaactgctggagaccattgaccagctgtacttggagtatgccaagcgggctgcacccttcaacaactggatggagggggccatggaggacctgcaggacaccttcattgtgcacaccattgaggagatccagggactgaccacagcccatgagcagttcaaggccaccctccctgatgccgacaaggagcgcctggccatcctgggcatccacaatgaggtgtccaagattgtccagacctaccacgtcaatatggcgggcaccaacccctacacaaccatcacgcctcaggagatcaatggcaaatgggaccacgtgcggcagctggtgcctcggagggaccaagctctgacggaggagcatgcccgacagcagcacaatgagaggctacgcaagcagtttggagcccaggccaatgtcatcgggccctggatccagaccaagatggaggagatcgggaggatctccattgagatgcatgggaccctggaggaccagctcagccacctgcggcagtatgagaagagcatcgtcaactacaagccaaagattgatcagctggagggcgaccaccagctcatccaggaggcgctcatcttcgacaacaagcacaccaactacaccatggagcacatccgtgtgggctgggagcagctgctcaccaccatcgccaggaccatcaatgaggtagagaaccagatcctgacccgggatgccaagggcatcagccaggagcagatgaatgagttccgggcctccttcaaccactttgaccgggatcactccggcacactgggtcccgaggagttcaaagcctgcctcatcagcttgggttatgatattggcaacgacccccagggagaagcagaatttgcccgcatcatgagcattgtggaccccaaccgcctgggggtagtgacattccaggccttcattgacttcatgtcccgcgagacagccgacacagatacagcagaccaagtcatggcttccttcaagatcctggctggggacaagaactacattaccatggacgagctgcgccgcgagctgccacccgaccaggctgagtactgcatcgcgcggatggccccctacaccggccccgactccgtgccaggtgctctggactacatgtccttctccacggcgctgtacggcgagagtgacctctaatccaccccgcccggccgccctcgtcttgtgcgccgtgccctgccttgcacctccgccgtcgcccatctcctgcctgggttcggtttcagctcccagcctccacccgggtgagctggggcccacgtggcatcgatcctccctgcccgcgaagtgacagtttacaaaattattttctgcaaaaaagaaaaaaaagttacgttaaaaaccaaaaaactacatattttattatagaaaaagtattttttctccaccagacaaatggaaaaaaagaggaaagattaactatttgcaccgaaatgtcttgttttgttgcgacataggaaaataaccaagcacaaagttatattccatcctttttactgatttttttttcttctatctgttccatctgctgtattcatttctccaatctcatgtccattttggtgtgggagtcggggtagggggtactcttgtcaaaaggcacattggtgcatgtgtgtttgctagctcacttgtccatgaaaatattttatgatattaaagaaaatcttttgaaatggctgttttttaaggaagagaatttatgtggcttctcatttttaaatcccctcagaggtgtgactagtctctttatcagcacacacttaaaaaatttttaatattgtctattaaaaataggacaaacttggagagtatggacaactttgatattgcttggcacagatggtattaaaaaaaccacactcctatg

SEQ ID NO: 432556 - DNA, 7256 bp, Homo sapiens
  misc_feature (4705)..(4705): n is a, c, g, or t
  misc_feature (5165)..(5165): n is a, c, g, or t
  misc_feature (5710)..(5710): n is a, c, g, or t
  misc_feature (6247)..(6247): n is a, c, g, or t
  misc_feature (6500)..(6500): n is a, c, g, or t
agcgctagtgtgtccgcctagttcaagtgtgcgtggagattaggtccaagcgcccgcccagaggcaggcagtccgcgagcccagccgccgctgtcgccgccagtagcagccttcgccagcagcgccgcggcggaaccgggcgcaggggagcgagcccggccccgccagcccagcccagcccagccctactccctccccacgccagggcagcagccgttgctcagagagaaggtggaggaagaaatccagaccctagcacgcgcgcaccatcatggaccattatgattctcagcaaaccaacgattacatgcagccagaagaggactgggaccgggacctgctcctggacccggcctgggagaagcagcagagaaagacattcacggcatggtgtaactcccacctccggaaggcggggacacagatcgagaacatcgaagaggacttccgggatggcctgaagctcatgctgctgctggaggtcatctcaggtgaacgcttggccaagccagagcgaggcaagatgagagtgcacaagatctccaacgtcaacaaggccctggatttcatagccagcaaaggcgtcaaactggtgtccatcggagccgaagaaatcgtggatgggaatgtgaagatgaccctgggcatgatctggaccatcatcctgcgctttgccatccaggacatctccgtggaagagacttcagccaaggaagggctgctcctgtggtgtcagagaaagacagccccttacaaaaatgtcaacatccagaacttccacataagctggaaggatggcctcggcttctgtgctttgatccaccgacaccggcccgagctgattgactacgggaagctgcggaaggatgatccactcacaaatctgaatacggcttttgacgtggcagagaagtacctggacatccccaagatgctggatgccgaagacatcgttggaactgcccgaccggatgagaaagccatcatgacttacgtgtctagcttctaccacgccttctctggagcccagaaggcggagacagcagccaatcgcatctgcaaggtgttggccgtcaaccaggagaacgagcagcttatggaagactacgagaagctggccagtgatctgttggagtggatccgccgcacaatcccgtggctggagaaccgggtgcccgagaacaccatgcatgccatgcaacagaagctggaggacttccgggactaccggcgcctgcacaagccgcccaaggtgcaggagaagtgccagctggagatcaacttcaacacgctgcagaccaagctgcggctcagcaaccggcctgccttcatgccctctgagggcaggatggtctcggacatcaacaatgcctggggctgcctggagcaggtggagaagggctatgaggagtggttgctgaatgagatccggaggctggagcgactggaccacctggcagagaagttccggcagaaggcctccatccacgaggcctggactgacggcaaagaggccatgctgcgacagaaggactatgagaccgccaccctctcggagatcaaggccctgctcaagaagcatgaggccttcgagagtgacctggctgcccaccaggaccgtgtggagcagattgccgccatcgcacaggagctcaatgagctggactattatgactcacccagtgtcaacgcccgttgccaaaagatctgtgaccagtgggacaatctgggggccctaactcagaagcgaagggaagctctggagcggaccgagaaactgctggagaccattgaccagctgtacttggagtatgccaagcgggctgcacccttcaacaactggatggagggggccatggaggacctgcaggacaccttcattgtgcacaccattgaggagatccagggactgaccacagcccatgagcagttcaaggccaccctccctgatgccgacaaggagcgcctggccatcctgggcatccacaatgaggtgtccaagattgtccagacctaccacgtcaatatggcgggcaccaacccctacacaaccatcacgcctcaggagatcaatggcaaatgggaccacgtgcggcagctggtgcctcggagggaccaagctctgacggaggagcatgcccgacagcagcacaatgagaggctacgcaagcagtttggagcccaggccaatgtcatcgggccctggatccagaccaagatggaggagatcgggaggatctccattgagatgcatgggaccctggaggaccagctcagccacctgcggcagtatgagaagagcatcgtcaactacaagccaaagattgatcagctggagggcgaccaccagctcatccaggaggcgctcatcttcgacaacaagcacaccaactacaccatggagcacatccgtgtgggctgggagcagctgctcaccaccatcgccaggaccatcaatgaggtagagaaccagatcctgacccgggatgccaagggcatcagccaggagcagatgaatgagttccgggcctccttcaaccactttgaccgggatcactccggcacactgggtcccgaggagttcaaagcctgcctcatcagcttgggttatgatattggcaacgacccccagggagaagcagaatttgcccgcatcatgagcattgtggaccccaaccgcctgggggtagtgacattccaggccttcattgacttcatgtcccgcgagacagccgacacagatacagcagaccaagtcatggcttccttcaagatcctggctggggacaagaactacattaccatggacgagctgcgccgcgagctgccacccgaccaggctgagtactgcatcgcgcggatggccccctacaccggccccgactccgtgccaggtgctctggactacatgtccttctccacggcgctgtacggcgagagtgacctctaatccaccccgcccggccgccctcgtcttgtgcgccgtgccctgccttgcacctccgccgtcgcccatctcctgcctgggttcggtttcagctcccagcctccacccgggtgagctggggcccacgtggcatcgatcctccctgcccgcgaagtgacagtttacaaaattattttctgcaaaaaagaaaaaaaagttacgttaaaaaccaaaaaactacatattttattatagaaaaagtattttttctccaccagacaaatggaaaagaaaataaccaagcacaaagttatattccatcctttttactgatttttttttcttctatctgttccatctgctgtattcatttctccaatctcatgtccattttggtgtgggagtcggggtagggggtactcttgtcaaaaggcacattggtgcatgtgtgtttgctagctcacttgtccatgaaaatattttatgatattaaagaaaatcttttgaaatggctgttttttaaggaagagaatttatgtggcttctcatttttaaatcccctcagaggtgtgactagtctctttatcagcacacacttaaaaaatttttaatattgtctattaaaaataggacaaacttggagagtatggacaactttgatattgcttggcacagatggtattaaaaaaaccacactcctatgacagctctttgcctgctccttgcttgatgttttctggaagtgtgtgtggggtcaaggatggtgtggggcacctgtatctactcctaatgtttttgaccctgctgtgttcaatcttcttacacttcagtttcttcattttaaaaaggaaaaggtaatttcttcacagtctcctatgagttggacagaaagtcatggatgtgtaaaggacttcttgatgataagccccaccttcatttttccacggcaccaaacagccctgtgacatctgcattcaccccactcgtttttatttttgctgcagtgaacagcttgagttgtctcttaagagtcatctcatcccttgctattcgagatgacccacagatggcagctgttcagcatcacctgggagttcattggaaatacagaatctcaggccccacccctgaatgtcgaatactgtgtgtactgctctagcttctccagagtaaaagatagtctctataggatgccgtctgctctggcaccaggccccctgagcccatgccttttatctgacgtttgttttgcaacccattacatcacttgcccccgggcatcctttaaatttcatccttggctaattctcattgtaaccggttccagcttgctttaaatgattgggtggatggaattctccccattgacaattgacaggtggcaattaattgttcatgcctcagtgggatgaatccattacatctctttcctgcctaatatttttatctacctccgacttttttgtagggactttgttgatatcctcatgaaggcccatctctcctctctctggcttgtccatcccttgacaaaaccttaatgactgttctgggtaccaaatctgtggcaggagtgtgacccagctgccacccacctcctccatcactggaccagctcatagttgtcccttggacatggggttagtgcccaacaagtgtagtcatttggctaagtgagttactaggagggagaacagattcaatttcctgaggtggtgaggagagactgaaggctttgccagttctttggcctatgccaggctctctggtacttctgcnggtggcatgagctgtgtgaagcgcctctaaatttaaggctccaaagctctccaacacaaacaagactttagggtctgcgttatggacgccaagggaagaaatacaacctcaacatcagtgcctgtcaagggaggcagatgtgagctcgtctgcctgccaccggccatttggactaccttgggcaagtgacctccttaaatggggccgataatgttgctttccttctctccctggcacacagtaggcatttaataagtggcaatgggtattgtccctagagttgtataaaaaaccagctctagcagggcgtggtggtgcatgtccgtagtgccagctgcttgggaggctgaggtgaggatcacttgagcccaggagttttgagtccagcctgaacaacataacaagaccctgtctgtaaaatgggggaaaaagtcagctgtgctttgttatgctgtttaanatattcttaaagaaaaaggcctgattacagaaaaataccattaaggggaaccctctttcagtctctgtgctgagggtagtagtaggctgagtaatggtcccccaagatatccatttccgagtccctggaacccatgattgttaattcatatgacaaataagactttgcagatgggattaagaatcttgaggtggggagattggttctggattatctgggtgggtccttagggagcaggcatgtcggcatcagaggaaatgtgacgacagaagcaggggttggagtgatgtgaggccacaagccaatgaatgcggacagcctctagaagctagaaaagccagggaaacagattctccctgagagcctccagatagaatgcaggtctacagacccattttgggtctctattctccagaacttgagataatacgtttgtgttgttttaagccacttcatttgtgataatttgttacagcaaccataggaagctaatatgtgctccatcgttcatgccctggggagctggctgcctccctgacgtcagngacccgtggtataggcatgacctgctggagaaactgccctagcttcaaaggcctgagtgtgcaacattggcccttgggaggctgccttagctgctggacttgatctcctaagccttaaaagcgccattcatggagaggggagaaggaagcttccaagttctgagagcccaaaaaggccagaatagctgggcccagcaggagatgtaaggcttcctgttgtctcagatgcaggagccagagggcagcccagctccaggtaggcaccagccacagaactggaaagcccttgggaggctgaggtcctgccttctctatagcttatcttggcccctctctgtgtgtcagcctccctcctctccctgcagcccagctttgggtgcacacctccccatggtggcagaggtcaattccacagtgcctagtgttgacattttcttgacacgagactagtcccaattccaaatgtccaggaggcacttggcccagtctgacctggtgtgataaagtgatgcctgtcagtggataaggctggggccnttgctcatgggctagattgggtatcacctttaggataacccaaaaggtggcctcataagaactgtctcagttcatcaattttcacattttagcatctctgatattgagatagagcatacaattgatctcactttaggattaatggtgtcttacaattgctgttggccagatagcagtcatgacttagtgtcattgcctgcctatttgagacaggaatgtgagtcctgtcttttgtctcaaaaacttccattantcttacctcctggtaagatcaagctccagtatcaaaagttgcatagtgggtacccagagagaaaatgctgatgatcatagtgtagtactggcttacgaaatgctagccagggtgcaatggctcatgcctataatcccagcactttggcaggctgaggtgggcggatcgctcgagcccagaagttcaagaccagcctgagcaacatgatgaaactccgtctttactaaaaatacaaaattagccggatgtggtgccgcatgcctgtaatcccagctacttgggtggctgaggcaggcgaattacttcaacctgggagatggaggttgcagtgagccgagatcatgctgaaggaaggaagggagtaagggagggagggaggcgagagagagagaaagaaaaagaaatgctgcattttcagttctattgatggcacagcaggcaacggtgtgtgaaaaacaggcacttaaagactctgggccgggcacggtggcccatgcctgtaatcccagcactttgggaggctgaggcgggtgaatcatgaggtcaggagttcgagactagcctgaccaacatggtgaaactatgtctctactaaaaatacaaaaaattagctgggtgtggtggtgggtgcctgtaatctcagctactcgggaggctgaggcaggagaattgcttgaacccgggaggcggaggttgcggtgagccgagatcgcgctactgcactccagcctgggtgacagtgtgaaactttgtctc

SEQ ID NO: 432557 - DNA, 4018 bp, Homo sapiens
agcgctagtgtgtccgcctagttcaagtgtgcgtggagattaggtccaagcgcccgcccagaggcaggcagtccgcgagcccagccgccgctgtcgccgccagtagcagccttcgccagcagcgccgcggcggaaccgggcgcaggggagcgagcccggccccgccagcccagcccagcccagccctactccctccccacgccagggcagcagccgttgctcagagagaaggtggaggaagaaatccagaccctagcacgcgcgcaccatcatggaccattatgattctcagcaaaccaacgattacatgcagccagaagaggactgggaccgggacctgctcctggacccggcctgggagaagcagcagagaaagacattcacggcatggtgtaactcccacctccggaaggcggggacacagatcgagaacatcgaagaggacttccgggatggcctgaagctcatgctgctgctggaggtcatctcaggtgaacgcttggccaagccagagcgaggcaagatgagagtgcacaagatctccaacgtcaacaaggccctggatttcatagccagcaaaggcgtcaaactggtgtccatcggagccgaagaaatcgtggatgggaatgtgaagatgaccctgggcatgatctggaccatcatcctgcgctttgccatccaggacatctccgtggaagagacttcagccaaggaagggctgctcctgtggtgtcagagaaagacagccccttacaaaaatgtcaacatccagaacttccacataagctggaaggatggcctcggcttctgtgctttgatccaccgacaccggcccgagctgattgactacgggaagctgcggaaggatgatccactcacaaatctgaatacggcttttgacgtggcagagaagtacctggacatccccaagatgctggatgccgaagacatcgttggaactgcccgaccggatgagaaagccatcatgacttacgtgtctagcttctaccacgccttctctggagcccagaaggcggagacagcagccaatcgcatctgcaaggtgttggccgtcaaccaggagaacgagcagcttatggaagactacgagaagctggccagtgatctgttggagtggatccgccgcacaatcccgtggctggagaaccgggtgcccgagaacaccatgcatgccatgcaacagaagctggaggacttccgggactaccggcgcctgcacaagccgcccaaggtgcaggagaagtgccagctggagatcaacttcaacacgctgcagaccaagctgcggctcagcaaccggcctgccttcatgccctctgagggcaggatggtctcggacatcaacaatgcctggggctgcctggagcaggtggagaagggctatgaggagtggttgctgaatgagatccggaggctggagcgactggaccacctggcagagaagttccggcagaaggcctccatccacgaggcctggactgacggcaaagaggccatgctgcgacagaaggactatgagaccgccaccctctcggagatcaaggccctgctcaagaagcatgaggccttcgagagtgacctggctgcccaccaggaccgtgtggagcagattgccgccatcgcacaggagctcaatgagctggactattatgactcacccagtgtcaacgcccgttgccaaaagatctgtgaccagtgggacaatctgggggccctaactcagaagcgaagggaagctctggagcggaccgagaaactgctggagaccattgaccagctgtacttggagtatgccaagcgggctgcacccttcaacaactggatggagggggccatggaggacctgcaggacaccttcattgtgcacaccattgaggagatccagggactgaccacagcccatgagcagttcaaggccaccctccctgatgccgacaaggagcgcctggccatcctgggcatccacaatgaggtgtccaagattgtccagacctaccacgtcaatatggcgggcaccaacccctacacaaccatcacgcctcaggagatcaatggcaaatgggaccacgtgcggcagctggtgcctcggagggaccaagctctgacggaggagcatgcccgacagcagcacaatgagaggctacgcaagcagtttggagcccaggccaatgtcatcgggccctggatccagaccaagatggaggagatcgggaggatctccattgagatgcatgggaccctggaggaccagctcagccacctgcggcagtatgagaagagcatcgtcaactacaagccaaagattgatcagctggagggcgaccaccagctcatccaggaggcgctcatcttcgacaacaagcacaccaactacaccatggagcacatccgtgtgggctgggagcagctgctcaccaccatcgccaggaccatcaatgaggtagagaaccagatcctgacccgggatgccaagggcatcagccaggagcagatgaatgagttccgggcctccttcaaccactttgaccgggatcactccggcacactgggtcccgaggagttcaaagcctgcctcatcagcttgggttatgatattggcaacgacccccagggagaagcagaatttgcccgcatcatgagcattgtggaccccaaccgcctgggggtagtgacattccaggccttcattgacttcatgtcccgcgagacagccgacacagatacagcagaccaagtcatggcttccttcaagatcctggctggggacaagaactacattaccatggacgagctgcgccgcgagctgccacccgaccaggctgagtactgcatcgcgcggatggccccctacaccggccccgactccgtgccaggtgctctggactacatgtccttctccacggcgctgtacggcgagagtgacctctaatccaccccgcccggccgccctcgtcttgtgcgccgtgccctgccttgcacctccgccgtcgcccatctcctgcctgggttcggtttcagctcccagcctccacccgggtgagctggggcccacgtggcatcgatcctccctgcccgcgaagtgacagtttacaaaattattttctgcaaaaaagaaaaaaaagttacgttaaaaaccaaaaaactacatattttattatagaaaaagtattttttctccaccagacaaatggaaaaaaagaggaaagattaactatttgcaccgaaatgtcttgttttgttgcgacataggaaaataaccaagcacaaagttatattccatcctttttactgatttttttttcttctatctgttccatctgctgtattcatttctccaatctcatgtccattttggtgtgggagtcggggtagggggtactcttgtcaaaaggcacattggtgcatgtgtgtttgctagctcacttgtccatgaaaatattttatgatattaaagaaaatcttttgaaatgaaaaaaaaaaaaaaacaaaaaaaaaaaaaaaaaaaaaacaaaaaaaaaaaaaaaacaaacaaaacaaaaaaaaaaaaaaaacaaacgaaagaaaacgagaaaacgagcaagtacacgaagcagcaaagcaaaaaagcaccagcagcagcaaagacgacccaccagcagccagccaccaaaacacagcatagggggaaacacacaaagctgacaaaaagcaacgacgacgagacaacatgagacaagaccaagaaaacacacaaaccccacaccagatccacacatagcacggagacacacggaggaataacacaaagccagcacatacagcaacaacaacacgaaaaaacaaaaaacgagtagaagaccaccgagacaagacaaggcagaatatatcagacgccagaaaaacagacagaacacggcggcagacaagaaggcacaacccagaagaacaccaccacacacgaccacagaatacgaccacacagcaaagacaaaacgacagagaacagaagacagagcgg

SEQ ID NO: 432558 - DNA, 3957 bp, Homo sapiens
agcgctagtgtgtccgcctagttcaagtgtgcgtggagattaggtccaagcgcccgcccagaggcaggcagtccgcgagcccagccgccgctgtcgccgccagtagcagccttcgccagcagcgccgcggcggaaccgggcgcaggggagcgagcccggccccgccagcccagcccagcccagccctactccctccccacgccagggcagcagccgttgctcagagagaaggtggaggaagaaatccagaccctagcacgcgcgcaccatcatggaccattatgattctcagcaaaccaacgattacatgcagccagaagaggactgggaccgggacctgctcctggacccggcctgggagaagcagcagagaaagacattcacggcatggtgtaactcccacctccggaaggcggggacacagatcgagaacatcgaagaggacttccgggatggcctgaagctcatgctgctgctggaggtcatctcaggtgaacgcttggccaagccagagcgaggcaagatgagagtgcacaagatctccaacgtcaacaaggccctggatttcatagccagcaaaggcgtcaaactggtgtccatcggagccgaagaaatcgtggatgggaatgtgaagatgaccctgggcatgatctggaccatcatcctgcgctttgccatccaggacatctccgtggaagagacttcagccaaggaagggctgctcctgtggtgtcagagaaagacagccccttacaaaaatgtcaacatccagaacttccacataagctggaaggatggcctcggcttctgtgctttgatccaccgacaccggcccgagctgattgactacgggaagctgcggaaggatgatccactcacaaatctgaatacggcttttgacgtggcagagaagtacctggacatccccaagatgctggatgccgaagacatcgttggaactgcccgaccggatgagaaagccatcatgacttacgtgtctagcttctaccacgccttctctggagcccagaaggcggagacagcagccaatcgcatctgcaaggtgttggccgtcaaccaggagaacgagcagcttatggaagactacgagaagctggccagtgatctgttggagtggatccgccgcacaatcccgtggctggagaaccgggtgcccgagaacaccatgcatgccatgcaacagaagctggaggacttccgggactaccggcgcctgcacaagccgcccaaggtgcaggagaagtgccagctggagatcaacttcaacacgctgcagaccaagctgcggctcagcaaccggcctgccttcatgccctctgagggcaggatggtctcggacatcaacaatgcctggggctgcctggagcaggtggagaagggctatgaggagtggttgctgaatgagatccggaggctggagcgactggaccacctggcagagaagttccggcagaaggcctccatccacgaggcctggactgacggcaaagaggccatgctgcgacagaaggactatgagaccgccaccctctcggagatcaaggccctgctcaagaagcatgaggccttcgagagtgacctggctgcccaccaggaccgtgtggagcagattgccgccatcgcacaggagctcaatgagctggactattatgactcacccagtgtcaacgcccgttgccaaaagatctgtgaccagtgggacaatctgggggccctaactcagaagcgaagggaagctctggagcggaccgagaaactgctggagaccattgaccagctgtacttggagtatgccaagcgggctgcacccttcaacaactggatggagggggccatggaggacctgcaggacaccttcattgtgcacaccattgaggagatccagggactgaccacagcccatgagcagttcaaggccaccctccctgatgccgacaaggagcgcctggccatcctgggcatccacaatgaggtgtccaagattgtccagacctaccacgtcaatatggcgggcaccaacccctacacaaccatcacgcctcaggagatcaatggcaaatgggaccacgtgcggcagctggtgcctcggagggaccaagctctgacggaggagcatgcccgacagcagcacaatgagaggctacgcaagcagtttggagcccaggccaatgtcatcgggccctggatccagaccaagatggaggagatcgggaggatctccattgagatgcatgggaccctggaggaccagctcagccacctgcggcagtatgagaagagcatcgtcaactacaagccaaagattgatcagctggagggcgaccaccagctcatccaggaggcgctcatcttcgacaacaagcacaccaactacaccatggagcacatccgtgtgggctgggagcagctgctcaccaccatcgccaggaccatcaatgaggtagagaaccagatcctgacccgggatgccaagggcatcagccaggagcagatgaatgagttccgggcctccttcaaccactttgaccgggatcactccggcacactgggtcccgaggagttcaaagcctgcctcatcagcttgggttatgatattggcaacgacccccagggagaagcagaatttgcccgcatcatgagcattgtggaccccaaccgcctgggggtagtgacattccaggccttcattgacttcatgtcccgcgagacagccgacacagatacagcagaccaagtcatggcttccttcaagatcctggctggggacaagaactacattaccatggacgagctgcgccgcgagctgccacccgaccaggctgagtactgcatcgcgcggatggccccctacaccggccccgactccgtgccaggtgctctggactacatgtccttctccacggcgctgtacggcgagagtgacctctaatccaccccgcccggccgccctcgtcttgtgcgccgtgccctgccttgcacctccgccgtcgcccatctcctgcctgggttcggtttcagctcccagcctccacccgggtgagctggggcccacgtggcatcgatcctccctgcccgcgaagtgacagtttacaaaattattttctgcaaaccaggtcatggcttccttcacagatcctggactggggaacaaagtaactacatttacacatgggatcgagctgcgccgccagctgccgacgccgaccaggctgagtactgcactcgcgcggatggaccgctataccgggcccgactccgtgccaggtgctctggactacgtgtccttctccacggcgctgtgacggcgcagagtgacctctagtccacccggccggcgccctcgtcttgtgcgcgtgccctgccgttgctacctcctgccgatagccacagtatccatgcctaggaattcggacacaggctcgcatgctccaacgcgggtgacacttgtggcccaacatggcactcaatgctcaacagacaacatcgttggagctttccaaagtaaccaaagcctgcaggaagggacagcggcatatacgcgtccaagaacagccaccagagccgcccccgtgagcaccgcacacacacgcatgataaactcgagcgacgcaaccgtacactgcgccacagtacacactgggcacccacacccagtacggtgcgcacgcgcgaccaatctgccgccacaccacaacaaagccactgaccccgcccccccacccccccccgacacaaacacgacttgtcaacacacacccacgcatcatggtcggcgaaaccagccacgcccaatacaccacaccgacacacagccacccccgcgcggtcaccaacacggcgcagaacggtgacgacacaaccataacccccacgacgacacgaccagccacgtcaacccgacgaccaaacaagacgacgcgcaccagtgcacacgac

SEQ ID NO: 432559 - DNA, 7127 bp, Homo sapiens
  misc_feature (4576)..(4576): n is a, c, g, or t
  misc_feature (5036)..(5036): n is a, c, g, or t
  misc_feature (5581)..(5581): n is a, c, g, or t
  misc_feature (6118)..(6118): n is a, c, g, or t
  misc_feature (6371)..(6371): n is a, c, g, or t
agcgctagtgtgtccgcctagttcaagtgtgcgtggagattaggtccaagcgcccgcccagaggcaggcagtccgcgagcccagccgccgctgtcgccgccagtagcagccttcgccagcagcgccgcggcggaaccgggcgcaggggagcgagcccggccccgccagcccagcccagcccagccctactccctccccacgccagggcagcagccgttgctcagagagaaggtggaggaagaaatccagaccctagcacgcgcgcaccatcatggaccattatgattctcagcaaaccaacgattacatgcagccagaagaggactgggaccgggacctgctcctggacccggcctgggagaagcagcagagaaagacattcacggcatggtgtaactcccacctccggaaggcggggacacagatcgagaacatcgaagaggacttccgggatggcctgaagctcatgctgctgctggaggtcatctcaggtgaacgcttggccaagccagagcgaggcaagatgagagtgcacaagatctccaacgtcaacaaggccctggatttcatagccagcaaaggcgtcaaactggtgtccatcggagccgaagaaatcgtggatgggaatgtgaagatgaccctgggcatgatctggaccatcatcctgcgctttgccatccaggacatctccgtggaagagacttcagccaaggaagggctgctcctgtggtgtcagagaaagacagccccttacaaaaatgtcaacatccagaacttccacataagctggaaggatggcctcggcttctgtgctttgatccaccgacaccggcccgagctgattgactacgggaagctgcggaaggatgatccactcacaaatctgaatacggcttttgacgtggcagagaagtacctggacatccccaagatgctggatgccgaagacatcgttggaactgcccgaccggatgagaaagccatcatgacttacgtgtctagcttctaccacgccttctctggagcccagaaggcggagacagcagccaatcgcatctgcaaggtgttggccgtcaaccaggagaacgagcagcttatggaagactacgagaagctggccagtgatctgttggagtggatccgccgcacaatcccgtggctggagaaccgggtgcccgagaacaccatgcatgccatgcaacagaagctggaggacttccgggactaccggcgcctgcacaagccgcccaaggtgcaggagaagtgccagctggagatcaacttcaacacgctgcagaccaagctgcggctcagcaaccggcctgccttcatgccctctgagggcaggatggtctcggacatcaacaatgcctggggctgcctggagcaggtggagaagggctatgaggagtggttgctgaatgagatccggaggctggagcgactggaccacctggcagagaagttccggcagaaggcctccatccacgaggcctggactgacggcaaagaggccatgctgcgacagaaggactatgagaccgccaccctctcggagatcaaggccctgctcaagaagcatgaggccttcgagagtgacctggctgcccaccaggaccgtgtggagcagattgccgccatcgcacaggagctcaatgagctggactattatgactcacccagtgtcaacgcccgttgccaaaagatctgtgaccagtgggacaatctgggggccctaactcagaagcgaagggaagctctggagcggaccgagaaactgctggagaccattgaccagctgtacttggagtatgccaagcgggctgcacccttcaacaactggatggagggggccatggaggacctgcaggacaccttcattgtgcacaccattgaggagatccagggactgaccacagcccatgagcagttcaaggccaccctccctgatgccgacaaggagcgcctggccatcctgggcatccacaatgaggtgtccaagattgtccagacctaccacgtcaatatggcgggcaccaacccctacacaaccatcacgcctcaggagatcaatggcaaatgggaccacctcagccacctgcggcagtatgagaagagcatcgtcaactacaagccaaagattgatcagctggagggcgaccaccagctcatccaggaggcgctcatcttcgacaacaagcacaccaactacaccatggagcacatccgtgtgggctgggagcagctgctcaccaccatcgccaggaccatcaatgaggtagagaaccagatcctgacccgggatgccaagggcatcagccaggagcagatgaatgagttccgggcctccttcaaccactttgaccgggatcactccggcacactgggtcccgaggagttcaaagcctgcctcatcagcttgggttatgatattggcaacgacccccagggagaagcagaatttgcccgcatcatgagcattgtggaccccaaccgcctgggggtagtgacattccaggccttcattgacttcatgtcccgcgagacagccgacacagatacagcagaccaagtcatggcttccttcaagatcctggctggggacaagaactacattaccatggacgagctgcgccgcgagctgccacccgaccaggctgagtactgcatcgcgcggatggccccctacaccggccccgactccgtgccaggtgctctggactacatgtccttctccacggcgctgtacggcgagagtgacctctaatccaccccgcccggccgccctcgtcttgtgcgccgtgccctgccttgcacctccgccgtcgcccatctcctgcctgggttcggtttcagctcccagcctccacccgggtgagctggggcccacgtggcatcgatcctccctgcccgcgaagtgacagtttacaaaattattttctgcaaaaaagaaaaaaaagttacgttaaaaaccaaaaaactacatattttattatagaaaaagtattttttctccaccagacaaatggaaaaaaagaggaaagattaactatttgcaccgaaatgtcttgttttgttgcgacataggaaaataaccaagcacaaagttatattccatcctttttactgatttttttttcttctatctgttccatctgctgtattcatttctccaatctcatgtccattttggtgtgggagtcggggtagggggtactcttgtcaaaaggcacattggtgcatgtgtgtttgctagctcacttgtccatgaaaatattttatgatattaaagaaaatcttttgaaatggctgttttttaaggaagagaatttatgtggcttctcatttttaaatcccctcagaggtgtgactagtctctttatcagcacacacttaaaaaatttttaatattgtctattaaaaataggacaaacttggagagtatggacaactttgatattgcttggcacagatggtattaaaaaaaccacactcctatgacagctctttgcctgctccttgcttgatgttttctggaagtgtgtgtggggtcaaggatggtgtggggcacctgtatctactcctaatgtttttgaccctgctgtgttcaatcttcttacacttcagtttcttcattttaaaaaggaaaaggtaatttcttcacagtctcctatgagttggacagaaagtcatggatgtgtaaaggacttcttgatgataagccccaccttcatttttccacggcaccaaacagccctgtgacatctgcattcaccccactcgtttttatttttgctgcagtgaacagcttgagttgtctcttaagagtcatctcatcccttgctattcgagatgacccacagatggcagctgttcagcatcacctgggagttcattggaaatacagaatctcaggccccacccctgaatgtcgaatactgtgtgtactgctctagcttctccagagtaaaagatagtctctataggatgccgtctgctctggcaccaggccccctgagcccatgccttttatctgacgtttgttttgcaacccattacatcacttgcccccgggcatcctttaaatttcatccttggctaattctcattgtaaccggttccagcttgctttaaatgattgggtggatggaattctccccattgacaattgacaggtggcaattaattgttcatgcctcagtgggatgaatccattacatctctttcctgcctaatatttttatctacctccgacttttttgtagggactttgttgatatcctcatgaaggcccatctctcctctctctggcttgtccatcccttgacaaaaccttaatgactgttctgggtaccaaatctgtggcaggagtgtgacccagctgccacccacctcctccatcactggaccagctcatagttgtcccttggacatggggttagtgcccaacaagtgtagtcatttggctaagtgagttactaggagggagaacagattcaatttcctgaggtggtgaggagagactgaaggctttgccagttctttggcctatgccaggctctctggtacttctgcnggtggcatgagctgtgtgaagcgcctctaaatttaaggctccaaagctctccaacacaaacaagactttagggtctgcgttatggacgccaagggaagaaatacaacctcaacatcagtgcctgtcaagggaggcagatgtgagctcgtctgcctgccaccggccatttggactaccttgggcaagtgacctccttaaatggggccgataatgttgctttccttctctccctggcacacagtaggcatttaataagtggcaatgggtattgtccctagagttgtataaaaaaccagctctagcagggcgtggtggtgcatgtccgtagtgccagctgcttgggaggctgaggtgaggatcacttgagcccaggagttttgagtccagcctgaacaacataacaagaccctgtctgtaaaatgggggaaaaagtcagctgtgctttgttatgctgtttaanatattcttaaagaaaaaggcctgattacagaaaaataccattaaggggaaccctctttcagtctctgtgctgagggtagtagtaggctgagtaatggtcccccaagatatccatttccgagtccctggaacccatgattgttaattcatatgacaaataagactttgcagatgggattaagaatcttgaggtggggagattggttctggattatctgggtgggtccttagggagcaggcatgtcggcatcagaggaaatgtgacgacagaagcaggggttggagtgatgtgaggccacaagccaatgaatgcggacagcctctagaagctagaaaagccagggaaacagattctccctgagagcctccagatagaatgcaggtctacagacccattttgggtctctattctccagaacttgagataatacgtttgtgttgttttaagccacttcatttgtgataatttgttacagcaaccataggaagctaatatgtgctccatcgttcatgccctggggagctggctgcctccctgacgtcagngacccgtggtataggcatgacctgctggagaaactgccctagcttcaaaggcctgagtgtgcaacattggcccttgggaggctgccttagctgctggacttgatctcctaagccttaaaagcgccattcatggagaggggagaaggaagcttccaagttctgagagcccaaaaaggccagaatagctgggcccagcaggagatgtaaggcttcctgttgtctcagatgcaggagccagagggcagcccagctccaggtaggcaccagccacagaactggaaagcccttgggaggctgaggtcctgccttctctatagcttatcttggcccctctctgtgtgtcagcctccctcctctccctgcagcccagctttgggtgcacacctccccatggtggcagaggtcaattccacagtgcctagtgttgacattttcttgacacgagactagtcccaattccaaatgtccaggaggcacttggcccagtctgacctggtgtgataaagtgatgcctgtcagtggataaggctggggccnttgctcatgggctagattgggtatcacctttaggataacccaaaaggtggcctcataagaactgtctcagttcatcaattttcacattttagcatctctgatattgagatagagcatacaattgatctcactttaggattaatggtgtcttacaattgctgttggccagatagcagtcatgacttagtgtcattgcctgcctatttgagacaggaatgtgagtcctgtcttttgtctcaaaaacttccattantcttacctcctggtaagatcaagctccagtatcaaaagttgcatagtgggtacccagagagaaaatgctgatgatcatagtgtagtactggcttacgaaatgctagccagggtgcaatggctcatgcctataatcccagcactttggcaggctgaggtgggcggatcgctcgagcccagaagttcaagaccagcctgagcaacatgatgaaactccgtctttactaaaaatacaaaattagccggatgtggtgccgcatgcctgtaatcccagctacttgggtggctgaggcaggcgaattacttcaacctgggagatggaggttgcagtgagccgagatcatgctgaaggaaggaagggagtaagggagggagggaggcgagagagagagaaagaaaaagaaatgctgcattttcagttctattgatggcacagcaggcaacggtgtgtgaaaaacaggcacttaaagactctgggccgggcacggtggcccatgcctgtaatcccagcactttgggaggctgaggcgggtgaatcatgaggtcaggagttcgagactagcctgaccaacatggtgaaactatgtctctactaaaaatacaaaaaattagctgggtgtggtggtgggtgcctgtaatctcagctactcgggaggctgaggcaggagaattgcttgaacccgggaggcggaggttgcggtgagccgagatcgcgctactgcactccagcctgggtgacagtgtgaaactttgtctc

SEQ ID NO: 432560 - DNA, 6679 bp, Homo sapiens
  misc_feature (4128)..(4128): n is a, c, g, or t
  misc_feature (4588)..(4588): n is a, c, g, or t
  misc_feature (5133)..(5133): n is a, c, g, or t
  misc_feature (5670)..(5670): n is a, c, g, or t
  misc_feature (5923)..(5923): n is a, c, g, or t
aacaacatgtgtatgagtcagtatcccgcttgtaatttcagtgccgggacgagagctttagtcgttaagacttcagccaaggaagggctgctcctgtggtgtcagagaaagacagccccttacaaaaatgtcaacatccagaacttccacataagctggaaggatggcctcggcttctgtgctttgatccaccgacaccggcccgagctgattgactacgggaagctgcggaaggatgatccactcacaaatctgaatacggcttttgacgtggcagagaagtacctggacatccccaagatgctggatgccgaagacatcgttggaactgcccgaccggatgagaaagccatcatgacttacgtgtctagcttctaccacgccttctctggagcccagaaggcggagacagcagccaatcgcatctgcaaggtgttggccgtcaaccaggagaacgagcagcttatggaagactacgagaagctggccagtgatctgttggagtggatccgccgcacaatcccgtggctggagaaccgggtgcccgagaacaccatgcatgccatgcaacagaagctggaggacttccgggactaccggcgcctgcacaagccgcccaaggtgcaggagaagtgccagctggagatcaacttcaacacgctgcagaccaagctgcggctcagcaaccggcctgccttcatgccctctgagggcaggatggtctcggacatcaacaatgcctggggctgcctggagcaggtggagaagggctatgaggagtggttgctgaatgagatccggaggctggagcgactggaccacctggcagagaagttccggcagaaggcctccatccacgaggcctggactgacggcaaagaggccatgctgcgacagaaggactatgagaccgccaccctctcggagatcaaggccctgctcaagaagcatgaggccttcgagagtgacctggctgcccaccaggaccgtgtggagcagattgccgccatcgcacaggagctcaatgagctggactattatgactcacccagtgtcaacgcccgttgccaaaagatctgtgaccagtgggacaatctgggggccctaactcagaagcgaagggaagctctggagcggaccgagaaactgctggagaccattgaccagctgtacttggagtatgccaagcgggctgcacccttcaacaactggatggagggggccatggaggacctgcaggacaccttcattgtgcacaccattgaggagatccagggactgaccacagcccatgagcagttcaaggccaccctccctgatgccgacaaggagcgcctggccatcctgggcatccacaatgaggtgtccaagattgtccagacctaccacgtcaatatggcgggcaccaacccctacacaaccatcacgcctcaggagatcaatggcaaatgggaccacgtgcggcagctggtgcctcggagggaccaagctctgacggaggagcatgcccgacagcagcacaatgagaggctacgcaagcagtttggagcccaggccaatgtcatcgggccctggatccagaccaagatggaggagatcgggaggatctccattgagatgcatgggaccctggaggaccagctcagccacctgcggcagtatgagaagagcatcgtcaactacaagccaaagattgatcagctggagggcgaccaccagctcatccaggaggcgctcatcttcgacaacaagcacaccaactacaccatggagcacatccgtgtgggctgggagcagctgctcaccaccatcgccaggaccatcaatgaggtagagaaccagatcctgacccgggatgccaagggcatcagccaggagcagatgaatgagttccgggcctccttcaaccactttgaccgggatcactccggcacactgggtcccgaggagttcaaagcctgcctcatcagcttgggttatgatattggcaacgacccccagggagaagcagaatttgcccgcatcatgagcattgtggaccccaaccgcctgggggtagtgacattccaggccttcattgacttcatgtcccgcgagacagccgacacagatacagcagaccaagtcatggcttccttcaagatcctggctggggacaagaactacattaccatggacgagctgcgccgcgagctgccacccgaccaggctgagtactgcatcgcgcggatggccccctacaccggccccgactccgtgccaggtgctctggactacatgtccttctccacggcgctgtacggcgagagtgacctctaatccaccccgcccggccgccctcgtcttgtgcgccgtgccctgccttgcacctccgccgtcgcccatctcctgcctgggttcggtttcagctcccagcctccacccgggtgagctggggcccacgtggcatcgatcctccctgcccgcgaagtgacagtttacaaaattattttctgcaaaaaagaaaaaaaagttacgttaaaaaccaaaaaactacatattttattatagaaaaagtattttttctccaccagacaaatggaaaaaaagaggaaagattaactatttgcaccgaaatgtcttgttttgttgcgacataggaaaataaccaagcacaaagttatattccatcctttttactgatttttttttcttctatctgttccatctgctgtattcatttctccaatctcatgtccattttggtgtgggagtcggggtagggggtactcttgtcaaaaggcacattggtgcatgtgtgtttgctagctcacttgtccatgaaaatattttatgatattaaagaaaatcttttgaaatggctgttttttaaggaagagaatttatgtggcttctcatttttaaatcccctcagaggtgtgactagtctctttatcagcacacacttaaaaaatttttaatattgtctattaaaaataggacaaacttggagagtatggacaactttgatattgcttggcacagatggtattaaaaaaaccacactcctatgacagctctttgcctgctccttgcttgatgttttctggaagtgtgtgtggggtcaaggatggtgtggggcacctgtatctactcctaatgtttttgaccctgctgtgttcaatcttcttacacttcagtttcttcattttaaaaaggaaaaggtaatttcttcacagtctcctatgagttggacagaaagtcatggatgtgtaaaggacttcttgatgataagccccaccttcatttttccacggcaccaaacagccctgtgacatctgcattcaccccactcgtttttatttttgctgcagtgaacagcttgagttgtctcttaagagtcatctcatcccttgctattcgagatgacccacagatggcagctgttcagcatcacctgggagttcattggaaatacagaatctcaggccccacccctgaatgtcgaatactgtgtgtactgctctagcttctccagagtaaaagatagtctctataggatgccgtctgctctggcaccaggccccctgagcccatgccttttatctgacgtttgttttgcaacccattacatcacttgcccccgggcatcctttaaatttcatccttggctaattctcattgtaaccggttccagcttgctttaaatgattgggtggatggaattctccccattgacaattgacaggtggcaattaattgttcatgcctcagtgggatgaatccattacatctctttcctgcctaatatttttatctacctccgacttttttgtagggactttgttgatatcctcatgaaggcccatctctcctctctctggcttgtccatcccttgacaaaaccttaatgactgttctgggtaccaaatctgtggcaggagtgtgacccagctgccacccacctcctccatcactggaccagctcatagttgtcccttggacatggggttagtgcccaacaagtgtagtcatttggctaagtgagttactaggagggagaacagattcaatttcctgaggtggtgaggagagactgaaggctttgccagttctttggcctatgccaggctctctggtacttctgcnggtggcatgagctgtgtgaagcgcctctaaatttaaggctccaaagctctccaacacaaacaagactttagggtctgcgttatggacgccaagggaagaaatacaacctcaacatcagtgcctgtcaagggaggcagatgtgagctcgtctgcctgccaccggccatttggactaccttgggcaagtgacctccttaaatggggccgataatgttgctttccttctctccctggcacacagtaggcatttaataagtggcaatgggtattgtccctagagttgtataaaaaaccagctctagcagggcgtggtggtgcatgtccgtagtgccagctgcttgggaggctgaggtgaggatcacttgagcccaggagttttgagtccagcctgaacaacataacaagaccctgtctgtaaaatgggggaaaaagtcagctgtgctttgttatgctgtttaanatattcttaaagaaaaaggcctgattacagaaaaataccattaaggggaaccctctttcagtctctgtgctgagggtagtagtaggctgagtaatggtcccccaagatatccatttccgagtccctggaacccatgattgttaattcatatgacaaataagactttgcagatgggattaagaatcttgaggtggggagattggttctggattatctgggtgggtccttagggagcaggcatgtcggcatcagaggaaatgtgacgacagaagcaggggttggagtgatgtgaggccacaagccaatgaatgcggacagcctctagaagctagaaaagccagggaaacagattctccctgagagcctccagatagaatgcaggtctacagacccattttgggtctctattctccagaacttgagataatacgtttgtgttgttttaagccacttcatttgtgataatttgttacagcaaccataggaagctaatatgtgctccatcgttcatgccctggggagctggctgcctccctgacgtcagngacccgtggtataggcatgacctgctggagaaactgccctagcttcaaaggcctgagtgtgcaacattggcccttgggaggctgccttagctgctggacttgatctcctaagccttaaaagcgccattcatggagaggggagaaggaagcttccaagttctgagagcccaaaaaggccagaatagctgggcccagcaggagatgtaaggcttcctgttgtctcagatgcaggagccagagggcagcccagctccaggtaggcaccagccacagaactggaaagcccttgggaggctgaggtcctgccttctctatagcttatcttggcccctctctgtgtgtcagcctccctcctctccctgcagcccagctttgggtgcacacctccccatggtggcagaggtcaattccacagtgcctagtgttgacattttcttgacacgagactagtcccaattccaaatgtccaggaggcacttggcccagtctgacctggtgtgataaagtgatgcctgtcagtggataaggctggggccnttgctcatgggctagattgggtatcacctttaggataacccaaaaggtggcctcataagaactgtctcagttcatcaattttcacattttagcatctctgatattgagatagagcatacaattgatctcactttaggattaatggtgtcttacaattgctgttggccagatagcagtcatgacttagtgtcattgcctgcctatttgagacaggaatgtgagtcctgtcttttgtctcaaaaacttccattantcttacctcctggtaagatcaagctccagtatcaaaagttgcatagtgggtacccagagagaaaatgctgatgatcatagtgtagtactggcttacgaaatgctagccagggtgcaatggctcatgcctataatcccagcactttggcaggctgaggtgggcggatcgctcgagcccagaagttcaagaccagcctgagcaacatgatgaaactccgtctttactaaaaatacaaaattagccggatgtggtgccgcatgcctgtaatcccagctacttgggtggctgaggcaggcgaattacttcaacctgggagatggaggttgcagtgagccgagatcatgctgaaggaaggaagggagtaagggagggagggaggcgagagagagagaaagaaaaagaaatgctgcattttcagttctattgatggcacagcaggcaacggtgtgtgaaaaacaggcacttaaagactctgggccgggcacggtggcccatgcctgtaatcccagcactttgggaggctgaggcgggtgaatcatgaggtcaggagttcgagactagcctgaccaacatggtgaaactatgtctctactaaaaatacaaaaaattagctgggtgtggtggtgggtgcctgtaatctcagctactcgggaggctgaggcaggagaattgcttgaacccgggaggcggaggttgcggtgagccgagatcgcgctactgcactccagcctgggtgacagtgtgaaactttgtctc

SEQ ID NO: 432561 - DNA, 7127 bp, Homo sapiens
  misc_feature (4576)..(4576): n is a, c, g, or t
  misc_feature (5036)..(5036): n is a, c, g, or t
  misc_feature (5581)..(5581): n is a, c, g, or t
  misc_feature (6118)..(6118): n is a, c, g, or t
  misc_feature (6371)..(6371): n is a, c, g, or t
agcgctagtgtgtccgcctagttcaagtgtgcgtggagattaggtccaagcgcccgcccagaggcaggcagtccgcgagcccagccgccgctgtcgccgccagtagcagccttcgccagcagcgccgcggcggaaccgggcgcaggggagcgagcccggccccgccagcccagcccagcccagccctactccctccccacgccagggcagcagccgttgctcagagagaaggtggaggaagaaatccagaccctagcacgcgcgcaccatcatggaccattatgattctcagcaaaccaacgattacatgcagccagaagaggactgggaccgggacctgctcctggacccggcctgggagaagcagcagagaaagacattcacggcatggtgtaactcccacctccggaaggcggggacacagatcgagaacatcgaagaggacttccgggatggcctgaagctcatgctgctgctggaggtcatctcaggtgaacgcttggccaagccagagcgaggcaagatgagagtgcacaagatctccaacgtcaacaaggccctggatttcatagccagcaaaggcgtcaaactggtgtccatcggagccgaagaaatcgtggatgggaatgtgaagatgaccctgggcatgatctggaccatcatcctgcgctttgccatccaggacatctccgtggaagagacttcagccaaggaagggctgctcctgtggtgtcagagaaagacagccccttacaaaaatgtcaacatccagaacttccacataagctggaaggatggcctcggcttctgtgctttgatccaccgacaccggcccgagctgattgactacgggaagctgcggaaggatgatccactcacaaatctgaatacggcttttgacgtggcagagaagtacctggacatccccaagatgctggatgccgaagacatcgttggaactgcccgaccggatgagaaagccatcatgacttacgtgtctagcttctaccacgccttctctggagcccagaaggcggagacagcagccaatcgcatctgcaaggtgttggccgtcaaccaggagaacgagcagcttatggaagactacgagaagctggccagtgatctgttggagtggatccgccgcacaatcccgtggctggagaaccgggtgcccgagaacaccatgcatgccatgcaacagaagctggaggacttccgggactaccggcgcctgcacaagccgcccaaggtgcaggagaagtgccagctggagatcaacttcaacacgctgcagaccaagctgcggctcagcaaccggcctgccttcatgccctctgagggcaggatggtctcggacatcaacaatgcctggggctgcctggagcaggtggagaagggctatgaggagtggttgctgaatgagatccggaggctggagcgactggaccacctggcagagaagttccggcagaaggcctccatccacgaggcctggactgacggcaaagaggccatgctgcgacagaaggactatgagaccgccaccctctcggagatcaaggccctgctcaagaagcatgaggccttcgagagtgacctggctgcccaccaggaccgtgtggagcagattgccgccatcgcacaggagctcaatgagctggactattatgactcacccagtgtcaacgcccgttgccaaaagatctgtgaccagtgggacaatctgggggccctaactcagaagcgaagggaagctctggagcggaccgagaaactgctggagaccattgaccagctgtacttggagtatgccaagcgggctgcacccttcaacaactggatggagggggccatggaggacctgcaggacaccttcattgtgcacaccattgaggagatccaggtgcggcagctggtgcctcggagggaccaagctctgacggaggagcatgcccgacagcagcacaatgagaggctacgcaagcagtttggagcccaggccaatgtcatcgggccctggatccagaccaagatggaggagatcgggaggatctccattgagatgcatgggaccctggaggaccagctcagccacctgcggcagtatgagaagagcatcgtcaactacaagccaaagattgatcagctggagggcgaccaccagctcatccaggaggcgctcatcttcgacaacaagcacaccaactacaccatggagcacatccgtgtgggctgggagcagctgctcaccaccatcgccaggaccatcaatgaggtagagaaccagatcctgacccgggatgccaagggcatcagccaggagcagatgaatgagttccgggcctccttcaaccactttgaccgggatcactccggcacactgggtcccgaggagttcaaagcctgcctcatcagcttgggttatgatattggcaacgacccccagggagaagcagaatttgcccgcatcatgagcattgtggaccccaaccgcctgggggtagtgacattccaggccttcattgacttcatgtcccgcgagacagccgacacagatacagcagaccaagtcatggcttccttcaagatcctggctggggacaagaactacattaccatggacgagctgcgccgcgagctgccacccgaccaggctgagtactgcatcgcgcggatggccccctacaccggccccgactccgtgccaggtgctctggactacatgtccttctccacggcgctgtacggcgagagtgacctctaatccaccccgcccggccgccctcgtcttgtgcgccgtgccctgccttgcacctccgccgtcgcccatctcctgcctgggttcggtttcagctcccagcctccacccgggtgagctggggcccacgtggcatcgatcctccctgcccgcgaagtgacagtttacaaaattattttctgcaaaaaagaaaaaaaagttacgttaaaaaccaaaaaactacatattttattatagaaaaagtattttttctccaccagacaaatggaaaaaaagaggaaagattaactatttgcaccgaaatgtcttgttttgttgcgacataggaaaataaccaagcacaaagttatattccatcctttttactgatttttttttcttctatctgttccatctgctgtattcatttctccaatctcatgtccattttggtgtgggagtcggggtagggggtactcttgtcaaaaggcacattggtgcatgtgtgtttgctagctcacttgtccatgaaaatattttatgatattaaagaaaatcttttgaaatggctgttttttaaggaagagaatttatgtggcttctcatttttaaatcccctcagaggtgtgactagtctctttatcagcacacacttaaaaaatttttaatattgtctattaaaaataggacaaacttggagagtatggacaactttgatattgcttggcacagatggtattaaaaaaaccacactcctatgacagctctttgcctgctccttgcttgatgttttctggaagtgtgtgtggggtcaaggatggtgtggggcacctgtatctactcctaatgtttttgaccctgctgtgttcaatcttcttacacttcagtttcttcattttaaaaaggaaaaggtaatttcttcacagtctcctatgagttggacagaaagtcatggatgtgtaaaggacttcttgatgataagccccaccttcatttttccacggcaccaaacagccctgtgacatctgcattcaccccactcgtttttatttttgctgcagtgaacagcttgagttgtctcttaagagtcatctcatcccttgctattcgagatgacccacagatggcagctgttcagcatcacctgggagttcattggaaatacagaatctcaggccccacccctgaatgtcgaatactgtgtgtactgctctagcttctccagagtaaaagatagtctctataggatgccgtctgctctggcaccaggccccctgagcccatgccttttatctgacgtttgttttgcaacccattacatcacttgcccccgggcatcctttaaatttcatccttggctaattctcattgtaaccggttccagcttgctttaaatgattgggtggatggaattctccccattgacaattgacaggtggcaattaattgttcatgcctcagtgggatgaatccattacatctctttcctgcctaatatttttatctacctccgacttttttgtagggactttgttgatatcctcatgaaggcccatctctcctctctctggcttgtccatcccttgacaaaaccttaatgactgttctgggtaccaaatctgtggcaggagtgtgacccagctgccacccacctcctccatcactggaccagctcatagttgtcccttggacatggggttagtgcccaacaagtgtagtcatttggctaagtgagttactaggagggagaacagattcaatttcctgaggtggtgaggagagactgaaggctttgccagttctttggcctatgccaggctctctggtacttctgcnggtggcatgagctgtgtgaagcgcctctaaatttaaggctccaaagctctccaacacaaacaagactttagggtctgcgttatggacgccaagggaagaaatacaacctcaacatcagtgcctgtcaagggaggcagatgtgagctcgtctgcctgccaccggccatttggactaccttgggcaagtgacctccttaaatggggccgataatgttgctttccttctctccctggcacacagtaggcatttaataagtggcaatgggtattgtccctagagttgtataaaaaaccagctctagcagggcgtggtggtgcatgtccgtagtgccagctgcttgggaggctgaggtgaggatcacttgagcccaggagttttgagtccagcctgaacaacataacaagaccctgtctgtaaaatgggggaaaaagtcagctgtgctttgttatgctgtttaanatattcttaaagaaaaaggcctgattacagaaaaataccattaaggggaaccctctttcagtctctgtgctgagggtagtagtaggctgagtaatggtcccccaagatatccatttccgagtccctggaacccatgattgttaattcatatgacaaataagactttgcagatgggattaagaatcttgaggtggggagattggttctggattatctgggtgggtccttagggagcaggcatgtcggcatcagaggaaatgtgacgacagaagcaggggttggagtgatgtgaggccacaagccaatgaatgcggacagcctctagaagctagaaaagccagggaaacagattctccctgagagcctccagatagaatgcaggtctacagacccattttgggtctctattctccagaacttgagataatacgtttgtgttgttttaagccacttcatttgtgataatttgttacagcaaccataggaagctaatatgtgctccatcgttcatgccctggggagctggctgcctccctgacgtcagngacccgtggtataggcatgacctgctggagaaactgccctagcttcaaaggcctgagtgtgcaacattggcccttgggaggctgccttagctgctggacttgatctcctaagccttaaaagcgccattcatggagaggggagaaggaagcttccaagttctgagagcccaaaaaggccagaatagctgggcccagcaggagatgtaaggcttcctgttgtctcagatgcaggagccagagggcagcccagctccaggtaggcaccagccacagaactggaaagcccttgggaggctgaggtcctgccttctctatagcttatcttggcccctctctgtgtgtcagcctccctcctctccctgcagcccagctttgggtgcacacctccccatggtggcagaggtcaattccacagtgcctagtgttgacattttcttgacacgagactagtcccaattccaaatgtccaggaggcacttggcccagtctgacctggtgtgataaagtgatgcctgtcagtggataaggctggggccnttgctcatgggctagattgggtatcacctttaggataacccaaaaggtggcctcataagaactgtctcagttcatcaattttcacattttagcatctctgatattgagatagagcatacaattgatctcactttaggattaatggtgtcttacaattgctgttggccagatagcagtcatgacttagtgtcattgcctgcctatttgagacaggaatgtgagtcctgtcttttgtctcaaaaacttccattantcttacctcctggtaagatcaagctccagtatcaaaagttgcatagtgggtacccagagagaaaatgctgatgatcatagtgtagtactggcttacgaaatgctagccagggtgcaatggctcatgcctataatcccagcactttggcaggctgaggtgggcggatcgctcgagcccagaagttcaagaccagcctgagcaacatgatgaaactccgtctttactaaaaatacaaaattagccggatgtggtgccgcatgcctgtaatcccagctacttgggtggctgaggcaggcgaattacttcaacctgggagatggaggttgcagtgagccgagatcatgctgaaggaaggaagggagtaagggagggagggaggcgagagagagagaaagaaaaagaaatgctgcattttcagttctattgatggcacagcaggcaacggtgtgtgaaaaacaggcacttaaagactctgggccgggcacggtggcccatgcctgtaatcccagcactttgggaggctgaggcgggtgaatcatgaggtcaggagttcgagactagcctgaccaacatggtgaaactatgtctctactaaaaatacaaaaaattagctgggtgtggtggtgggtgcctgtaatctcagctactcgggaggctgaggcaggagaattgcttgaacccgggaggcggaggttgcggtgagccgagatcgcgctactgcactccagcctgggtgacagtgtgaaactttgtctc

SEQ ID NO: 432562 - DNA, 7017 bp, Homo sapiens
  misc_feature (309)..(309): n is a, c, g, or t
  misc_feature (4466)..(4466): n is a, c, g, or t
  misc_feature (4926)..(4926): n is a, c, g, or t
  misc_feature (5471)..(5471): n is a, c, g, or t
  misc_feature (6008)..(6008): n is a, c, g, or t
  misc_feature (6261)..(6261): n is a, c, g, or t
ggagatggactcagtagcggactgtctaggaaggtcactcatcatgggtgagactcatcgagagcacaggcgagcatcgggaggccaagcactgagagatgccacaatgatctccccaacgctccacagcgaacggcacgctggtaattctacgagtaacgcgggcatcaggacggtcaaacatggtgctcgcgatcggcaggcgcgacaggagatctcgatgcgatgtgcgagaatgctgcacacgtatgacaccgtgggccattgcagtctggcactgcattcactccttgtggcactttgcccccntctcacgtgcagcaatgtccagagtgcgcatgaggagaacgttctggcccaaggcaaggtggactggctccctgcagcgcctgtcgaggagtatacgtgacacgttcctcttttatcacatacatatgtgctccacaactaattcacacgcaaactctccctatgatacatcctgggaagggagtgggccgtgcggtaatgtgctggtgcgtttgatccaccgacaccggcccgagctgattgactacgggaagctgcggaaggatgatccactcacaaatctgaatacggcttttgacgtggcagagaagtacctggacatccccaagatgctggatgccgaagacatcgttggaactgcccgaccggatgagaaagccatcatgacttacgtgtctagcttctaccacgccttctctggagcccagaaggcggagacagcagccaatcgcatctgcaaggtgttggccgtcaaccaggagaacgagcagcttatggaagactacgagaagctggccagtgatctgttggagtggatccgccgcacaatcccgtggctggagaaccgggtgcccgagaacaccatgcatgccatgcaacagaagctggaggacttccgggactaccggcgcctgcacaagccgcccaaggtgcaggagaagtgccagctggagatcaacttcaacacgctgcagaccaagctgcggctcagcaaccggcctgccttcatgccctctgagggcaggatggtctcggacatcaacaatgcctggggctgcctggagcaggtggagaagggctatgaggagtggttgctgaatgagatccggaggctggagcgactggaccacctggcagagaagttccggcagaaggcctccatccacgaggcctggactgacggcaaagaggccatgctgcgacagaaggactatgagaccgccaccctctcggagatcaaggccctgctcaagaagcatgaggccttcgagagtgacctggctgcccaccaggaccgtgtggagcagattgccgccatcgcacaggagctcaatgagctggactattatgactcacccagtgtcaacgcccgttgccaaaagatctgtgaccagtgggacaatctgggggccctaactcagaagcgaagggaagctctggagcggaccgagaaactgctggagaccattgaccagctgtacttggagtatgccaagcgggctgcacccttcaacaactggatggagggggccatggaggacctgcaggacaccttcattgtgcacaccattgaggagatccagggactgaccacagcccatgagcagttcaaggccaccctccctgatgccgacaaggagcgcctggccatcctgggcatccacaatgaggtgtccaagattgtccagacctaccacgtcaatatggcgggcaccaacccctacacaaccatcacgcctcaggagatcaatggcaaatgggaccacgtgcggcagctggtgcctcggagggaccaagctctgacggaggagcatgcccgacagcagcacaatgagaggctacgcaagcagtttggagcccaggccaatgtcatcgggccctggatccagaccaagatggaggagatcgggaggatctccattgagatgcatgggaccctggaggaccagctcagccacctgcggcagtatgagaagagcatcgtcaactacaagccaaagattgatcagctggagggcgaccaccagctcatccaggaggcgctcatcttcgacaacaagcacaccaactacaccatggagcacatccgtgtgggctgggagcagctgctcaccaccatcgccaggaccatcaatgaggtagagaaccagatcctgacccgggatgccaagggcatcagccaggagcagatgaatgagttccgggcctccttcaaccactttgaccgggatcactccggcacactgggtcccgaggagttcaaagcctgcctcatcagcttgggttatgatattggcaacgacccccagggagaagcagaatttgcccgcatcatgagcattgtggaccccaaccgcctgggggtagtgacattccaggccttcattgacttcatgtcccgcgagacagccgacacagatacagcagaccaagtcatggcttccttcaagatcctggctggggacaagaactacattaccatggacgagctgcgccgcgagctgccacccgaccaggctgagtactgcatcgcgcggatggccccctacaccggccccgactccgtgccaggtgctctggactacatgtccttctccacggcgctgtacggcgagagtgacctctaatccaccccgcccggccgccctcgtcttgtgcgccgtgccctgccttgcacctccgccgtcgcccatctcctgcctgggttcggtttcagctcccagcctccacccgggtgagctggggcccacgtggcatcgatcctccctgcccgcgaagtgacagtttacaaaattattttctgcaaaaaagaaaaaaaagttacgttaaaaaccaaaaaactacatattttattatagaaaaagtattttttctccaccagacaaatggaaaaaaagaggaaagattaactatttgcaccgaaatgtcttgttttgttgcgacataggaaaataaccaagcacaaagttatattccatcctttttactgatttttttttcttctatctgttccatctgctgtattcatttctccaatctcatgtccattttggtgtgggagtcggggtagggggtactcttgtcaaaaggcacattggtgcatgtgtgtttgctagctcacttgtccatgaaaatattttatgatattaaagaaaatcttttgaaatggctgttttttaaggaagagaatttatgtggcttctcatttttaaatcccctcagaggtgtgactagtctctttatcagcacacacttaaaaaatttttaatattgtctattaaaaataggacaaacttggagagtatggacaactttgatattgcttggcacagatggtattaaaaaaaccacactcctatgacagctctttgcctgctccttgcttgatgttttctggaagtgtgtgtggggtcaaggatggtgtggggcacctgtatctactcctaatgtttttgaccctgctgtgttcaatcttcttacacttcagtttcttcattttaaaaaggaaaaggtaatttcttcacagtctcctatgagttggacagaaagtcatggatgtgtaaaggacttcttgatgataagccccaccttcatttttccacggcaccaaacagccctgtgacatctgcattcaccccactcgtttttatttttgctgcagtgaacagcttgagttgtctcttaagagtcatctcatcccttgctattcgagatgacccacagatggcagctgttcagcatcacctgggagttcattggaaatacagaatctcaggccccacccctgaatgtcgaatactgtgtgtactgctctagcttctccagagtaaaagatagtctctataggatgccgtctgctctggcaccaggccccctgagcccatgccttttatctgacgtttgttttgcaacccattacatcacttgcccccgggcatcctttaaatttcatccttggctaattctcattgtaaccggttccagcttgctttaaatgattgggtggatggaattctccccattgacaattgacaggtggcaattaattgttcatgcctcagtgggatgaatccattacatctctttcctgcctaatatttttatctacctccgacttttttgtagggactttgttgatatcctcatgaaggcccatctctcctctctctggcttgtccatcccttgacaaaaccttaatgactgttctgggtaccaaatctgtggcaggagtgtgacccagctgccacccacctcctccatcactggaccagctcatagttgtcccttggacatggggttagtgcccaacaagtgtagtcatttggctaagtgagttactaggagggagaacagattcaatttcctgaggtggtgaggagagactgaaggctttgccagttctttggcctatgccaggctctctggtacttctgcnggtggcatgagctgtgtgaagcgcctctaaatttaaggctccaaagctctccaacacaaacaagactttagggtctgcgttatggacgccaagggaagaaatacaacctcaacatcagtgcctgtcaagggaggcagatgtgagctcgtctgcctgccaccggccatttggactaccttgggcaagtgacctccttaaatggggccgataatgttgctttccttctctccctggcacacagtaggcatttaataagtggcaatgggtattgtccctagagttgtataaaaaaccagctctagcagggcgtggtggtgcatgtccgtagtgccagctgcttgggaggctgaggtgaggatcacttgagcccaggagttttgagtccagcctgaacaacataacaagaccctgtctgtaaaatgggggaaaaagtcagctgtgctttgttatgctgtttaanatattcttaaagaaaaaggcctgattacagaaaaataccattaaggggaaccctctttcagtctctgtgctgagggtagtagtaggctgagtaatggtcccccaagatatccatttccgagtccctggaacccatgattgttaattcatatgacaaataagactttgcagatgggattaagaatcttgaggtggggagattggttctggattatctgggtgggtccttagggagcaggcatgtcggcatcagaggaaatgtgacgacagaagcaggggttggagtgatgtgaggccacaagccaatgaatgcggacagcctctagaagctagaaaagccagggaaacagattctccctgagagcctccagatagaatgcaggtctacagacccattttgggtctctattctccagaacttgagataatacgtttgtgttgttttaagccacttcatttgtgataatttgttacagcaaccataggaagctaatatgtgctccatcgttcatgccctggggagctggctgcctccctgacgtcagngacccgtggtataggcatgacctgctggagaaactgccctagcttcaaaggcctgagtgtgcaacattggcccttgggaggctgccttagctgctggacttgatctcctaagccttaaaagcgccattcatggagaggggagaaggaagcttccaagttctgagagcccaaaaaggccagaatagctgggcccagcaggagatgtaaggcttcctgttgtctcagatgcaggagccagagggcagcccagctccaggtaggcaccagccacagaactggaaagcccttgggaggctgaggtcctgccttctctatagcttatcttggcccctctctgtgtgtcagcctccctcctctccctgcagcccagctttgggtgcacacctccccatggtggcagaggtcaattccacagtgcctagtgttgacattttcttgacacgagactagtcccaattccaaatgtccaggaggcacttggcccagtctgacctggtgtgataaagtgatgcctgtcagtggataaggctggggccnttgctcatgggctagattgggtatcacctttaggataacccaaaaggtggcctcataagaactgtctcagttcatcaattttcacattttagcatctctgatattgagatagagcatacaattgatctcactttaggattaatggtgtcttacaattgctgttggccagatagcagtcatgacttagtgtcattgcctgcctatttgagacaggaatgtgagtcctgtcttttgtctcaaaaacttccattantcttacctcctggtaagatcaagctccagtatcaaaagttgcatagtgggtacccagagagaaaatgctgatgatcatagtgtagtactggcttacgaaatgctagccagggtgcaatggctcatgcctataatcccagcactttggcaggctgaggtgggcggatcgctcgagcccagaagttcaagaccagcctgagcaacatgatgaaactccgtctttactaaaaatacaaaattagccggatgtggtgccgcatgcctgtaatcccagctacttgggtggctgaggcaggcgaattacttcaacctgggagatggaggttgcagtgagccgagatcatgctgaaggaaggaagggagtaagggagggagggaggcgagagagagagaaagaaaaagaaatgctgcattttcagttctattgatggcacagcaggcaacggtgtgtgaaaaacaggcacttaaagactctgggccgggcacggtggcccatgcctgtaatcccagcactttgggaggctgaggcgggtgaatcatgaggtcaggagttcgagactagcctgaccaacatggtgaaactatgtctctactaaaaatacaaaaaattagctgggtgtggtggtgggtgcctgtaatctcagctactcgggaggctgaggcaggagaattgcttgaacccgggaggcggaggttgcggtgagccgagatcgcgctactgcactccagcctgggtgacagtgtgaaactttgtctc

SEQ ID NO: 432563 - DNA, 7295 bp, Homo sapiens
  misc_feature (4744)..(4744): n is a, c, g, or t
  misc_feature (5204)..(5204): n is a, c, g, or t
  misc_feature (5749)..(5749): n is a, c, g, or t
  misc_feature (6286)..(6286): n is a, c, g, or t
  misc_feature (6539)..(6539): n is a, c, g, or t
agcgctagtgtgtccgcctagttcaagtgtgcgtggagattaggtccaagcgcccgcccagaggcaggcagtccgcgagcccagccgccgctgtcgccgccagtagcagccttcgccagcagcgccgcggcggaaccgggcgcaggggagcgagcccggccccgccagcccagcccagcccagccctactccctccccacgccagggcagcagccgttgctcagagagaaggtggaggaagaaatccagaccctagcacgcgcgcaccatcatggaccattatgattctcagcaaaccaacgattacatgcagccagaagaggactgggaccgggacctgctcctggacccggcctgggagaagcagcagagaaagacattcacggcatggtgtaactcccacctccggaaggcggggacacagatcgagaacatcgaagaggacttccgggatggcctgaagctcatgctgctgctggaggtcatctcaggtgaacgcttggccaagccagagcgaggcaagatgagagtgcacaagatctccaacgtcaacaaggccctggatttcatagccagcaaaggcgtcaaactggtgtccatcggagccgaagaaatcgtggatgggaatgtgaagatgaccctgggcatgatctggaccatcatcctgcgctttgccatccaggacatctccgtggaagagacttcagccaaggaagggctgctcctgtggtgtcagagaaagacagccccttacaaaaatgtcaacatccagaacttccacataagctggaaggatggcctcggcttctgtgctttgatccaccgacaccggcccgagctgattgactacgggaagctgcggaaggatgatccactcacaaatctgaatacggcttttgacgtggcagagaagtacctggacatccccaagatgctggatgccgaagacatcgttggaactgcccgaccggatgagaaagccatcatgacttacgtgtctagcttctaccacgccttctctggagcccagaaggcggagacagcagccaatcgcatctgcaaggtgttggccgtcaaccaggagaacgagcagcttatggaagactacgagaagctggccagtgatctgttggagtggatccgccgcacaatcccgtggctggagaaccgggtgcccgagaacaccatgcatgccatgcaacagaagctggaggacttccgggactaccggcgcctgcacaagccgcccaaggtgcaggagaagtgccagctggagatcaacttcaacacgctgcagaccaagctgcggctcagcaaccggcctgccttcatgccctctgagggcaggatggtctcggacatcaacaatgcctggggctgcctggagcaggtggagaagggctatgaggagtggttgctgaatgagatccggaggctggagcgactggaccacctggcagagaagttccggcagaaggcctccatccacgaggcctggactgacggcaaagaggccatgctgcgacagaaggactatgagaccgccaccctctcggagatcaaggccctgctcaagaagcatgaggccttcgagagtgacctggctgcccaccaggaccgtgtggagcagattgccgccatcgcacaggagctcaatgagctggactattatgactcacccagtgtcaacgcccgttgccaaaagatctgtgaccagtgggacaatctgggggccctaactcagaagcgaagggaagctctggagcggaccgagaaactgctggagaccattgaccagctgtacttggagtatgccaagcgggctgcacccttcaacaactggatggagggggccatggaggacctgcaggacaccttcattgtgcacaccattgaggagatccagggactgaccacagcccatgagcagttcaaggccaccctccctgatgccgacaaggagcgcctggccatcctgggcatccacaatgaggtgtccaagattgtccagacctaccacgtcaatatggcgggcaccaacccctacacaaccatcacgcctcaggagatcaatggcaaatgggaccacgtgcggcagctggtgcctcggagggaccaagctctgacggaggagcatgcccgacagcagcacaatgagaggctacgcaagcagtttggagcccaggccaatgtcatcgggccctggatccagaccaagatggaggagatcgggaggatctccattgagatgcatgggaccctggaggaccagctcagccacctgcggcagtatgagaagagcatcgtcaactacaagccaaagattgatcagctggagggcgaccaccagctcatccaggaggcgctcatcttcgacaacaagcacaccaactacaccatggagcacatccgtgtgggctgggagcagctgctcaccaccatcgccaggaccatcaatgaggtagagaaccagatcctgacccgggatgccaagggcatcagccaggagcagatgaatgagttccgggcctccttcaaccactttgaccggaagaagacaggcatgatggacacggatgatttccgcgcctgcctgatctccatgggttacaacatgggagaagcagaatttgcccgcatcatgagcattgtggaccccaaccgcctgggggtagtgacattccaggccttcattgacttcatgtcccgcgagacagccgacacagatacagcagaccaagtcatggcttccttcaagatcctggctggggacaagaactacattaccatggacgagctgcgccgcgagctgccacccgaccaggctgagtactgcatcgcgcggatggccccctacaccggccccgactccgtgccaggtgctctggactacatgtccttctccacggcgctgtacggcgagagtgacctctaatccaccccgcccggccgccctcgtcttgtgcgccgtgccctgccttgcacctccgccgtcgcccatctcctgcctgggttcggtttcagctcccagcctccacccgggtgagctggggcccacgtggcatcgatcctccctgcccgcgaagtgacagtttacaaaattattttctgcaaaaaagaaaaaaaagttacgttaaaaaccaaaaaactacatattttattatagaaaaagtattttttctccaccagacaaatggaaaaaaagaggaaagattaactatttgcaccgaaatgtcttgttttgttgcgacataggaaaataaccaagcacaaagttatattccatcctttttactgatttttttttcttctatctgttccatctgctgtattcatttctccaatctcatgtccattttggtgtgggagtcggggtagggggtactcttgtcaaaaggcacattggtgcatgtgtgtttgctagctcacttgtccatgaaaatattttatgatattaaagaaaatcttttgaaatggctgttttttaaggaagagaatttatgtggcttctcatttttaaatcccctcagaggtgtgactagtctctttatcagcacacacttaaaaaatttttaatattgtctattaaaaataggacaaacttggagagtatggacaactttgatattgcttggcacagatggtattaaaaaaaccacactcctatgacagctctttgcctgctccttgcttgatgttttctggaagtgtgtgtggggtcaaggatggtgtggggcacctgtatctactcctaatgtttttgaccctgctgtgttcaatcttcttacacttcagtttcttcattttaaaaaggaaaaggtaatttcttcacagtctcctatgagttggacagaaagtcatggatgtgtaaaggacttcttgatgataagccccaccttcatttttccacggcaccaaacagccctgtgacatctgcattcaccccactcgtttttatttttgctgcagtgaacagcttgagttgtctcttaagagtcatctcatcccttgctattcgagatgacccacagatggcagctgttcagcatcacctgggagttcattggaaatacagaatctcaggccccacccctgaatgtcgaatactgtgtgtactgctctagcttctccagagtaaaagatagtctctataggatgccgtctgctctggcaccaggccccctgagcccatgccttttatctgacgtttgttttgcaacccattacatcacttgcccccgggcatcctttaaatttcatccttggctaattctcattgtaaccggttccagcttgctttaaatgattgggtggatggaattctccccattgacaattgacaggtggcaattaattgttcatgcctcagtgggatgaatccattacatctctttcctgcctaatatttttatctacctccgacttttttgtagggactttgttgatatcctcatgaaggcccatctctcctctctctggcttgtccatcccttgacaaaaccttaatgactgttctgggtaccaaatctgtggcaggagtgtgacccagctgccacccacctcctccatcactggaccagctcatagttgtcccttggacatggggttagtgcccaacaagtgtagtcatttggctaagtgagttactaggagggagaacagattcaatttcctgaggtggtgaggagagactgaaggctttgccagttctttggcctatgccaggctctctggtacttctgcnggtggcatgagctgtgtgaagcgcctctaaatttaaggctccaaagctctccaacacaaacaagactttagggtctgcgttatggacgccaagggaagaaatacaacctcaacatcagtgcctgtcaagggaggcagatgtgagctcgtctgcctgccaccggccatttggactaccttgggcaagtgacctccttaaatggggccgataatgttgctttccttctctccctggcacacagtaggcatttaataagtggcaatgggtattgtccctagagttgtataaaaaaccagctctagcagggcgtggtggtgcatgtccgtagtgccagctgcttgggaggctgaggtgaggatcacttgagcccaggagttttgagtccagcctgaacaacataacaagaccctgtctgtaaaatgggggaaaaagtcagctgtgctttgttatgctgtttaanatattcttaaagaaaaaggcctgattacagaaaaataccattaaggggaaccctctttcagtctctgtgctgagggtagtagtaggctgagtaatggtcccccaagatatccatttccgagtccctggaacccatgattgttaattcatatgacaaataagactttgcagatgggattaagaatcttgaggtggggagattggttctggattatctgggtgggtccttagggagcaggcatgtcggcatcagaggaaatgtgacgacagaagcaggggttggagtgatgtgaggccacaagccaatgaatgcggacagcctctagaagctagaaaagccagggaaacagattctccctgagagcctccagatagaatgcaggtctacagacccattttgggtctctattctccagaacttgagataatacgtttgtgttgttttaagccacttcatttgtgataatttgttacagcaaccataggaagctaatatgtgctccatcgttcatgccctggggagctggctgcctccctgacgtcagngacccgtggtataggcatgacctgctggagaaactgccctagcttcaaaggcctgagtgtgcaacattggcccttgggaggctgccttagctgctggacttgatctcctaagccttaaaagcgccattcatggagaggggagaaggaagcttccaagttctgagagcccaaaaaggccagaatagctgggcccagcaggagatgtaaggcttcctgttgtctcagatgcaggagccagagggcagcccagctccaggtaggcaccagccacagaactggaaagcccttgggaggctgaggtcctgccttctctatagcttatcttggcccctctctgtgtgtcagcctccctcctctccctgcagcccagctttgggtgcacacctccccatggtggcagaggtcaattccacagtgcctagtgttgacattttcttgacacgagactagtcccaattccaaatgtccaggaggcacttggcccagtctgacctggtgtgataaagtgatgcctgtcagtggataaggctggggccnttgctcatgggctagattgggtatcacctttaggataacccaaaaggtggcctcataagaactgtctcagttcatcaattttcacattttagcatctctgatattgagatagagcatacaattgatctcactttaggattaatggtgtcttacaattgctgttggccagatagcagtcatgacttagtgtcattgcctgcctatttgagacaggaatgtgagtcctgtcttttgtctcaaaaacttccattantcttacctcctggtaagatcaagctccagtatcaaaagttgcatagtgggtacccagagagaaaatgctgatgatcatagtgtagtactggcttacgaaatgctagccagggtgcaatggctcatgcctataatcccagcactttggcaggctgaggtgggcggatcgctcgagcccagaagttcaagaccagcctgagcaacatgatgaaactccgtctttactaaaaatacaaaattagccggatgtggtgccgcatgcctgtaatcccagctacttgggtggctgaggcaggcgaattacttcaacctgggagatggaggttgcagtgagccgagatcatgctgaaggaaggaagggagtaagggagggagggaggcgagagagagagaaagaaaaagaaatgctgcattttcagttctattgatggcacagcaggcaacggtgtgtgaaaaacaggcacttaaagactctgggccgggcacggtggcccatgcctgtaatcccagcactttgggaggctgaggcgggtgaatcatgaggtcaggagttcgagactagcctgaccaacatggtgaaactatgtctctactaaaaatacaaaaaattagctgggtgtggtggtgggtgcctgtaatctcagctactcgggaggctgaggcaggagaattgcttgaacccgggaggcggaggttgcggtgagccgagatcgcgctactgcactccagcctgggtgacagtgtgaaactttgtctc

SEQ ID NO: 432564 - DNA, 6706 bp, Homo sapiens
  misc_feature (4155)..(4155): n is a, c, g, or t
  misc_feature (4615)..(4615): n is a, c, g, or t
  misc_feature (5160)..(5160): n is a, c, g, or t
  misc_feature (5697)..(5697): n is a, c, g, or t
  misc_feature (5950)..(5950): n is a, c, g, or t
agcgctagtgtgtccgcctagttcaagtgtgcgtggagattaggtccaagcgcccgcccagaggcaggcagtccgcgagcccagccgccgctgtcgccgccagtagcagccttcgccagcagcgccgcggcggaaccgggcgcaggggagcgagcccggccccgccagcccagcccagcccagccctactccctccccacgccagggcagcagccgttgctcagagagaaggtggaggaagaaatccagaccctagcacgcgcgcaccatcatggaccattatgattctcagcaaaccaacgattacatgcagccagaagaggactgggaccgggacctgctcctggacccggcctgggagaagcagcagagaaagccatcatgacttacgtgtctagcttctaccacgccttctctggagcccagaaggcggagacagcagccaatcgcatctgcaaggtgttggccgtcaaccaggagaacgagcagcttatggaagactacgagaagctggccagtgatctgttggagtggatccgccgcacaatcccgtggctggagaaccgggtgcccgagaacaccatgcatgccatgcaacagaagctggaggacttccgggactaccggcgcctgcacaagccgcccaaggtgcaggagaagtgccagctggagatcaacttcaacacgctgcagaccaagctgcggctcagcaaccggcctgccttcatgccctctgagggcaggatggtctcggacatcaacaatgcctggggctgcctggagcaggtggagaagggctatgaggagtggttgctgaatgagatccggaggctggagcgactggaccacctggcagagaagttccggcagaaggcctccatccacgaggcctggactgacggcaaagaggccatgctgcgacagaaggactatgagaccgccaccctctcggagatcaaggccctgctcaagaagcatgaggccttcgagagtgacctggctgcccaccaggaccgtgtggagcagattgccgccatcgcacaggagctcaatgagctggactattatgactcacccagtgtcaacgcccgttgccaaaagatctgtgaccagtgggacaatctgggggccctaactcagaagcgaagggaagctctggagcggaccgagaaactgctggagaccattgaccagctgtacttggagtatgccaagcgggctgcacccttcaacaactggatggagggggccatggaggacctgcaggacaccttcattgtgcacaccattgaggagatccagggactgaccacagcccatgagcagttcaaggccaccctccctgatgccgacaaggagcgcctggccatcctgggcatccacaatgaggtgtccaagattgtccagacctaccacgtcaatatggcgggcaccaacccctacacaaccatcacgcctcaggagatcaatggcaaatgggaccacgtgcggcagctggtgcctcggagggaccaagctctgacggaggagcatgcccgacagcagcacaatgagaggctacgcaagcagtttggagcccaggccaatgtcatcgggccctggatccagaccaagatggaggagatcgggaggatctccattgagatgcatgggaccctggaggaccagctcagccacctgcggcagtatgagaagagcatcgtcaactacaagccaaagattgatcagctggagggcgaccaccagctcatccaggaggcgctcatcttcgacaacaagcacaccaactacaccatggagcacatccgtgtgggctgggagcagctgctcaccaccatcgccaggaccatcaatgaggtagagaaccagatcctgacccgggatgccaagggcatcagccaggagcagatgaatgagttccgggcctccttcaaccactttgaccgggatcactccggcacactgggtcccgaggagttcaaagcctgcctcatcagcttgggttatgatattggcaacgacccccagggagaagcagaatttgcccgcatcatgagcattgtggaccccaaccgcctgggggtagtgacattccaggccttcattgacttcatgtcccgcgagacagccgacacagatacagcagaccaagtcatggcttccttcaagatcctggctggggacaagaactacattaccatggacgagctgcgccgcgagctgccacccgaccaggctgagtactgcatcgcgcggatggccccctacaccggccccgactccgtgccaggtgctctggactacatgtccttctccacggcgctgtacggcgagagtgacctctaatccaccccgcccggccgccctcgtcttgtgcgccgtgccctgccttgcacctccgccgtcgcccatctcctgcctgggttcggtttcagctcccagcctccacccgggtgagctggggcccacgtggcatcgatcctccctgcccgcgaagtgacagtttacaaaattattttctgcaaaaaagaaaaaaaagttacgttaaaaaccaaaaaactacatattttattatagaaaaagtattttttctccaccagacaaatggaaaaaaagaggaaagattaactatttgcaccgaaatgtcttgttttgttgcgacataggaaaataaccaagcacaaagttatattccatcctttttactgatttttttttcttctatctgttccatctgctgtattcatttctccaatctcatgtccattttggtgtgggagtcggggtagggggtactcttgtcaaaaggcacattggtgcatgtgtgtttgctagctcacttgtccatgaaaatattttatgatattaaagaaaatcttttgaaatggctgttttttaaggaagagaatttatgtggcttctcatttttaaatcccctcagaggtgtgactagtctctttatcagcacacacttaaaaaatttttaatattgtctattaaaaataggacaaacttggagagtatggacaactttgatattgcttggcacagatggtattaaaaaaaccacactcctatgacagctctttgcctgctccttgcttgatgttttctggaagtgtgtgtggggtcaaggatggtgtggggcacctgtatctactcctaatgtttttgaccctgctgtgttcaatcttcttacacttcagtttcttcattttaaaaaggaaaaggtaatttcttcacagtctcctatgagttggacagaaagtcatggatgtgtaaaggacttcttgatgataagccccaccttcatttttccacggcaccaaacagccctgtgacatctgcattcaccccactcgtttttatttttgctgcagtgaacagcttgagttgtctcttaagagtcatctcatcccttgctattcgagatgacccacagatggcagctgttcagcatcacctgggagttcattggaaatacagaatctcaggccccacccctgaatgtcgaatactgtgtgtactgctctagcttctccagagtaaaagatagtctctataggatgccgtctgctctggcaccaggccccctgagcccatgccttttatctgacgtttgttttgcaacccattacatcacttgcccccgggcatcctttaaatttcatccttggctaattctcattgtaaccggttccagcttgctttaaatgattgggtggatggaattctccccattgacaattgacaggtggcaattaattgttcatgcctcagtgggatgaatccattacatctctttcctgcctaatatttttatctacctccgacttttttgtagggactttgttgatatcctcatgaaggcccatctctcctctctctggcttgtccatcccttgacaaaaccttaatgactgttctgggtaccaaatctgtggcaggagtgtgacccagctgccacccacctcctccatcactggaccagctcatagttgtcccttggacatggggttagtgcccaacaagtgtagtcatttggctaagtgagttactaggagggagaacagattcaatttcctgaggtggtgaggagagactgaaggctttgccagttctttggcctatgccaggctctctggtacttctgcnggtggcatgagctgtgtgaagcgcctctaaatttaaggctccaaagctctccaacacaaacaagactttagggtctgcgttatggacgccaagggaagaaatacaacctcaacatcagtgcctgtcaagggaggcagatgtgagctcgtctgcctgccaccggccatttggactaccttgggcaagtgacctccttaaatggggccgataatgttgctttccttctctccctggcacacagtaggcatttaataagtggcaatgggtattgtccctagagttgtataaaaaaccagctctagcagggcgtggtggtgcatgtccgtagtgccagctgcttgggaggctgaggtgaggatcacttgagcccaggagttttgagtccagcctgaacaacataacaagaccctgtctgtaaaatgggggaaaaagtcagctgtgctttgttatgctgtttaanatattcttaaagaaaaaggcctgattacagaaaaataccattaaggggaaccctctttcagtctctgtgctgagggtagtagtaggctgagtaatggtcccccaagatatccatttccgagtccctggaacccatgattgttaattcatatgacaaataagactttgcagatgggattaagaatcttgaggtggggagattggttctggattatctgggtgggtccttagggagcaggcatgtcggcatcagaggaaatgtgacgacagaagcaggggttggagtgatgtgaggccacaagccaatgaatgcggacagcctctagaagctagaaaagccagggaaacagattctccctgagagcctccagatagaatgcaggtctacagacccattttgggtctctattctccagaacttgagataatacgtttgtgttgttttaagccacttcatttgtgataatttgttacagcaaccataggaagctaatatgtgctccatcgttcatgccctggggagctggctgcctccctgacgtcagngacccgtggtataggcatgacctgctggagaaactgccctagcttcaaaggcctgagtgtgcaacattggcccttgggaggctgccttagctgctggacttgatctcctaagccttaaaagcgccattcatggagaggggagaaggaagcttccaagttctgagagcccaaaaaggccagaatagctgggcccagcaggagatgtaaggcttcctgttgtctcagatgcaggagccagagggcagcccagctccaggtaggcaccagccacagaactggaaagcccttgggaggctgaggtcctgccttctctatagcttatcttggcccctctctgtgtgtcagcctccctcctctccctgcagcccagctttgggtgcacacctccccatggtggcagaggtcaattccacagtgcctagtgttgacattttcttgacacgagactagtcccaattccaaatgtccaggaggcacttggcccagtctgacctggtgtgataaagtgatgcctgtcagtggataaggctggggccnttgctcatgggctagattgggtatcacctttaggataacccaaaaggtggcctcataagaactgtctcagttcatcaattttcacattttagcatctctgatattgagatagagcatacaattgatctcactttaggattaatggtgtcttacaattgctgttggccagatagcagtcatgacttagtgtcattgcctgcctatttgagacaggaatgtgagtcctgtcttttgtctcaaaaacttccattantcttacctcctggtaagatcaagctccagtatcaaaagttgcatagtgggtacccagagagaaaatgctgatgatcatagtgtagtactggcttacgaaatgctagccagggtgcaatggctcatgcctataatcccagcactttggcaggctgaggtgggcggatcgctcgagcccagaagttcaagaccagcctgagcaacatgatgaaactccgtctttactaaaaatacaaaattagccggatgtggtgccgcatgcctgtaatcccagctacttgggtggctgaggcaggcgaattacttcaacctgggagatggaggttgcagtgagccgagatcatgctgaaggaaggaagggagtaagggagggagggaggcgagagagagagaaagaaaaagaaatgctgcattttcagttctattgatggcacagcaggcaacggtgtgtgaaaaacaggcacttaaagactctgggccgggcacggtggcccatgcctgtaatcccagcactttgggaggctgaggcgggtgaatcatgaggtcaggagttcgagactagcctgaccaacatggtgaaactatgtctctactaaaaatacaaaaaattagctgggtgtggtggtgggtgcctgtaatctcagctactcgggaggctgaggcaggagaattgcttgaacccgggaggcggaggttgcggtgagccgagatcgcgctactgcactccagcctgggtgacagtgtgaaactttgtctc

SEQ ID NO: 432565 - DNA, 7229 bp, Homo sapiens
  misc_feature (4678)..(4678): n is a, c, g, or t
  misc_feature (5138)..(5138): n is a, c, g, or t
  misc_feature (5683)..(5683): n is a, c, g, or t
  misc_feature (6220)..(6220): n is a, c, g, or t
  misc_feature (6473)..(6473): n is a, c, g, or t
agcgctagtgtgtccgcctagttcaagtgtgcgtggagattaggtccaagcgcccgcccagaggcaggcagtccgcgagcccagccgccgctgtcgccgccagtagcagccttcgccagcagcgccgcggcggaaccgggcgcaggggagcgagcccggccccgccagcccagcccagcccagccctactccctccccacgccagggcagcagccgttgctcagagagaaggtggaggaagaaatccagaccctagcacgcgcgcaccatcatggaccattatgattctcagcaaaccaacgattacatgcagccagaagaggactgggaccgggacctgctcctggacccggcctgggagaagcagcagagaaagacattcacggcatggtgtaactcccacctccggaaggcggggacacagatcgagaacatcgaagaggacttccgggatggcctgaagctcatgctgctgctggaggtcatctcaggtgaacgcttggccaagccagagcgaggcaagatgagagtgcacaagatctccaacgtcaacaaggccctggatttcatagccagcaaaggcgtcaaactggtgtccatcggagccgaagaaatcgtggatgggaatgtgaagatgaccctgggcatgatctggaccatcatcctgcgctttgccatccaggacatctccgtggaagagacttcagccaaggaagggctgctcctgtggtgtcagagaaagacagccccttacaaaaatgtcaacatccagaacttccacataagctggaaggatggcctcggcttctgtgctttgatccaccgacaccggcccgagctgattgactacgggaagctgcggaaggatgatccactcacaaatctgaatacggcttttgacgtggcagagaagtacctggacatccccaagatgctggatgccgaagacatcgttggaactgcccgaccggatgagaaagccatcatgacttacgtgtctagcttctaccacgccttctctggagcccagaaggcggagacagcagccaatcgcatctgcaaggtgttggccgtcaaccaggagaacgagcagcttatggaagactacgagaagctggccagtgatctgttggagtggatccgccgcacaatcccgtggctggagaaccgggtgcccgagaacaccatgcatgccatgcaacagaagctggaggacttccgggactaccggcgcctgcacaagccgcccaaggtgcaggagaagtgccagctggagatcaacttcaacacgctgcagaccaagctgcggctcagcaaccggcctgccttcatgccctctgagggcaggatggtctcggacatcaacaatgcctggggctgcctggagcaggtggagaagggctatgaggagtggttgctgaatgagatccggaggctggagcgactggaccacctggcagagaagttccggcagaaggcctccatccacgaggcctggactgacggcaaagaggccatgctgcgacagaaggactatgagaccgccaccctctcggagatcaaggccctgctcaagaagcatgaggccttcgagagtgacctggctgcccaccaggaccgtgtggagcagattgccgccatcgcacaggagctcaatgagctggactattatgactcacccagtgtcaacgcccgttgccaaaagatctgtgaccagtgggacaatctgggggccctaactcagaagcgaagggaagctctggagcggaccgagaaactgctggagaccattgaccagctgtacttggagtatgccaagcgggctgcacccttcaacaactggatggagggggccatggaggacctgcaggacaccttcattgtgcacaccattgaggagatccagggactgaccacagcccatgagcagttcaaggccaccctccctgatgccgacaaggagcgcctggccatcctgggcatccacaatgaggtgtccaagattgtccagacctaccacgtcaatatggcgggcaccaacccctacacaaccatcacgcctcaggagatcaatggcaaatgggaccacgtgcggcagctggtgcctcggagggaccaagctctgacggaggagcatgcccgacagcagcacaatgagaggctacgcaagcagtttggagcccaggccaatgtcatcgggccctggatccagaccaagatggaggagatcgggaggatctccattgagatgcatgggaccctggaggaccagctcagccacctgcggcagtatgagaagagcatcgtcaactacaagccaaagattgatcagctggagggcgaccaccagctcatccaggaggcgctcatcttcgacaacaagcacaccaactacaccatggagcacatccgtgtgggctgggagcagctgctcaccaccatcgccaggaccatcaatgaggtagagaaccagatcctgacccgggatgccaagggcatcagccaggagcagatgaatgagttccgggcctccttcaaccactttgaccggggagaagcagaatttgcccgcatcatgagcattgtggaccccaaccgcctgggggtagtgacattccaggccttcattgacttcatgtcccgcgagacagccgacacagatacagcagaccaagtcatggcttccttcaagatcctggctggggacaagaactacattaccatggacgagctgcgccgcgagctgccacccgaccaggctgagtactgcatcgcgcggatggccccctacaccggccccgactccgtgccaggtgctctggactacatgtccttctccacggcgctgtacggcgagagtgacctctaatccaccccgcccggccgccctcgtcttgtgcgccgtgccctgccttgcacctccgccgtcgcccatctcctgcctgggttcggtttcagctcccagcctccacccgggtgagctggggcccacgtggcatcgatcctccctgcccgcgaagtgacagtttacaaaattattttctgcaaaaaagaaaaaaaagttacgttaaaaaccaaaaaactacatattttattatagaaaaagtattttttctccaccagacaaatggaaaaaaagaggaaagattaactatttgcaccgaaatgtcttgttttgttgcgacataggaaaataaccaagcacaaagttatattccatcctttttactgatttttttttcttctatctgttccatctgctgtattcatttctccaatctcatgtccattttggtgtgggagtcggggtagggggtactcttgtcaaaaggcacattggtgcatgtgtgtttgctagctcacttgtccatgaaaatattttatgatattaaagaaaatcttttgaaatggctgttttttaaggaagagaatttatgtggcttctcatttttaaatcccctcagaggtgtgactagtctctttatcagcacacacttaaaaaatttttaatattgtctattaaaaataggacaaacttggagagtatggacaactttgatattgcttggcacagatggtattaaaaaaaccacactcctatgacagctctttgcctgctccttgcttgatgttttctggaagtgtgtgtggggtcaaggatggtgtggggcacctgtatctactcctaatgtttttgaccctgctgtgttcaatcttcttacacttcagtttcttcattttaaaaaggaaaaggtaatttcttcacagtctcctatgagttggacagaaagtcatggatgtgtaaaggacttcttgatgataagccccaccttcatttttccacggcaccaaacagccctgtgacatctgcattcaccccactcgtttttatttttgctgcagtgaacagcttgagttgtctcttaagagtcatctcatcccttgctattcgagatgacccacagatggcagctgttcagcatcacctgggagttcattggaaatacagaatctcaggccccacccctgaatgtcgaatactgtgtgtactgctctagcttctccagagtaaaagatagtctctataggatgccgtctgctctggcaccaggccccctgagcccatgccttttatctgacgtttgttttgcaacccattacatcacttgcccccgggcatcctttaaatttcatccttggctaattctcattgtaaccggttccagcttgctttaaatgattgggtggatggaattctccccattgacaattgacaggtggcaattaattgttcatgcctcagtgggatgaatccattacatctctttcctgcctaatatttttatctacctccgacttttttgtagggactttgttgatatcctcatgaaggcccatctctcctctctctggcttgtccatcccttgacaaaaccttaatgactgttctgggtaccaaatctgtggcaggagtgtgacccagctgccacccacctcctccatcactggaccagctcatagttgtcccttggacatggggttagtgcccaacaagtgtagtcatttggctaagtgagttactaggagggagaacagattcaatttcctgaggtggtgaggagagactgaaggctttgccagttctttggcctatgccaggctctctggtacttctgcnggtggcatgagctgtgtgaagcgcctctaaatttaaggctccaaagctctccaacacaaacaagactttagggtctgcgttatggacgccaagggaagaaatacaacctcaacatcagtgcctgtcaagggaggcagatgtgagctcgtctgcctgccaccggccatttggactaccttgggcaagtgacctccttaaatggggccgataatgttgctttccttctctccctggcacacagtaggcatttaataagtggcaatgggtattgtccctagagttgtataaaaaaccagctctagcagggcgtggtggtgcatgtccgtagtgccagctgcttgggaggctgaggtgaggatcacttgagcccaggagttttgagtccagcctgaacaacataacaagaccctgtctgtaaaatgggggaaaaagtcagctgtgctttgttatgctgtttaanatattcttaaagaaaaaggcctgattacagaaaaataccattaaggggaaccctctttcagtctctgtgctgagggtagtagtaggctgagtaatggtcccccaagatatccatttccgagtccctggaacccatgattgttaattcatatgacaaataagactttgcagatgggattaagaatcttgaggtggggagattggttctggattatctgggtgggtccttagggagcaggcatgtcggcatcagaggaaatgtgacgacagaagcaggggttggagtgatgtgaggccacaagccaatgaatgcggacagcctctagaagctagaaaagccagggaaacagattctccctgagagcctccagatagaatgcaggtctacagacccattttgggtctctattctccagaacttgagataatacgtttgtgttgttttaagccacttcatttgtgataatttgttacagcaaccataggaagctaatatgtgctccatcgttcatgccctggggagctggctgcctccctgacgtcagngacccgtggtataggcatgacctgctggagaaactgccctagcttcaaaggcctgagtgtgcaacattggcccttgggaggctgccttagctgctggacttgatctcctaagccttaaaagcgccattcatggagaggggagaaggaagcttccaagttctgagagcccaaaaaggccagaatagctgggcccagcaggagatgtaaggcttcctgttgtctcagatgcaggagccagagggcagcccagctccaggtaggcaccagccacagaactggaaagcccttgggaggctgaggtcctgccttctctatagcttatcttggcccctctctgtgtgtcagcctccctcctctccctgcagcccagctttgggtgcacacctccccatggtggcagaggtcaattccacagtgcctagtgttgacattttcttgacacgagactagtcccaattccaaatgtccaggaggcacttggcccagtctgacctggtgtgataaagtgatgcctgtcagtggataaggctggggccnttgctcatgggctagattgggtatcacctttaggataacccaaaaggtggcctcataagaactgtctcagttcatcaattttcacattttagcatctctgatattgagatagagcatacaattgatctcactttaggattaatggtgtcttacaattgctgttggccagatagcagtcatgacttagtgtcattgcctgcctatttgagacaggaatgtgagtcctgtcttttgtctcaaaaacttccattantcttacctcctggtaagatcaagctccagtatcaaaagttgcatagtgggtacccagagagaaaatgctgatgatcatagtgtagtactggcttacgaaatgctagccagggtgcaatggctcatgcctataatcccagcactttggcaggctgaggtgggcggatcgctcgagcccagaagttcaagaccagcctgagcaacatgatgaaactccgtctttactaaaaatacaaaattagccggatgtggtgccgcatgcctgtaatcccagctacttgggtggctgaggcaggcgaattacttcaacctgggagatggaggttgcagtgagccgagatcatgctgaaggaaggaagggagtaagggagggagggaggcgagagagagagaaagaaaaagaaatgctgcattttcagttctattgatggcacagcaggcaacggtgtgtgaaaaacaggcacttaaagactctgggccgggcacggtggcccatgcctgtaatcccagcactttgggaggctgaggcgggtgaatcatgaggtcaggagttcgagactagcctgaccaacatggtgaaactatgtctctactaaaaatacaaaaaattagctgggtgtggtggtgggtgcctgtaatctcagctactcgggaggctgaggcaggagaattgcttgaacccgggaggcggaggttgcggtgagccgagatcgcgctactgcactccagcctgggtgacagtgtgaaactttgtctc

SEQ ID NO: 432566 - DNA, 7222 bp, Homo sapiens
  misc_feature (4671)..(4671): n is a, c, g, or t
  misc_feature (5131)..(5131): n is a, c, g, or t
  misc_feature (5676)..(5676): n is a, c, g, or t
  misc_feature (6213)..(6213): n is a, c, g, or t
  misc_feature (6466)..(6466): n is a, c, g, or t
agcgctagtgtgtccgcctagttcaagtgtgcgtggagattaggtccaagcgcccgcccagaggcaggcagtccgcgagcccagccgccgctgtcgccgccagtagcagccttcgccagcagcgccgcggcggaaccgggcgcaggggagcgagcccggccccgccagcccagcccagcccagccctactccctccccacgccagggcagcagccgttgctcagagagaaggtggaggaagaaatccagaccctagcacgcgcgcaccatcatggaccattatgattctcagcaaaccaacgattacatgcagccagaagaggactgggaccgggacctgctcctggacccggcctgggagaagcagcagagaaagacattcacggcatggtgtaactcccacctccggaaggcggggacacagatcgagaacatcgaagaggacttccgggatggcctgaagctcatgctgctgctggaggtcatctcaggtgaacgcttggccaagccagagcgaggcaagatgagagtgcacaagatctccaacgtcaacaaggccctggatttcatagccagcaaaggcgtcaaactggtgtccatcggagccgaagaaatcgtggatgggaatgtgaagatgaccctgggcatgatctggaccatcatcctgcgctttgccatccaggacatctccgtggaagagacttcagccaaggaagggctgctcctgtggtgtcagagaaagacagccccttacaaaaatgtcaacatccagaacttccacataagctggaaggatggcctcggcttctgtgctttgatccaccgacaccggcccgagctgattgactacgggaagctgcggaaggatgatccactcacaaatctgaatacggcttttgacgtggcagagaagtacctggacatccccaagatgctggatgccgaagacatcgttggaactgcccgaccggatgagaaagccatcatgacttacgtgtctagcttctaccacgccttctctggagcccagaaggcggagacagcagccaatcgcatctgcaaggtgttggccgtcaaccaggagaacgagcagcttatggaagactacgagaagctggccagtgatctgttggagtggatccgccgcacaatcccgtggctggagaaccgggtgcccgagaacaccatgcatgccatgcaacagaagctggaggacttccgggactaccggcgcctgcacaagccgcccaaggtgcaggagaagtgccagctggagatcaacttcaacacgctgcagaccaagctgcggctcagcaaccggcctgccttcatgccctctgagggcaggatggtctcggacatcaacaatgcctggggctgcctggagcaggtggagaagggctatgaggagtggttgctgaatgagatccggaggctggagcgactggaccacctggcagagaagttccggcagaaggcctccatccacgaggcctggactgacggcaaagaggccatgctgcgacagaaggactatgagaccgccaccctctcggagatcaaggccctgctcaagaagcatgaggccttcgagagtgacctggctgcccaccaggaccgtgtggagcagattgccgccatcgcacaggagctcaatgagctggactattatgactcacccagtgtcaacgcccgttgccaaaagatctgtgaccagtgggacaatctgggggccctaactcagaagcgaagggaagctctggagcggaccgagaaactgctggagaccattgaccagctgtacttggagtatgccaagcgggctgcacccttcaacaactggatggagggggccatggaggacctgcaggacaccttcattgtgcacaccattgaggagatccagggactgaccacagcccatgagcagttcaaggccaccctccctgatgccgacaaggagcgcctggccatcctgggcatccacaatgaggtgtccaagattgtccagacctaccacgtcaatatggcgggcaccaacccctacacaaccatcacgcctcaggagatcaatggcaaatgggaccacgtgcggcagctggtgcctcggagggaccaagctctgacggaggagcatgcccgacagcagcacaatgagaggctacgcaagcagtttggagcccaggccaatgtcatcgggccctggatccagaccaagatggaggagatcgggaggatctccattgagatgcatgggaccctggaggaccagctcagccacctgcggcagtatgagaagagcatcgtcaactacaagccaaagattgatcagctggagggcgaccaccagctcatccaggaggcgctcatcttcgacaacaagcacaccaactacaccatggagcacatccgtgtgggctgggagcagctgctcaccaccatcgccaggaccatcaatgaggtagagaaccagatcctgacccgggatgccaagggcatcagccaggagcagatgaatgagttccgggcctccttcaaccactttgaccgggatcactccggcacactgggtcccgaggagttcaaagcctgcctcatcagcttgggttatgatattggcaacgacccccagggagaagcagaatttgcccgcatcatgagcattgtggaccccaaccgcctgggggtagtgacattccaggcaactacattaccatggacgagctgcgccgcgagctgccacccgaccaggctgagtactgcatcgcgcggatggccccctacaccggccccgactccgtgccaggtgctctggactacatgtccttctccacggcgctgtacggcgagagtgacctctaatccaccccgcccggccgccctcgtcttgtgcgccgtgccctgccttgcacctccgccgtcgcccatctcctgcctgggttcggtttcagctcccagcctccacccgggtgagctggggcccacgtggcatcgatcctccctgcccgcgaagtgacagtttacaaaattattttctgcaaaaaagaaaaaaaagttacgttaaaaaccaaaaaactacatattttattatagaaaaagtattttttctccaccagacaaatggaaaaaaagaggaaagattaactatttgcaccgaaatgtcttgttttgttgcgacataggaaaataaccaagcacaaagttatattccatcctttttactgatttttttttcttctatctgttccatctgctgtattcatttctccaatctcatgtccattttggtgtgggagtcggggtagggggtactcttgtcaaaaggcacattggtgcatgtgtgtttgctagctcacttgtccatgaaaatattttatgatattaaagaaaatcttttgaaatggctgttttttaaggaagagaatttatgtggcttctcatttttaaatcccctcagaggtgtgactagtctctttatcagcacacacttaaaaaatttttaatattgtctattaaaaataggacaaacttggagagtatggacaactttgatattgcttggcacagatggtattaaaaaaaccacactcctatgacagctctttgcctgctccttgcttgatgttttctggaagtgtgtgtggggtcaaggatggtgtggggcacctgtatctactcctaatgtttttgaccctgctgtgttcaatcttcttacacttcagtttcttcattttaaaaaggaaaaggtaatttcttcacagtctcctatgagttggacagaaagtcatggatgtgtaaaggacttcttgatgataagccccaccttcatttttccacggcaccaaacagccctgtgacatctgcattcaccccactcgtttttatttttgctgcagtgaacagcttgagttgtctcttaagagtcatctcatcccttgctattcgagatgacccacagatggcagctgttcagcatcacctgggagttcattggaaatacagaatctcaggccccacccctgaatgtcgaatactgtgtgtactgctctagcttctccagagtaaaagatagtctctataggatgccgtctgctctggcaccaggccccctgagcccatgccttttatctgacgtttgttttgcaacccattacatcacttgcccccgggcatcctttaaatttcatccttggctaattctcattgtaaccggttccagcttgctttaaatgattgggtggatggaattctccccattgacaattgacaggtggcaattaattgttcatgcctcagtgggatgaatccattacatctctttcctgcctaatatttttatctacctccgacttttttgtagggactttgttgatatcctcatgaaggcccatctctcctctctctggcttgtccatcccttgacaaaaccttaatgactgttctgggtaccaaatctgtggcaggagtgtgacccagctgccacccacctcctccatcactggaccagctcatagttgtcccttggacatggggttagtgcccaacaagtgtagtcatttggctaagtgagttactaggagggagaacagattcaatttcctgaggtggtgaggagagactgaaggctttgccagttctttggcctatgccaggctctctggtacttctgcnggtggcatgagctgtgtgaagcgcctctaaatttaaggctccaaagctctccaacacaaacaagactttagggtctgcgttatggacgccaagggaagaaatacaacctcaacatcagtgcctgtcaagggaggcagatgtgagctcgtctgcctgccaccggccatttggactaccttgggcaagtgacctccttaaatggggccgataatgttgctttccttctctccctggcacacagtaggcatttaataagtggcaatgggtattgtccctagagttgtataaaaaaccagctctagcagggcgtggtggtgcatgtccgtagtgccagctgcttgggaggctgaggtgaggatcacttgagcccaggagttttgagtccagcctgaacaacataacaagaccctgtctgtaaaatgggggaaaaagtcagctgtgctttgttatgctgtttaanatattcttaaagaaaaaggcctgattacagaaaaataccattaaggggaaccctctttcagtctctgtgctgagggtagtagtaggctgagtaatggtcccccaagatatccatttccgagtccctggaacccatgattgttaattcatatgacaaataagactttgcagatgggattaagaatcttgaggtggggagattggttctggattatctgggtgggtccttagggagcaggcatgtcggcatcagaggaaatgtgacgacagaagcaggggttggagtgatgtgaggccacaagccaatgaatgcggacagcctctagaagctagaaaagccagggaaacagattctccctgagagcctccagatagaatgcaggtctacagacccattttgggtctctattctccagaacttgagataatacgtttgtgttgttttaagccacttcatttgtgataatttgttacagcaaccataggaagctaatatgtgctccatcgttcatgccctggggagctggctgcctccctgacgtcagngacccgtggtataggcatgacctgctggagaaactgccctagcttcaaaggcctgagtgtgcaacattggcccttgggaggctgccttagctgctggacttgatctcctaagccttaaaagcgccattcatggagaggggagaaggaagcttccaagttctgagagcccaaaaaggccagaatagctgggcccagcaggagatgtaaggcttcctgttgtctcagatgcaggagccagagggcagcccagctccaggtaggcaccagccacagaactggaaagcccttgggaggctgaggtcctgccttctctatagcttatcttggcccctctctgtgtgtcagcctccctcctctccctgcagcccagctttgggtgcacacctccccatggtggcagaggtcaattccacagtgcctagtgttgacattttcttgacacgagactagtcccaattccaaatgtccaggaggcacttggcccagtctgacctggtgtgataaagtgatgcctgtcagtggataaggctggggccnttgctcatgggctagattgggtatcacctttaggataacccaaaaggtggcctcataagaactgtctcagttcatcaattttcacattttagcatctctgatattgagatagagcatacaattgatctcactttaggattaatggtgtcttacaattgctgttggccagatagcagtcatgacttagtgtcattgcctgcctatttgagacaggaatgtgagtcctgtcttttgtctcaaaaacttccattantcttacctcctggtaagatcaagctccagtatcaaaagttgcatagtgggtacccagagagaaaatgctgatgatcatagtgtagtactggcttacgaaatgctagccagggtgcaatggctcatgcctataatcccagcactttggcaggctgaggtgggcggatcgctcgagcccagaagttcaagaccagcctgagcaacatgatgaaactccgtctttactaaaaatacaaaattagccggatgtggtgccgcatgcctgtaatcccagctacttgggtggctgaggcaggcgaattacttcaacctgggagatggaggttgcagtgagccgagatcatgctgaaggaaggaagggagtaagggagggagggaggcgagagagagagaaagaaaaagaaatgctgcattttcagttctattgatggcacagcaggcaacggtgtgtgaaaaacaggcacttaaagactctgggccgggcacggtggcccatgcctgtaatcccagcactttgggaggctgaggcgggtgaatcatgaggtcaggagttcgagactagcctgaccaacatggtgaaactatgtctctactaaaaatacaaaaaattagctgggtgtggtggtgggtgcctgtaatctcagctactcgggaggctgaggcaggagaattgcttgaacccgggaggcggaggttgcggtgagccgagatcgcgctactgcactccagcctgggtgacagtgtgaaactttgtctc

SEQ ID NO: 432567 - DNA, 6274 bp, Homo sapiens
  misc_feature (3723)..(3723): n is a, c, g, or t
  misc_feature (4183)..(4183): n is a, c, g, or t
  misc_feature (4728)..(4728): n is a, c, g, or t
  misc_feature (5265)..(5265): n is a, c, g, or t
  misc_feature (5518)..(5518): n is a, c, g, or t
ttttattcatctttctgcaatggtgttgaacgacaaccatcgtagaatagatgtctgttatggtaaactacgagaagctgaacaggtaacctgttggagtggatccgccgcacaatcccgtggctggagaaccgggtgcccgagaacaccatgcatgccatgcaacagaagctggaggacttccgggactaccggcgcctgcacaagccgcccaaggtgcaggagaagtgccagctggagatcaacttcaacacgctgcagaccaagctgcggctcagcaaccggcctgccttcatgccctctgagggcaggatggtctcggacatcaacaatgcctggggctgcctggagcaggtggagaagggctatgaggagtggttgctgaatgagatccggaggctggagcgactggaccacctggcagagaagttccggcagaaggcctccatccacgaggcctggactgacggcaaagaggccatgctgcgacagaaggactatgagaccgccaccctctcggagatcaaggccctgctcaagaagcatgaggccttcgagagtgacctggctgcccaccaggaccgtgtggagcagattgccgccatcgcacaggagctcaatgagctggactattatgactcacccagtgtcaacgcccgttgccaaaagatctgtgaccagtgggacaatctgggggccctaactcagaagcgaagggaagctctggagcggaccgagaaactgctggagaccattgaccagctgtacttggagtatgccaagcgggctgcacccttcaacaactggatggagggggccatggaggacctgcaggacaccttcattgtgcacaccattgaggagatccagggactgaccacagcccatgagcagttcaaggccaccctccctgatgccgacaaggagcgcctggccatcctgggcatccacaatgaggtgtccaagattgtccagacctaccacgtcaatatggcgggcaccaacccctacacaaccatcacgcctcaggagatcaatggcaaatgggaccacgtgcggcagctggtgcctcggagggaccaagctctgacggaggagcatgcccgacagcagcacaatgagaggctacgcaagcagtttggagcccaggccaatgtcatcgggccctggatccagaccaagatggaggagatcgggaggatctccattgagatgcatgggaccctggaggaccagctcagccacctgcggcagtatgagaagagcatcgtcaactacaagccaaagattgatcagctggagggcgaccaccagctcatccaggaggcgctcatcttcgacaacaagcacaccaactacaccatggagcacatccgtgtgggctgggagcagctgctcaccaccatcgccaggaccatcaatgaggtagagaaccagatcctgacccgggatgccaagggcatcagccaggagcagatgaatgagttccgggcctccttcaaccactttgaccgggatcactccggcacactgggtcccgaggagttcaaagcctgcctcatcagcttgggttatgatattggcaacgacccccagggagaagcagaatttgcccgcatcatgagcattgtggaccccaaccgcctgggggtagtgacattccaggccttcattgacttcatgtcccgcgagacagccgacacagatacagcagaccaagtcatggcttccttcaagatcctggctggggacaagaactacattaccatggacgagctgcgccgcgagctgccacccgaccaggctgagtactgcatcgcgcggatggccccctacaccggccccgactccgtgccaggtgctctggactacatgtccttctccacggcgctgtacggcgagagtgacctctaatccaccccgcccggccgccctcgtcttgtgcgccgtgccctgccttgcacctccgccgtcgcccatctcctgcctgggttcggtttcagctcccagcctccacccgggtgagctggggcccacgtggcatcgatcctccctgcccgcgaagtgacagtttacaaaattattttctgcaaaaaagaaaaaaaagttacgttaaaaaccaaaaaactacatattttattatagaaaaagtattttttctccaccagacaaatggaaaaaaagaggaaagattaactatttgcaccgaaatgtcttgttttgttgcgacataggaaaataaccaagcacaaagttatattccatcctttttactgatttttttttcttctatctgttccatctgctgtattcatttctccaatctcatgtccattttggtgtgggagtcggggtagggggtactcttgtcaaaaggcacattggtgcatgtgtgtttgctagctcacttgtccatgaaaatattttatgatattaaagaaaatcttttgaaatggctgttttttaaggaagagaatttatgtggcttctcatttttaaatcccctcagaggtgtgactagtctctttatcagcacacacttaaaaaatttttaatattgtctattaaaaataggacaaacttggagagtatggacaactttgatattgcttggcacagatggtattaaaaaaaccacactcctatgacagctctttgcctgctccttgcttgatgttttctggaagtgtgtgtggggtcaaggatggtgtggggcacctgtatctactcctaatgtttttgaccctgctgtgttcaatcttcttacacttcagtttcttcattttaaaaaggaaaaggtaatttcttcacagtctcctatgagttggacagaaagtcatggatgtgtaaaggacttcttgatgataagccccaccttcatttttccacggcaccaaacagccctgtgacatctgcattcaccccactcgtttttatttttgctgcagtgaacagcttgagttgtctcttaagagtcatctcatcccttgctattcgagatgacccacagatggcagctgttcagcatcacctgggagttcattggaaatacagaatctcaggccccacccctgaatgtcgaatactgtgtgtactgctctagcttctccagagtaaaagatagtctctataggatgccgtctgctctggcaccaggccccctgagcccatgccttttatctgacgtttgttttgcaacccattacatcacttgcccccgggcatcctttaaatttcatccttggctaattctcattgtaaccggttccagcttgctttaaatgattgggtggatggaattctccccattgacaattgacaggtggcaattaattgttcatgcctcagtgggatgaatccattacatctctttcctgcctaatatttttatctacctccgacttttttgtagggactttgttgatatcctcatgaaggcccatctctcctctctctggcttgtccatcccttgacaaaaccttaatgactgttctgggtaccaaatctgtggcaggagtgtgacccagctgccacccacctcctccatcactggaccagctcatagttgtcccttggacatggggttagtgcccaacaagtgtagtcatttggctaagtgagttactaggagggagaacagattcaatttcctgaggtggtgaggagagactgaaggctttgccagttctttggcctatgccaggctctctggtacttctgcnggtggcatgagctgtgtgaagcgcctctaaatttaaggctccaaagctctccaacacaaacaagactttagggtctgcgttatggacgccaagggaagaaatacaacctcaacatcagtgcctgtcaagggaggcagatgtgagctcgtctgcctgccaccggccatttggactaccttgggcaagtgacctccttaaatggggccgataatgttgctttccttctctccctggcacacagtaggcatttaataagtggcaatgggtattgtccctagagttgtataaaaaaccagctctagcagggcgtggtggtgcatgtccgtagtgccagctgcttgggaggctgaggtgaggatcacttgagcccaggagttttgagtccagcctgaacaacataacaagaccctgtctgtaaaatgggggaaaaagtcagctgtgctttgttatgctgtttaanatattcttaaagaaaaaggcctgattacagaaaaataccattaaggggaaccctctttcagtctctgtgctgagggtagtagtaggctgagtaatggtcccccaagatatccatttccgagtccctggaacccatgattgttaattcatatgacaaataagactttgcagatgggattaagaatcttgaggtggggagattggttctggattatctgggtgggtccttagggagcaggcatgtcggcatcagaggaaatgtgacgacagaagcaggggttggagtgatgtgaggccacaagccaatgaatgcggacagcctctagaagctagaaaagccagggaaacagattctccctgagagcctccagatagaatgcaggtctacagacccattttgggtctctattctccagaacttgagataatacgtttgtgttgttttaagccacttcatttgtgataatttgttacagcaaccataggaagctaatatgtgctccatcgttcatgccctggggagctggctgcctccctgacgtcagngacccgtggtataggcatgacctgctggagaaactgccctagcttcaaaggcctgagtgtgcaacattggcccttgggaggctgccttagctgctggacttgatctcctaagccttaaaagcgccattcatggagaggggagaaggaagcttccaagttctgagagcccaaaaaggccagaatagctgggcccagcaggagatgtaaggcttcctgttgtctcagatgcaggagccagagggcagcccagctccaggtaggcaccagccacagaactggaaagcccttgggaggctgaggtcctgccttctctatagcttatcttggcccctctctgtgtgtcagcctccctcctctccctgcagcccagctttgggtgcacacctccccatggtggcagaggtcaattccacagtgcctagtgttgacattttcttgacacgagactagtcccaattccaaatgtccaggaggcacttggcccagtctgacctggtgtgataaagtgatgcctgtcagtggataaggctggggccnttgctcatgggctagattgggtatcacctttaggataacccaaaaggtggcctcataagaactgtctcagttcatcaattttcacattttagcatctctgatattgagatagagcatacaattgatctcactttaggattaatggtgtcttacaattgctgttggccagatagcagtcatgacttagtgtcattgcctgcctatttgagacaggaatgtgagtcctgtcttttgtctcaaaaacttccattantcttacctcctggtaagatcaagctccagtatcaaaagttgcatagtgggtacccagagagaaaatgctgatgatcatagtgtagtactggcttacgaaatgctagccagggtgcaatggctcatgcctataatcccagcactttggcaggctgaggtgggcggatcgctcgagcccagaagttcaagaccagcctgagcaacatgatgaaactccgtctttactaaaaatacaaaattagccggatgtggtgccgcatgcctgtaatcccagctacttgggtggctgaggcaggcgaattacttcaacctgggagatggaggttgcagtgagccgagatcatgctgaaggaaggaagggagtaagggagggagggaggcgagagagagagaaagaaaaagaaatgctgcattttcagttctattgatggcacagcaggcaacggtgtgtgaaaaacaggcacttaaagactctgggccgggcacggtggcccatgcctgtaatcccagcactttgggaggctgaggcgggtgaatcatgaggtcaggagttcgagactagcctgaccaacatggtgaaactatgtctctactaaaaatacaaaaaattagctgggtgtggtggtgggtgcctgtaatctcagctactcgggaggctgaggcaggagaattgcttgaacccgggaggcggaggttgcggtgagccgagatcgcgctactgcactccagcctgggtgacagtgtgaaactttgtctc

SEQ ID NO: 432568 - DNA, 6324 bp, Homo sapiens
  misc_feature (3773)..(3773): n is a, c, g, or t
  misc_feature (4233)..(4233): n is a, c, g, or t
  misc_feature (4778)..(4778): n is a, c, g, or t
  misc_feature (5315)..(5315): n is a, c, g, or t
  misc_feature (5568)..(5568): n is a, c, g, or t
aagtgcaacctgtatttcatgcagtgatcgactctttgaggactccccggtcagaaactattcgttcttggtgacaagtccactcttcgtataggacgatcgattgttagtgttcattacttaggaacacccctaggggtctgttggagtggatccgccgcacaatcccgtggctggagaaccgggtgcccgagaacaccatgcatgccatgcaacagaagctggaggacttccgggactaccggcgcctgcacaagccgcccaaggtgcaggagaagtgccagctggagatcaacttcaacacgctgcagaccaagctgcggctcagcaaccggcctgccttcatgccctctgagggcaggatggtctcggacatcaacaatgcctggggctgcctggagcaggtggagaagggctatgaggagtggttgctgaatgagatccggaggctggagcgactggaccacctggcagagaagttccggcagaaggcctccatccacgaggcctggactgacggcaaagaggccatgctgcgacagaaggactatgagaccgccaccctctcggagatcaaggccctgctcaagaagcatgaggccttcgagagtgacctggctgcccaccaggaccgtgtggagcagattgccgccatcgcacaggagctcaatgagctggactattatgactcacccagtgtcaacgcccgttgccaaaagatctgtgaccagtgggacaatctgggggccctaactcagaagcgaagggaagctctggagcggaccgagaaactgctggagaccattgaccagctgtacttggagtatgccaagcgggctgcacccttcaacaactggatggagggggccatggaggacctgcaggacaccttcattgtgcacaccattgaggagatccagggactgaccacagcccatgagcagttcaaggccaccctccctgatgccgacaaggagcgcctggccatcctgggcatccacaatgaggtgtccaagattgtccagacctaccacgtcaatatggcgggcaccaacccctacacaaccatcacgcctcaggagatcaatggcaaatgggaccacgtgcggcagctggtgcctcggagggaccaagctctgacggaggagcatgcccgacagcagcacaatgagaggctacgcaagcagtttggagcccaggccaatgtcatcgggccctggatccagaccaagatggaggagatcgggaggatctccattgagatgcatgggaccctggaggaccagctcagccacctgcggcagtatgagaagagcatcgtcaactacaagccaaagattgatcagctggagggcgaccaccagctcatccaggaggcgctcatcttcgacaacaagcacaccaactacaccatggagcacatccgtgtgggctgggagcagctgctcaccaccatcgccaggaccatcaatgaggtagagaaccagatcctgacccgggatgccaagggcatcagccaggagcagatgaatgagttccgggcctccttcaaccactttgaccgggatcactccggcacactgggtcccgaggagttcaaagcctgcctcatcagcttgggttatgatattggcaacgacccccagggagaagcagaatttgcccgcatcatgagcattgtggaccccaaccgcctgggggtagtgacattccaggccttcattgacttcatgtcccgcgagacagccgacacagatacagcagaccaagtcatggcttccttcaagatcctggctggggacaagaactacattaccatggacgagctgcgccgcgagctgccacccgaccaggctgagtactgcatcgcgcggatggccccctacaccggccccgactccgtgccaggtgctctggactacatgtccttctccacggcgctgtacggcgagagtgacctctaatccaccccgcccggccgccctcgtcttgtgcgccgtgccctgccttgcacctccgccgtcgcccatctcctgcctgggttcggtttcagctcccagcctccacccgggtgagctggggcccacgtggcatcgatcctccctgcccgcgaagtgacagtttacaaaattattttctgcaaaaaagaaaaaaaagttacgttaaaaaccaaaaaactacatattttattatagaaaaagtattttttctccaccagacaaatggaaaaaaagaggaaagattaactatttgcaccgaaatgtcttgttttgttgcgacataggaaaataaccaagcacaaagttatattccatcctttttactgatttttttttcttctatctgttccatctgctgtattcatttctccaatctcatgtccattttggtgtgggagtcggggtagggggtactcttgtcaaaaggcacattggtgcatgtgtgtttgctagctcacttgtccatgaaaatattttatgatattaaagaaaatcttttgaaatggctgttttttaaggaagagaatttatgtggcttctcatttttaaatcccctcagaggtgtgactagtctctttatcagcacacacttaaaaaatttttaatattgtctattaaaaataggacaaacttggagagtatggacaactttgatattgcttggcacagatggtattaaaaaaaccacactcctatgacagctctttgcctgctccttgcttgatgttttctggaagtgtgtgtggggtcaaggatggtgtggggcacctgtatctactcctaatgtttttgaccctgctgtgttcaatcttcttacacttcagtttcttcattttaaaaaggaaaaggtaatttcttcacagtctcctatgagttggacagaaagtcatggatgtgtaaaggacttcttgatgataagccccaccttcatttttccacggcaccaaacagccctgtgacatctgcattcaccccactcgtttttatttttgctgcagtgaacagcttgagttgtctcttaagagtcatctcatcccttgctattcgagatgacccacagatggcagctgttcagcatcacctgggagttcattggaaatacagaatctcaggccccacccctgaatgtcgaatactgtgtgtactgctctagcttctccagagtaaaagatagtctctataggatgccgtctgctctggcaccaggccccctgagcccatgccttttatctgacgtttgttttgcaacccattacatcacttgcccccgggcatcctttaaatttcatccttggctaattctcattgtaaccggttccagcttgctttaaatgattgggtggatggaattctccccattgacaattgacaggtggcaattaattgttcatgcctcagtgggatgaatccattacatctctttcctgcctaatatttttatctacctccgacttttttgtagggactttgttgatatcctcatgaaggcccatctctcctctctctggcttgtccatcccttgacaaaaccttaatgactgttctgggtaccaaatctgtggcaggagtgtgacccagctgccacccacctcctccatcactggaccagctcatagttgtcccttggacatggggttagtgcccaacaagtgtagtcatttggctaagtgagttactaggagggagaacagattcaatttcctgaggtggtgaggagagactgaaggctttgccagttctttggcctatgccaggctctctggtacttctgcnggtggcatgagctgtgtgaagcgcctctaaatttaaggctccaaagctctccaacacaaacaagactttagggtctgcgttatggacgccaagggaagaaatacaacctcaacatcagtgcctgtcaagggaggcagatgtgagctcgtctgcctgccaccggccatttggactaccttgggcaagtgacctccttaaatggggccgataatgttgctttccttctctccctggcacacagtaggcatttaataagtggcaatgggtattgtccctagagttgtataaaaaaccagctctagcagggcgtggtggtgcatgtccgtagtgccagctgcttgggaggctgaggtgaggatcacttgagcccaggagttttgagtccagcctgaacaacataacaagaccctgtctgtaaaatgggggaaaaagtcagctgtgctttgttatgctgtttaanatattcttaaagaaaaaggcctgattacagaaaaataccattaaggggaaccctctttcagtctctgtgctgagggtagtagtaggctgagtaatggtcccccaagatatccatttccgagtccctggaacccatgattgttaattcatatgacaaataagactttgcagatgggattaagaatcttgaggtggggagattggttctggattatctgggtgggtccttagggagcaggcatgtcggcatcagaggaaatgtgacgacagaagcaggggttggagtgatgtgaggccacaagccaatgaatgcggacagcctctagaagctagaaaagccagggaaacagattctccctgagagcctccagatagaatgcaggtctacagacccattttgggtctctattctccagaacttgagataatacgtttgtgttgttttaagccacttcatttgtgataatttgttacagcaaccataggaagctaatatgtgctccatcgttcatgccctggggagctggctgcctccctgacgtcagngacccgtggtataggcatgacctgctggagaaactgccctagcttcaaaggcctgagtgtgcaacattggcccttgggaggctgccttagctgctggacttgatctcctaagccttaaaagcgccattcatggagaggggagaaggaagcttccaagttctgagagcccaaaaaggccagaatagctgggcccagcaggagatgtaaggcttcctgttgtctcagatgcaggagccagagggcagcccagctccaggtaggcaccagccacagaactggaaagcccttgggaggctgaggtcctgccttctctatagcttatcttggcccctctctgtgtgtcagcctccctcctctccctgcagcccagctttgggtgcacacctccccatggtggcagaggtcaattccacagtgcctagtgttgacattttcttgacacgagactagtcccaattccaaatgtccaggaggcacttggcccagtctgacctggtgtgataaagtgatgcctgtcagtggataaggctggggccnttgctcatgggctagattgggtatcacctttaggataacccaaaaggtggcctcataagaactgtctcagttcatcaattttcacattttagcatctctgatattgagatagagcatacaattgatctcactttaggattaatggtgtcttacaattgctgttggccagatagcagtcatgacttagtgtcattgcctgcctatttgagacaggaatgtgagtcctgtcttttgtctcaaaaacttccattantcttacctcctggtaagatcaagctccagtatcaaaagttgcatagtgggtacccagagagaaaatgctgatgatcatagtgtagtactggcttacgaaatgctagccagggtgcaatggctcatgcctataatcccagcactttggcaggctgaggtgggcggatcgctcgagcccagaagttcaagaccagcctgagcaacatgatgaaactccgtctttactaaaaatacaaaattagccggatgtggtgccgcatgcctgtaatcccagctacttgggtggctgaggcaggcgaattacttcaacctgggagatggaggttgcagtgagccgagatcatgctgaaggaaggaagggagtaagggagggagggaggcgagagagagagaaagaaaaagaaatgctgcattttcagttctattgatggcacagcaggcaacggtgtgtgaaaaacaggcacttaaagactctgggccgggcacggtggcccatgcctgtaatcccagcactttgggaggctgaggcgggtgaatcatgaggtcaggagttcgagactagcctgaccaacatggtgaaactatgtctctactaaaaatacaaaaaattagctgggtgtggtggtgggtgcctgtaatctcagctactcgggaggctgaggcaggagaattgcttgaacccgggaggcggaggttgcggtgagccgagatcgcgctactgcactccagcctgggtgacagtgtgaaactttgtctc

SEQ ID NO: 432569 - DNA, 6651 bp, Homo sapiens
  misc_feature (4100)..(4100): n is a, c, g, or t
  misc_feature (4560)..(4560): n is a, c, g, or t
  misc_feature (5105)..(5105): n is a, c, g, or t
  misc_feature (5642)..(5642): n is a, c, g, or t
  misc_feature (5895)..(5895): n is a, c, g, or t
agcgctagtgtgtccgcctagttcaagtgtgcgtggagattaggtccaagcgcccgcccagaggcaggcagtccgcgagcccagccgccgctgtcgccgccagtagcagccttcgccagcagcgccgcggcggaaccgggcgcaggggagcgagcccggccccgccagcccagcccagcccagccctactccctccccacgccagggcagcagccgttgctcagagagaaggtggaggaagaaatccagaccctagcacgcgcgcaccatcatggaccattatgattctcagcaaaccaacgattacatgcagccagaagaggactgggaccgggacctgctcctggacccggcctgggagaagcagcagagaaagacattcacggcatggtgtaactcccacctccggaaggcggggacacagatcgagaacatcgaagaggacttccgggatggcctgaagctcatgctgctgctggaggtcatctcaggtgaacgcttggccaagccagagcgaggcaagatgagagtgcacaagatctccaacgtcaacaaggccctggatttcatagccagcaaaggcgtcaaactggtgtccatcggagccgaagaaatcgtggatgggaatgtgaagatgaccctgggcatgatctggaccatcatcctgcgctttgccatccaggacatctccgtggaaggacatcaacaatgcctggggctgcctggagcaggtggagaagggctatgaggagtggttgctgaatgagatccggaggctggagcgactggaccacctggcagagaagttccggcagaaggcctccatccacgaggcctggactgacggcaaagaggccatgctgcgacagaaggactatgagaccgccaccctctcggagatcaaggccctgctcaagaagcatgaggccttcgagagtgacctggctgcccaccaggaccgtgtggagcagattgccgccatcgcacaggagctcaatgagctggactattatgactcacccagtgtcaacgcccgttgccaaaagatctgtgaccagtgggacaatctgggggccctaactcagaagcgaagggaagctctggagcggaccgagaaactgctggagaccattgaccagctgtacttggagtatgccaagcgggctgcacccttcaacaactggatggagggggccatggaggacctgcaggacaccttcattgtgcacaccattgaggagatccagggactgaccacagcccatgagcagttcaaggccaccctccctgatgccgacaaggagcgcctggccatcctgggcatccacaatgaggtgtccaagattgtccagacctaccacgtcaatatggcgggcaccaacccctacacaaccatcacgcctcaggagatcaatggcaaatgggaccacgtgcggcagctggtgcctcggagggaccaagctctgacggaggagcatgcccgacagcagcacaatgagaggctacgcaagcagtttggagcccaggccaatgtcatcgggccctggatccagaccaagatggaggagatcgggaggatctccattgagatgcatgggaccctggaggaccagctcagccacctgcggcagtatgagaagagcatcgtcaactacaagccaaagattgatcagctggagggcgaccaccagctcatccaggaggcgctcatcttcgacaacaagcacaccaactacaccatggagcacatccgtgtgggctgggagcagctgctcaccaccatcgccaggaccatcaatgaggtagagaaccagatcctgacccgggatgccaagggcatcagccaggagcagatgaatgagttccgggcctccttcaaccactttgaccgggatcactccggcacactgggtcccgaggagttcaaagcctgcctcatcagcttgggttatgatattggcaacgacccccagggagaagcagaatttgcccgcatcatgagcattgtggaccccaaccgcctgggggtagtgacattccaggccttcattgacttcatgtcccgcgagacagccgacacagatacagcagaccaagtcatggcttccttcaagatcctggctggggacaagaactacattaccatggacgagctgcgccgcgagctgccacccgaccaggctgagtactgcatcgcgcggatggccccctacaccggccccgactccgtgccaggtgctctggactacatgtccttctccacggcgctgtacggcgagagtgacctctaatccaccccgcccggccgccctcgtcttgtgcgccgtgccctgccttgcacctccgccgtcgcccatctcctgcctgggttcggtttcagctcccagcctccacccgggtgagctggggcccacgtggcatcgatcctccctgcccgcgaagtgacagtttacaaaattattttctgcaaaaaagaaaaaaaagttacgttaaaaaccaaaaaactacatattttattatagaaaaagtattttttctccaccagacaaatggaaaaaaagaggaaagattaactatttgcaccgaaatgtcttgttttgttgcgacataggaaaataaccaagcacaaagttatattccatcctttttactgatttttttttcttctatctgttccatctgctgtattcatttctccaatctcatgtccattttggtgtgggagtcggggtagggggtactcttgtcaaaaggcacattggtgcatgtgtgtttgctagctcacttgtccatgaaaatattttatgatattaaagaaaatcttttgaaatggctgttttttaaggaagagaatttatgtggcttctcatttttaaatcccctcagaggtgtgactagtctctttatcagcacacacttaaaaaatttttaatattgtctattaaaaataggacaaacttggagagtatggacaactttgatattgcttggcacagatggtattaaaaaaaccacactcctatgacagctctttgcctgctccttgcttgatgttttctggaagtgtgtgtggggtcaaggatggtgtggggcacctgtatctactcctaatgtttttgaccctgctgtgttcaatcttcttacacttcagtttcttcattttaaaaaggaaaaggtaatttcttcacagtctcctatgagttggacagaaagtcatggatgtgtaaaggacttcttgatgataagccccaccttcatttttccacggcaccaaacagccctgtgacatctgcattcaccccactcgtttttatttttgctgcagtgaacagcttgagttgtctcttaagagtcatctcatcccttgctattcgagatgacccacagatggcagctgttcagcatcacctgggagttcattggaaatacagaatctcaggccccacccctgaatgtcgaatactgtgtgtactgctctagcttctccagagtaaaagatagtctctataggatgccgtctgctctggcaccaggccccctgagcccatgccttttatctgacgtttgttttgcaacccattacatcacttgcccccgggcatcctttaaatttcatccttggctaattctcattgtaaccggttccagcttgctttaaatgattgggtggatggaattctccccattgacaattgacaggtggcaattaattgttcatgcctcagtgggatgaatccattacatctctttcctgcctaatatttttatctacctccgacttttttgtagggactttgttgatatcctcatgaaggcccatctctcctctctctggcttgtccatcccttgacaaaaccttaatgactgttctgggtaccaaatctgtggcaggagtgtgacccagctgccacccacctcctccatcactggaccagctcatagttgtcccttggacatggggttagtgcccaacaagtgtagtcatttggctaagtgagttactaggagggagaacagattcaatttcctgaggtggtgaggagagactgaaggctttgccagttctttggcctatgccaggctctctggtacttctgcnggtggcatgagctgtgtgaagcgcctctaaatttaaggctccaaagctctccaacacaaacaagactttagggtctgcgttatggacgccaagggaagaaatacaacctcaacatcagtgcctgtcaagggaggcagatgtgagctcgtctgcctgccaccggccatttggactaccttgggcaagtgacctccttaaatggggccgataatgttgctttccttctctccctggcacacagtaggcatttaataagtggcaatgggtattgtccctagagttgtataaaaaaccagctctagcagggcgtggtggtgcatgtccgtagtgccagctgcttgggaggctgaggtgaggatcacttgagcccaggagttttgagtccagcctgaacaacataacaagaccctgtctgtaaaatgggggaaaaagtcagctgtgctttgttatgctgtttaanatattcttaaagaaaaaggcctgattacagaaaaataccattaaggggaaccctctttcagtctctgtgctgagggtagtagtaggctgagtaatggtcccccaagatatccatttccgagtccctggaacccatgattgttaattcatatgacaaataagactttgcagatgggattaagaatcttgaggtggggagattggttctggattatctgggtgggtccttagggagcaggcatgtcggcatcagaggaaatgtgacgacagaagcaggggttggagtgatgtgaggccacaagccaatgaatgcggacagcctctagaagctagaaaagccagggaaacagattctccctgagagcctccagatagaatgcaggtctacagacccattttgggtctctattctccagaacttgagataatacgtttgtgttgttttaagccacttcatttgtgataatttgttacagcaaccataggaagctaatatgtgctccatcgttcatgccctggggagctggctgcctccctgacgtcagngacccgtggtataggcatgacctgctggagaaactgccctagcttcaaaggcctgagtgtgcaacattggcccttgggaggctgccttagctgctggacttgatctcctaagccttaaaagcgccattcatggagaggggagaaggaagcttccaagttctgagagcccaaaaaggccagaatagctgggcccagcaggagatgtaaggcttcctgttgtctcagatgcaggagccagagggcagcccagctccaggtaggcaccagccacagaactggaaagcccttgggaggctgaggtcctgccttctctatagcttatcttggcccctctctgtgtgtcagcctccctcctctccctgcagcccagctttgggtgcacacctccccatggtggcagaggtcaattccacagtgcctagtgttgacattttcttgacacgagactagtcccaattccaaatgtccaggaggcacttggcccagtctgacctggtgtgataaagtgatgcctgtcagtggataaggctggggccnttgctcatgggctagattgggtatcacctttaggataacccaaaaggtggcctcataagaactgtctcagttcatcaattttcacattttagcatctctgatattgagatagagcatacaattgatctcactttaggattaatggtgtcttacaattgctgttggccagatagcagtcatgacttagtgtcattgcctgcctatttgagacaggaatgtgagtcctgtcttttgtctcaaaaacttccattantcttacctcctggtaagatcaagctccagtatcaaaagttgcatagtgggtacccagagagaaaatgctgatgatcatagtgtagtactggcttacgaaatgctagccagggtgcaatggctcatgcctataatcccagcactttggcaggctgaggtgggcggatcgctcgagcccagaagttcaagaccagcctgagcaacatgatgaaactccgtctttactaaaaatacaaaattagccggatgtggtgccgcatgcctgtaatcccagctacttgggtggctgaggcaggcgaattacttcaacctgggagatggaggttgcagtgagccgagatcatgctgaaggaaggaagggagtaagggagggagggaggcgagagagagagaaagaaaaagaaatgctgcattttcagttctattgatggcacagcaggcaacggtgtgtgaaaaacaggcacttaaagactctgggccgggcacggtggcccatgcctgtaatcccagcactttgggaggctgaggcgggtgaatcatgaggtcaggagttcgagactagcctgaccaacatggtgaaactatgtctctactaaaaatacaaaaaattagctgggtgtggtggtgggtgcctgtaatctcagctactcgggaggctgaggcaggagaattgcttgaacccgggaggcggaggttgcggtgagccgagatcgcgctactgcactccagcctgggtgacagtgtgaaactttgtctc

SEQ ID NO: 432570 - DNA, 7208 bp, Homo sapiens
  misc_feature (4657)..(4657): n is a, c, g, or t
  misc_feature (5117)..(5117): n is a, c, g, or t
  misc_feature (5662)..(5662): n is a, c, g, or t
  misc_feature (6199)..(6199): n is a, c, g, or t
  misc_feature (6452)..(6452): n is a, c, g, or t
agcgctagtgtgtccgcctagttcaagtgtgcgtggagattaggtccaagcgcccgcccagaggcaggcagtccgcgagcccagccgccgctgtcgccgccagtagcagccttcgccagcagcgccgcggcggaaccgggcgcaggggagcgagcccggccccgccagcccagcccagcccagccctactccctccccacgccagggcagcagccgttgctcagagagaaggtggaggaagaaatccagaccctagcacgcgcgcaccatcatggaccattatgattctcagcaaaccaacgattacatgcagccagaagaggactgggaccgggacctgctcctggacccggcctgggagaagcagcagagaaagacattcacggcatggtgtaactcccacctccggaaggcggggacacagatcgagaacatcgaagaggacttccgggatggcctgaagctcatgctgctgctggaggtcatctcaggtgaacgcttggccaagccagagcgaggcaagatgagagtgcacaagatctccaacgtcaacaaggccctggatttcatagccagcaaaggcgtcaaactggtgtccatcggagccgaagaaatcgtggatgggaatgtgaagatgaccctgggcatgatctggaccatcatcctgcgctttgccatccaggacatctccgtggaagagacttcagccaaggaagggctgctcctgtggtgtcagagaaagacagccccttacaaaaatgtcaacatccagaacttccacataagctggaaggatggcctcggcttctgtgctttgatccaccgacaccggcccgagctgattgactacgggaagctgcggaaggatgatccactcacaaatctgaatacggcttttgacgtggcagagaagtacctggacatccccaagatgctggatgccgaagacatcgttggaactgcccgaccggatgagaaagccatcatgacttacgtgtctagcttctaccacgccttctctggagcccagaaggcggagacagcagccaatcgcatctgcaaggtgttggccgtcaaccaggagaacgagcagcttatggaagactacgagaagctggccagtgatctgttggagtggatccgccgcacaatcccgtggctggagaaccgggtgcccgagaacaccatgcatgccatgcaacagaagctggaggacttccgggactaccggcgcctgcacaagccgcccaaggtgcaggagaagtgccagctggagatcaacttcaacacgctgcagaccaagctgcggctcagcaaccggcctgccttcatgccctctgagggcaggatggtctcggacatcaacaatgcctggggctgcctggagcaggtggagaagggctatgaggagtggttgctgaatgagatccggaggctggagcgactggaccacctggcagagaagttccggcagaaggcctccatccacgaggcctggactgacggcaaagaggccatgctgcgacagaaggactatgagaccgccaccctctcggagatcaaggccctgctcaagaagcatgaggccttcgagagtgacctggctgcccaccaggaccgtgtggagcagattgccgccatcgcacaggagctcaatgagctggactattatgactcacccagtgtcaacgcccgttgccaaaagatctgtgaccagtgggacaatctgggggccctaactcagaagcgaagggaagctctggagcggaccgagaaactgctggagaccattgaccagctgtacttggagtatgccaagcgggctgcacccttcaacaactggatggagggggccatggaggacctgcaggacaccttcattgtgcacaccattgaggagatccagggactgaccacagcccatgagcagttcaaggccaccctccctgatgccgacaaggagcgcctggccatcctgggcatccacaatgaggtgtccaagattgtccagacctaccacgtcaatatggcgggcaccaacccctacacaaccatcacgcctcaggagatcaatggcaaatgggaccacgtgcggcagctggtgcctcggagggaccaagctctgacggaggagcatgcccgacagcagcacaatgagaggctacgcaagcagtttggagcccaggccaatgtcatcgggccctggatccagaccaagatggaggagatcgggaggatctccattgagatgcatgggaccctggaggaccagctcagccacctgcggcagtatgagaagagcatcgtcaactacaagccaaagattgatcagctggagggcgaccaccagctcatccaggaggcgctcatcttcgacaacaagcacaccaactacaccatggagcacatccgtgtgggctgggagcagctgctcaccaccatcgccaggaccatcaatgaggtagagaaccagatcctgacccgggatgccaagggcatcagccaggagcagatgaatgagttccgggcctccttcaaccactttgaccgggatcactccggcacactgggtcccgaggagttcaaagcctgcctcatcagcttgggttatgatattggcaacgacccccagggagaagcagaatttgcccgcatcatgagcattgtggaccccaaccgcctgggggtagtgacattccaggccttcattgacttcatgtcccgcgagacagccgacacagatacagcagaccaagtcatggcttccttcaagatcctggctggggacaagggtgctctggactacatgtccttctccacggcgctgtacggcgagagtgacctctaatccaccccgcccggccgccctcgtcttgtgcgccgtgccctgccttgcacctccgccgtcgcccatctcctgcctgggttcggtttcagctcccagcctccacccgggtgagctggggcccacgtggcatcgatcctccctgcccgcgaagtgacagtttacaaaattattttctgcaaaaaagaaaaaaaagttacgttaaaaaccaaaaaactacatattttattatagaaaaagtattttttctccaccagacaaatggaaaaaaagaggaaagattaactatttgcaccgaaatgtcttgttttgttgcgacataggaaaataaccaagcacaaagttatattccatcctttttactgatttttttttcttctatctgttccatctgctgtattcatttctccaatctcatgtccattttggtgtgggagtcggggtagggggtactcttgtcaaaaggcacattggtgcatgtgtgtttgctagctcacttgtccatgaaaatattttatgatattaaagaaaatcttttgaaatggctgttttttaaggaagagaatttatgtggcttctcatttttaaatcccctcagaggtgtgactagtctctttatcagcacacacttaaaaaatttttaatattgtctattaaaaataggacaaacttggagagtatggacaactttgatattgcttggcacagatggtattaaaaaaaccacactcctatgacagctctttgcctgctccttgcttgatgttttctggaagtgtgtgtggggtcaaggatggtgtggggcacctgtatctactcctaatgtttttgaccctgctgtgttcaatcttcttacacttcagtttcttcattttaaaaaggaaaaggtaatttcttcacagtctcctatgagttggacagaaagtcatggatgtgtaaaggacttcttgatgataagccccaccttcatttttccacggcaccaaacagccctgtgacatctgcattcaccccactcgtttttatttttgctgcagtgaacagcttgagttgtctcttaagagtcatctcatcccttgctattcgagatgacccacagatggcagctgttcagcatcacctgggagttcattggaaatacagaatctcaggccccacccctgaatgtcgaatactgtgtgtactgctctagcttctccagagtaaaagatagtctctataggatgccgtctgctctggcaccaggccccctgagcccatgccttttatctgacgtttgttttgcaacccattacatcacttgcccccgggcatcctttaaatttcatccttggctaattctcattgtaaccggttccagcttgctttaaatgattgggtggatggaattctccccattgacaattgacaggtggcaattaattgttcatgcctcagtgggatgaatccattacatctctttcctgcctaatatttttatctacctccgacttttttgtagggactttgttgatatcctcatgaaggcccatctctcctctctctggcttgtccatcccttgacaaaaccttaatgactgttctgggtaccaaatctgtggcaggagtgtgacccagctgccacccacctcctccatcactggaccagctcatagttgtcccttggacatggggttagtgcccaacaagtgtagtcatttggctaagtgagttactaggagggagaacagattcaatttcctgaggtggtgaggagagactgaaggctttgccagttctttggcctatgccaggctctctggtacttctgcnggtggcatgagctgtgtgaagcgcctctaaatttaaggctccaaagctctccaacacaaacaagactttagggtctgcgttatggacgccaagggaagaaatacaacctcaacatcagtgcctgtcaagggaggcagatgtgagctcgtctgcctgccaccggccatttggactaccttgggcaagtgacctccttaaatggggccgataatgttgctttccttctctccctggcacacagtaggcatttaataagtggcaatgggtattgtccctagagttgtataaaaaaccagctctagcagggcgtggtggtgcatgtccgtagtgccagctgcttgggaggctgaggtgaggatcacttgagcccaggagttttgagtccagcctgaacaacataacaagaccctgtctgtaaaatgggggaaaaagtcagctgtgctttgttatgctgtttaanatattcttaaagaaaaaggcctgattacagaaaaataccattaaggggaaccctctttcagtctctgtgctgagggtagtagtaggctgagtaatggtcccccaagatatccatttccgagtccctggaacccatgattgttaattcatatgacaaataagactttgcagatgggattaagaatcttgaggtggggagattggttctggattatctgggtgggtccttagggagcaggcatgtcggcatcagaggaaatgtgacgacagaagcaggggttggagtgatgtgaggccacaagccaatgaatgcggacagcctctagaagctagaaaagccagggaaacagattctccctgagagcctccagatagaatgcaggtctacagacccattttgggtctctattctccagaacttgagataatacgtttgtgttgttttaagccacttcatttgtgataatttgttacagcaaccataggaagctaatatgtgctccatcgttcatgccctggggagctggctgcctccctgacgtcagngacccgtggtataggcatgacctgctggagaaactgccctagcttcaaaggcctgagtgtgcaacattggcccttgggaggctgccttagctgctggacttgatctcctaagccttaaaagcgccattcatggagaggggagaaggaagcttccaagttctgagagcccaaaaaggccagaatagctgggcccagcaggagatgtaaggcttcctgttgtctcagatgcaggagccagagggcagcccagctccaggtaggcaccagccacagaactggaaagcccttgggaggctgaggtcctgccttctctatagcttatcttggcccctctctgtgtgtcagcctccctcctctccctgcagcccagctttgggtgcacacctccccatggtggcagaggtcaattccacagtgcctagtgttgacattttcttgacacgagactagtcccaattccaaatgtccaggaggcacttggcccagtctgacctggtgtgataaagtgatgcctgtcagtggataaggctggggccnttgctcatgggctagattgggtatcacctttaggataacccaaaaggtggcctcataagaactgtctcagttcatcaattttcacattttagcatctctgatattgagatagagcatacaattgatctcactttaggattaatggtgtcttacaattgctgttggccagatagcagtcatgacttagtgtcattgcctgcctatttgagacaggaatgtgagtcctgtcttttgtctcaaaaacttccattantcttacctcctggtaagatcaagctccagtatcaaaagttgcatagtgggtacccagagagaaaatgctgatgatcatagtgtagtactggcttacgaaatgctagccagggtgcaatggctcatgcctataatcccagcactttggcaggctgaggtgggcggatcgctcgagcccagaagttcaagaccagcctgagcaacatgatgaaactccgtctttactaaaaatacaaaattagccggatgtggtgccgcatgcctgtaatcccagctacttgggtggctgaggcaggcgaattacttcaacctgggagatggaggttgcagtgagccgagatcatgctgaaggaaggaagggagtaagggagggagggaggcgagagagagagaaagaaaaagaaatgctgcattttcagttctattgatggcacagcaggcaacggtgtgtgaaaaacaggcacttaaagactctgggccgggcacggtggcccatgcctgtaatcccagcactttgggaggctgaggcgggtgaatcatgaggtcaggagttcgagactagcctgaccaacatggtgaaactatgtctctactaaaaatacaaaaaattagctgggtgtggtggtgggtgcctgtaatctcagctactcgggaggctgaggcaggagaattgcttgaacccgggaggcggaggttgcggtgagccgagatcgcgctactgcactccagcctgggtgacagtgtgaaactttgtctc

SEQ ID NO: 432571 - DNA, 7424 bp, Homo sapiens
  misc_feature (4873)..(4873): n is a, c, g, or t
  misc_feature (5333)..(5333): n is a, c, g, or t
  misc_feature (5878)..(5878): n is a, c, g, or t
  misc_feature (6415)..(6415): n is a, c, g, or t
  misc_feature (6668)..(6668): n is a, c, g, or t
agcgctagtgtgtccgcctagttcaagtgtgcgtggagattaggtccaagcgcccgcccagaggcaggcagtccgcgagcccagccgccgctgtcgccgccagtagcagccttcgccagcagcgccgcggcggaaccgggcgcaggggagcgagcccggccccgccagcccagcccagcccagccctactccctccccacgccagggcagcagccgttgctcagagagaaggtggaggaagaaatccagaccctagcacgcgcgcaccatcatggaccattatgattctcagcaaaccaacgattacatgcagccagaagaggactgggaccgggacctgctcctggacccggcctgggagaagcagcagagaaagacattcacggcatggtgtaactcccacctccggaaggcggggacacagatcgagaacatcgaagaggacttccgggatggcctgaagctcatgctgctgctggaggtcatctcaggtgaacgcttggccaagccagagcgaggcaagatgagagtgcacaagatctccaacgtcaacaaggccctggatttcatagccagcaaaggcgtcaaactggtgtccatcggagccgaagaaatcgtggatgggaatgtgaagatgaccctgggcatgatctggaccatcatcctgcgctttgccatccaggacatctccgtggaagagacttcagccaaggaagggctgctcctgtggtgtcagagaaagacagccccttacaaaaatgtcaacatccagaacttccacataagctggaaggatggcctcggcttctgtgctttgatccaccgacaccggcccgagctgattgactacgggaagctgcggaaggatgatccactcacaaatctgaatacggcttttgacgtggcagagaagtacctggacatccccaagatgctggatgccgaagacatcgttggaactgcccgaccggatgagaaagccatcatgacttacgtgtctagcttctaccacgccttctctggagcccagaaggcggagacagcagccaatcgcatctgcaaggtgttggccgtcaaccaggagaacgagcagcttatggaagactacgagaagctggccagtgatctgttggagtggatccgccgcacaatcccgtggctggagaaccgggtgcccgagaacaccatgcatgccatgcaacagaagctggaggacttccgggactaccggcgcctgcacaagccgcccaaggtgcaggagaagtgccagctggagatcaacttcaacacgctgcagaccaagctgcggctcagcaaccggcctgccttcatgccctctgagggcaggatggtctcggacatcaacaatgcctggggctgcctggagcaggtggagaagggctatgaggagtggttgctgaatgagatccggaggctggagcgactggaccacctggcagagaagttccggcagaaggcctccatccacgaggcctggactgacggcaaagaggccatgctgcgacagaaggactatgagaccgccaccctctcggagatcaaggccctgctcaagaagcatgaggccttcgagagtgacctggctgcccaccaggaccgtgtggagcagattgccgccatcgcacaggagctcaatgagctggactattatgactcacccagtgtcaacgcccgttgccaaaagatctgtgaccagtgggacaatctgggggccctaactcagaagcgaagggaagctctggagcggaccgagaaactgctggagaccattgaccagctgtacttggagtatgccaagcgggctgcacccttcaacaactggatggagggggccatggaggacctgcaggacaccttcattgtgcacaccattgaggagatccagggactgaccacagcccatgagcagttcaaggccaccctccctgatgccgacaaggagcgcctggccatcctgggcatccacaatgaggtgtccaagattgtccagacctaccacgtcaatatggcgggcaccaacccctacacaaccatcacgcctcaggagatcaatggcaaatgggaccacgtgcggcagctggtgcctcggagggaccaagctctgacggaggagcatgcccgacagcagcacaatgagaggctacgcaagcagtttggagcccaggccaatgtcatcgggccctggatccagaccaagatggaggagatcgggaggatctccattgagatgcatgggaccctggaggaccagctcagccacctgcggcagtatgagaagagcatcgtcaactacaagccaaagattgatcagctggagggcgaccaccagctcatccaggaggcgctcatcttcgacaacaagcacaccaactacaccatggagcacatccgtgtgggctgggagcagctgctcaccaccatcgccaggaccatcaatgaggtagagaaccagatcctgacccgggatgccaagggcatcagccaggagcagatgaatgagttccgggcctccttcaaccactttgaccggaagaagacaggcatgatggacacggatgatttccgcgcctgcctgatctccatgggttacaacatgggagaagcagaatttgcccgcatcatgagcattgtggaccccaaccgcctgggggtagtgacattccaggccttcattgacttcatgtcccgcgagacagccgacacagatacagcagaccaagtcatggcttccttcaagatcctggctggggacaagttacaggagggaggcaaaatgcaaacggcacatgctgccttcacgccgccaggctttgcggctgtgtcgggccgcgccgctttacggctgctggactttgcggccttcctgaccactctctcctcgcagaactacattaccatggacgagctgcgccgcgagctgccacccgaccaggctgagtactgcatcgcgcggatggccccctacaccggccccgactccgtgccaggtgctctggactacatgtccttctccacggcgctgtacggcgagagtgacctctaatccaccccgcccggccgccctcgtcttgtgcgccgtgccctgccttgcacctccgccgtcgcccatctcctgcctgggttcggtttcagctcccagcctccacccgggtgagctggggcccacgtggcatcgatcctccctgcccgcgaagtgacagtttacaaaattattttctgcaaaaaagaaaaaaaagttacgttaaaaaccaaaaaactacatattttattatagaaaaagtattttttctccaccagacaaatggaaaaaaagaggaaagattaactatttgcaccgaaatgtcttgttttgttgcgacataggaaaataaccaagcacaaagttatattccatcctttttactgatttttttttcttctatctgttccatctgctgtattcatttctccaatctcatgtccattttggtgtgggagtcggggtagggggtactcttgtcaaaaggcacattggtgcatgtgtgtttgctagctcacttgtccatgaaaatattttatgatattaaagaaaatcttttgaaatggctgttttttaaggaagagaatttatgtggcttctcatttttaaatcccctcagaggtgtgactagtctctttatcagcacacacttaaaaaatttttaatattgtctattaaaaataggacaaacttggagagtatggacaactttgatattgcttggcacagatggtattaaaaaaaccacactcctatgacagctctttgcctgctccttgcttgatgttttctggaagtgtgtgtggggtcaaggatggtgtggggcacctgtatctactcctaatgtttttgaccctgctgtgttcaatcttcttacacttcagtttcttcattttaaaaaggaaaaggtaatttcttcacagtctcctatgagttggacagaaagtcatggatgtgtaaaggacttcttgatgataagccccaccttcatttttccacggcaccaaacagccctgtgacatctgcattcaccccactcgtttttatttttgctgcagtgaacagcttgagttgtctcttaagagtcatctcatcccttgctattcgagatgacccacagatggcagctgttcagcatcacctgggagttcattggaaatacagaatctcaggccccacccctgaatgtcgaatactgtgtgtactgctctagcttctccagagtaaaagatagtctctataggatgccgtctgctctggcaccaggccccctgagcccatgccttttatctgacgtttgttttgcaacccattacatcacttgcccccgggcatcctttaaatttcatccttggctaattctcattgtaaccggttccagcttgctttaaatgattgggtggatggaattctccccattgacaattgacaggtggcaattaattgttcatgcctcagtgggatgaatccattacatctctttcctgcctaatatttttatctacctccgacttttttgtagggactttgttgatatcctcatgaaggcccatctctcctctctctggcttgtccatcccttgacaaaaccttaatgactgttctgggtaccaaatctgtggcaggagtgtgacccagctgccacccacctcctccatcactggaccagctcatagttgtcccttggacatggggttagtgcccaacaagtgtagtcatttggctaagtgagttactaggagggagaacagattcaatttcctgaggtggtgaggagagactgaaggctttgccagttctttggcctatgccaggctctctggtacttctgcnggtggcatgagctgtgtgaagcgcctctaaatttaaggctccaaagctctccaacacaaacaagactttagggtctgcgttatggacgccaagggaagaaatacaacctcaacatcagtgcctgtcaagggaggcagatgtgagctcgtctgcctgccaccggccatttggactaccttgggcaagtgacctccttaaatggggccgataatgttgctttccttctctccctggcacacagtaggcatttaataagtggcaatgggtattgtccctagagttgtataaaaaaccagctctagcagggcgtggtggtgcatgtccgtagtgccagctgcttgggaggctgaggtgaggatcacttgagcccaggagttttgagtccagcctgaacaacataacaagaccctgtctgtaaaatgggggaaaaagtcagctgtgctttgttatgctgtttaanatattcttaaagaaaaaggcctgattacagaaaaataccattaaggggaaccctctttcagtctctgtgctgagggtagtagtaggctgagtaatggtcccccaagatatccatttccgagtccctggaacccatgattgttaattcatatgacaaataagactttgcagatgggattaagaatcttgaggtggggagattggttctggattatctgggtgggtccttagggagcaggcatgtcggcatcagaggaaatgtgacgacagaagcaggggttggagtgatgtgaggccacaagccaatgaatgcggacagcctctagaagctagaaaagccagggaaacagattctccctgagagcctccagatagaatgcaggtctacagacccattttgggtctctattctccagaacttgagataatacgtttgtgttgttttaagccacttcatttgtgataatttgttacagcaaccataggaagctaatatgtgctccatcgttcatgccctggggagctggctgcctccctgacgtcagngacccgtggtataggcatgacctgctggagaaactgccctagcttcaaaggcctgagtgtgcaacattggcccttgggaggctgccttagctgctggacttgatctcctaagccttaaaagcgccattcatggagaggggagaaggaagcttccaagttctgagagcccaaaaaggccagaatagctgggcccagcaggagatgtaaggcttcctgttgtctcagatgcaggagccagagggcagcccagctccaggtaggcaccagccacagaactggaaagcccttgggaggctgaggtcctgccttctctatagcttatcttggcccctctctgtgtgtcagcctccctcctctccctgcagcccagctttgggtgcacacctccccatggtggcagaggtcaattccacagtgcctagtgttgacattttcttgacacgagactagtcccaattccaaatgtccaggaggcacttggcccagtctgacctggtgtgataaagtgatgcctgtcagtggataaggctggggccnttgctcatgggctagattgggtatcacctttaggataacccaaaaggtggcctcataagaactgtctcagttcatcaattttcacattttagcatctctgatattgagatagagcatacaattgatctcactttaggattaatggtgtcttacaattgctgttggccagatagcagtcatgacttagtgtcattgcctgcctatttgagacaggaatgtgagtcctgtcttttgtctcaaaaacttccattantcttacctcctggtaagatcaagctccagtatcaaaagttgcatagtgggtacccagagagaaaatgctgatgatcatagtgtagtactggcttacgaaatgctagccagggtgcaatggctcatgcctataatcccagcactttggcaggctgaggtgggcggatcgctcgagcccagaagttcaagaccagcctgagcaacatgatgaaactccgtctttactaaaaatacaaaattagccggatgtggtgccgcatgcctgtaatcccagctacttgggtggctgaggcaggcgaattacttcaacctgggagatggaggttgcagtgagccgagatcatgctgaaggaaggaagggagtaagggagggagggaggcgagagagagagaaagaaaaagaaatgctgcattttcagttctattgatggcacagcaggcaacggtgtgtgaaaaacaggcacttaaagactctgggccgggcacggtggcccatgcctgtaatcccagcactttgggaggctgaggcgggtgaatcatgaggtcaggagttcgagactagcctgaccaacatggtgaaactatgtctctactaaaaatacaaaaaattagctgggtgtggtggtgggtgcctgtaatctcagctactcgggaggctgaggcaggagaattgcttgaacccgggaggcggaggttgcggtgagccgagatcgcgctactgcactccagcctgggtgacagtgtgaaactttgtctc

SEQ ID NO: 432572 - DNA, 3241 bp, Homo sapiens
agcgctagtgtgtccgcctagttcaagtgtgcgtggagattaggtccaagcgcccgcccagaggcaggcagtccgcgagcccagccgccgctgtcgccgccagtagcagccttcgccagcagcgccgcggcggaaccgggcgcaggggagcgagcccggccccgccagcccagcccagcccagccctactccctccccacgccagggcagcagccgttgctcagagagaaggtggaggaagaaatccagaccctagcacgcgcgcaccatcatggaccattatgattctcagcaaaccaacgattacatgcagccagaagaggactgggaccgggacctgctcctggacccggcctgggagaagcagcagagaaagacattcacggcatggtgtaactcccacctccggaaggcggggacacagatcgagaacatcgaagaggacttccgggatggcctgaagctcatgctgctgctggaggtcatctcaggtgaacgcttggccaagccagagcgaggcaagatgagagtgcacaagatctccaacgtcaacaaggccctggatttcatagccagcaaaggcgtcaaactggtgtccatcggagccgaagaaatcgtggatgggaatgtgaagatgaccctgggcatgatctggaccatcatcctgcgctttgccatccaggacatctccgtggaagagacttcagccaaggaagggctgctcctgtggtgtcagagaaagacagccccttacaaaaatgtcaacatccagaacttccacataagctggaaggatggcctcggcttctgtgctttgatccaccgacaccggcccgagctgattgactacgggaagctgcggaaggatgatccactcacaaatctgaatacggcttttgacgtggcagagaagtacctggacatccccaagatgctggatgccgaagacatcgttggaactgcccgaccggatgagaaagccatcatgacttacgtgtctagcttctaccacgccttctctggagcccagaaggcggagacagcagccaatcgcatctgcaaggtgttggccgtcaaccaggagaacgagcagcttatggaagactacgagaagctggccagtgatctgttggagtggatccgccgcacaatcccgtggctggagaaccgggtgcccgagaacaccatgcatgccatgcaacagaagctggaggacttccgggactaccggcgcctgcacaagccgcccaaggtgcaggagaagtgccagctggagatcaacttcaacacgctgcagaccaagctgcggctcagcaaccggcctgccttcatgccctctgagggcaggatggtctcggacatcaacaatgcctggggctgcctggagcaggtggagaagggctatgaggagtggttgctgaatgagatccggaggctggagcgactggaccacctggcagagaagttccggcagaaggcctccatccacgaggcctggactgacggcaaagaggccatgctgcgacagaaggactatgagaccgccaccctctcggagatcaaggccctgctcaagaagcatgaggccttcgagagtgacctggctgcccaccaggaccgtgtggagcagattgccgccatcgcacaggagctcaatgagctggactattatgactcacccagtgtcaacgcccgttgccaaaagatctgtgaccagtgggacaatctgggggccctaactcagaagcgaagggaagctctggagcggaccgagaaactgctggagaccattgaccagctgtacttggagtatgccaagcgggctgcacccttcaacaactggatggagggggccatggaggacctgcaggacaccttcattgtgcacaccattgaggagatccagggactgaccacagcccatgagcagttcaaggccaccctccctgatgccgacaaggagcgcctggccatcctgggcatccacaatgaggtgtccaagattgtccagacctaccacgtcaatatggcgggcaccaacccctacacaaccatcacgcctcaggagatcaatggcaaatgggaccacgtgcggcagctggtgcctcggagggaccaagctctgacggaggagcatgcccgacagcagcacaatgagaggctacgcaagcagtttggagcccaggccaatgtcatcgggccctggatccagaccaagatggaggagatcgggaggatctccattgagatgcatgggaccctggaggaccagctcagccacctgcggcagtatgagaagagcatcgtcaactacaagccaaagattgatcagctggagggcgaccaccagctcatccaggaggcgctcatcttcgacaacaagcacaccaactacaccatggagcacatccgtgtgggctgggagcagctgctcaccaccatcgccaggaccatcaatgaggtagagaaccagatcctgacccgggatgccaagggcatcagccaggagcagatgaatgagttccgggcctccttcaaccactttgaccgggatcactccggcacactgggtcccgaggagttcaaagcctgcctcatcagcttgggttatgatattggcaacgacccccagggagaagcagaatttgcccgcatcatgagcattgtggaccccaaccgcctgggggtagtgacattccaggccttcattgacttcatgtcccgcgagacagccgacacagatacagcagaccaagtcatggcttccttcaagatcctggctggggacaagaactacattaccatggacgagctgcgccgcgagctgccacccgaccaggctgagtactgcatcgcgcggatggccccctacaccggccccgactccgtgccaggtgctctggactacatgtccttctccacggcgctgtacggcgagagtgacctctaatccaccccgcccggccgccctcgtcttgtgcgccgtgcccacagatgtgaaatgaatgtaatctaatagaagcctaatcagcccaccatgttctccactgaaaaatcctctttctttggggtttttctttctttcttttttgattttgcactggacggtgacgtcagcctgtacaggctcccaggggtggcgtcaaatgctattgaaattgcgctgaatcgtatgctttttccttttgataaataaacaatgtaaaaatgtttcaaaaacctaataaaataaataaatacg

SEQ ID NO: 432573 - DNA, 3148 bp, Homo sapiens
agcgctagtgtgtccgcctagttcaagtgtgcgtggagattaggtccaagcgcccgcccagaggcaggcagtccgcgagcccagccgccgctgtcgccgccagtagcagccttcgccagcagcgccgcggcggaaccgggcgcaggggagcgagcccggccccgccagcccagcccagcccagccctactccctccccacgccagggcagcagccgttgctcagagagaaggtggaggaagaaatccagaccctagcacgcgcgcaccatcatggaccattatgattctcagcaaaccaacgattacatgcagccagaagaggactgggaccgggacctgctcctggacccggcctgggagaagcagcagagaaagacattcacggcatggtgtaactcccacctccggaaggcggggacacagatcgagaacatcgaagaggacttccgggatggcctgaagctcatgctgctgctggaggtcatctcaggtgaacgcttggccaagccagagcgaggcaagatgagagtgcacaagatctccaacgtcaacaaggccctggatttcatagccagcaaaggcgtcaaactggtgtccatcggagccgaagaaatcgtggatgggaatgtgaagatgaccctgggcatgatctggaccatcatcctgcgctttgccatccaggacatctccgtggaagagacttcagccaaggaagggctgctcctgtggtgtcagagaaagacagccccttacaaaaatgtcaacatccagaacttccacataagctggaaggatggcctcggcttctgtgctttgatccaccgacaccggcccgagctgattgactacgggaagctgcggaaggatgatccactcacaaatctgaatacggcttttgacgtggcagagaagtacctggacatccccaagatgctggatgccgaagacatcgttggaactgcccgaccggatgagaaagccatcatgacttacgtgtctagcttctaccacgccttctctggagcccagaaggcggagacagcagccaatcgcatctgcaaggtgttggccgtcaaccaggagaacgagcagcttatggaagactacgagaagctggccagtgatctgttggagtggatccgccgcacaatcccgtggctggagaaccgggtgcccgagaacaccatgcatgccatgcaacagaagctggaggacttccgggactaccggcgcctgcacaagccgcccaaggtgcaggagaagtgccagctggagatcaacttcaacacgctgcagaccaagctgcggctcagcaaccggcctgccttcatgccctctgagggcaggatggtctcggacatcaacaatgcctggggctgcctggagcaggtggagaagggctatgaggagtggttgctgaatgagatccggaggctggagcgactggaccacctggcagagaagttccggcagaaggcctccatccacgaggcctggactgacggcaaagaggccatgctgcgacagaaggactatgagaccgccaccctctcggagatcaaggccctgctcaagaagcatgaggccttcgagagtgacctggctgcccaccaggaccgtgtggagcagattgccgccatcgcacaggagctcaatgagctggactattatgactcacccagtgtcaacgcccgttgccaaaagatctgtgaccagtgggacaatctgggggccctaactcagaagcgaagggaagctctggagcggaccgagaaactgctggagaccattgaccagctgtacttggagtatgccaagcgggctgcacccttcaacaactggatggagggggccatggaggacctgcaggacaccttcattgtgcacaccattgaggagatccagggactgaccacagcccatgagcagttcaaggccaccctccctgatgccgacaaggagcgcctggccatcctgggcatccacaatgaggtgtccaagattgtccagacctaccacgtcaatatggcgggcaccaacccctacacaaccatcacgcctcaggagatcaatggcaaatgggaccacgtgcggcagctggtgcctcggagggaccaagctctgacggaggagcatgcccgacagcagcacaatgagaggctacgcaagcagtttggagcccaggccaatgtcatcgggccctggatccagaccaagatggaggagatcgggaggatctccattgagatgcatgggaccctggaggaccagctcagccacctgcggcagtatgagaagagcatcgtcaactacaagccaaagattgatcagctggagggcgaccaccagctcatccaggaggcgctcatcttcgacaacaagcacaccaactacaccatggagcacatccgtgtgggctgggagcagctgctcaccaccatcgccaggaccatcaatgaggtagagaaccagatcctgacccgggatgccaagggcatcagccaggagcagatgaatgagttccgggcctccttcaaccactttgaccgggatcactccggcacactgggtcccgaggagttcaaagcctgcctcatcagcttgggttatgatattggcaacgacccccagggagaagcagaatttgcccgcatcatgagcattgtggaccccaaccgcctgggggtagtgacattccaggccttcattgacttcatgtcccgcgagacagccgacacagatacagcagaccaagtcatggcttccttcaagatcctggctggggacaagaactacattaccatggacgagctgcgccgcgagctgccacccgaccaggctgagtactgcatcgcgcggatggccccctacaccggccccgactccgtgccaggtgctctggactacatgtccttctccacggcgctgtacggcgagagtgacctctaatccaccccgcccggccgccctcgtcttgtgcgccgtgccctgccttgcacctccgccgtcgcccatctcctgcctgggttcggtttcagctcccagcctccacccgggaccccctaacgcctcacctcgtagatactaagtacctgactcctacccctcgcaatcatggcaagccaacgccacttatccagtgaacca

SEQ ID NO: 432574 - DNA, 6757 bp, Homo sapiens
  misc_feature (4206)..(4206): n is a, c, g, or t
  misc_feature (4666)..(4666): n is a, c, g, or t
  misc_feature (5211)..(5211): n is a, c, g, or t
  misc_feature (5748)..(5748): n is a, c, g, or t
  misc_feature (6001)..(6001): n is a, c, g, or t
agcgctagtgtgtccgcctagttcaagtgtgcgtggagattaggtccaagcgcccgcccagaggcaggcagtccgcgagcccagccgccgctgtcgccgccagtagcagccttcgccagcagcgccgcggcggaaccgggcgcaggggagcgagcccggccccgccagcccagcccagcccagccctactccctccccacgccagggcagcagccgttgctcagagagaaggtggaggaagaaatccagaccctagcacgcgcgcaccatcatggaccattatgattctcagcaaaccaacgattacatgcagccagaagaggactgggaccgggacctgctcctggacccggcctgggagaagcagcagagaaagacattcacggcatggtgtaactcccacctccggaaggcggggacacagatcgagaacatcgaagaggacttccgggatggcctgaagctcatgctgctgctggaggtcatctcaggtgaacgcttggccaagccagagcgaggcaagatgagagtgcacaagatctccaacgtcaacaaggccctggatttcatagccagcaaaggcgtcaaactggtgtccatcggagccgaagaaatcgtggatgggaatgtgaagatgaccctgggcatgatctggaccatcatcctgcgctttgccatccaggacatctccgtggaagagacttcagccaaggaagggctgctcctgtggtgtcagagaaagacagccccttacaaaaatgtcaacatccagaacttccacataagctggaaggatggcctcggcttctgtgctttgatccaccgacaccggcccgagctgattgactacgggaagctgcggaaggatgatccactcacaaatctgaatacggcttttgacgtggcagagaagtacctggacatccccaagatgctggatgccgaagacatcgttggaactgcccgaccggatgagaaagccatcatgacttacgtgtctagcttctaccacgccttctctggagcccagaaggcggagacagcagccaatcgcatctgcaaggtgttggccgtcaaccaggagaacgagcagcttatggaagactacgagaagctggccagtgatctgttggagtggatccgccgcacaatcccgtggctggagaaccgggtgcccgagaacaccatgcatgccatgcaacagaagctggaggacttccgggactaccggcgcctgcacaagccgcccaaggtgcaggagaagtgccagctggagatcaacttcaacacgctgcagaccaagctgcggctcagcaaccggcctgccttcatgccctctgagggcaggatggtctcggacatcaacaatgcctggggctgcctggagcaggtggagaagggctatgaggagtggttgctgaatgagatccggaggctggagcgactggaccacctggcagagaagttccggcagaaggcctccatccacgaggcctggactgacggcaaagaggccatgctgcgacagaaggactatgagaccgccaccctctcggagatcaaggccctgctcaagaagcatgaggccttcgagagtgacctggctgcccaccaggaccgtgtggagcagattgccgccatcgcacaggagctcaatgagctggactattatgactcacccagtgtcaacgcccgttgccaaaagatctgtgaccagtgggacaatctgggggccctaactcagaagcgaagggaagctctggagcggaccgagaaactgctggagaccattgaccagctgtacttggagtatgccaagcgggctgcacccttcaacaactggatggagggggccatggaggacctgcaggacaccttcattgtgcacaccattgaggagatccagggactgaccacagcccatgagcagttcaaggccaccctccctgatgccgacaaggagcgcctggccatcctgggcatccacaatgaggtgtccaagattgtccagacctaccacgtcaatatggcgggcaccaacccctacacaaccatcacgcctcaggagatcaatggcaaatgggaccacgtgcggcagctggtgcctcggagggaccaagctctgacggaggagcatgcccgacagcagcacaatgagaggctacgcaagcagtttggagcccaggccaatgtcatcgggccctggatccagaccaagatggaggagatcgggaggatctccattgagatgcatgggaccctggaggaccagctcagccacctgcggcagtatgagaagagcatcgtcaactacaagccaaagattgatcagctggagggcgaccaccagctcatccaggaggcgctcatcttcgacaacaagcacaccaactacaccatggagcacatccgtgtgggctgggagcagctgctcaccaccatcgccaggaccatcaatgaggtagagaaccagatcctgacccgggatgccaagggcatcagccaggagcagatgaatgagttccgggcctccttcaaccactttgaccgggatcactccggcacactgggtcccgaggagttcaaagcctgcctcatcagcttgggttatgatattggcaacgacccccagggagaagcagaatttgcccgcatcatgagcattgtggaccccaaccgcctgggggtagtgacattccaggccttcattgacttcatgtcccgcgagacagccgacacagatacagcagaccaagtcatggcttccttcaagatcctggctggggacaagaactacattaccatggacgagctgcgccgcgagctgccacccgaccaggctgagtatcttgtcaaaaggcacattggtgcatgtgtgtttgctagctcacttgtccatgaaaatattttatgatattaaagaaaatcttttgaaatggctgttttttaaggaagagaatttatgtggcttctcatttttaaatcccctcagaggtgtgactagtctctttatcagcacacacttaaaaaatttttaatattgtctattaaaaataggacaaacttggagagtatggacaactttgatattgcttggcacagatggtattaaaaaaaccacactcctatgacagctctttgcctgctccttgcttgatgttttctggaagtgtgtgtggggtcaaggatggtgtggggcacctgtatctactcctaatgtttttgaccctgctgtgttcaatcttcttacacttcagtttcttcattttaaaaaggaaaaggtaatttcttcacagtctcctatgagttggacagaaagtcatggatgtgtaaaggacttcttgatgataagccccaccttcatttttccacggcaccaaacagccctgtgacatctgcattcaccccactcgtttttatttttgctgcagtgaacagcttgagttgtctcttaagagtcatctcatcccttgctattcgagatgacccacagatggcagctgttcagcatcacctgggagttcattggaaatacagaatctcaggccccacccctgaatgtcgaatactgtgtgtactgctctagcttctccagagtaaaagatagtctctataggatgccgtctgctctggcaccaggccccctgagcccatgccttttatctgacgtttgttttgcaacccattacatcacttgcccccgggcatcctttaaatttcatccttggctaattctcattgtaaccggttccagcttgctttaaatgattgggtggatggaattctccccattgacaattgacaggtggcaattaattgttcatgcctcagtgggatgaatccattacatctctttcctgcctaatatttttatctacctccgacttttttgtagggactttgttgatatcctcatgaaggcccatctctcctctctctggcttgtccatcccttgacaaaaccttaatgactgttctgggtaccaaatctgtggcaggagtgtgacccagctgccacccacctcctccatcactggaccagctcatagttgtcccttggacatggggttagtgcccaacaagtgtagtcatttggctaagtgagttactaggagggagaacagattcaatttcctgaggtggtgaggagagactgaaggctttgccagttctttggcctatgccaggctctctggtacttctgcnggtggcatgagctgtgtgaagcgcctctaaatttaaggctccaaagctctccaacacaaacaagactttagggtctgcgttatggacgccaagggaagaaatacaacctcaacatcagtgcctgtcaagggaggcagatgtgagctcgtctgcctgccaccggccatttggactaccttgggcaagtgacctccttaaatggggccgataatgttgctttccttctctccctggcacacagtaggcatttaataagtggcaatgggtattgtccctagagttgtataaaaaaccagctctagcagggcgtggtggtgcatgtccgtagtgccagctgcttgggaggctgaggtgaggatcacttgagcccaggagttttgagtccagcctgaacaacataacaagaccctgtctgtaaaatgggggaaaaagtcagctgtgctttgttatgctgtttaanatattcttaaagaaaaaggcctgattacagaaaaataccattaaggggaaccctctttcagtctctgtgctgagggtagtagtaggctgagtaatggtcccccaagatatccatttccgagtccctggaacccatgattgttaattcatatgacaaataagactttgcagatgggattaagaatcttgaggtggggagattggttctggattatctgggtgggtccttagggagcaggcatgtcggcatcagaggaaatgtgacgacagaagcaggggttggagtgatgtgaggccacaagccaatgaatgcggacagcctctagaagctagaaaagccagggaaacagattctccctgagagcctccagatagaatgcaggtctacagacccattttgggtctctattctccagaacttgagataatacgtttgtgttgttttaagccacttcatttgtgataatttgttacagcaaccataggaagctaatatgtgctccatcgttcatgccctggggagctggctgcctccctgacgtcagngacccgtggtataggcatgacctgctggagaaactgccctagcttcaaaggcctgagtgtgcaacattggcccttgggaggctgccttagctgctggacttgatctcctaagccttaaaagcgccattcatggagaggggagaaggaagcttccaagttctgagagcccaaaaaggccagaatagctgggcccagcaggagatgtaaggcttcctgttgtctcagatgcaggagccagagggcagcccagctccaggtaggcaccagccacagaactggaaagcccttgggaggctgaggtcctgccttctctatagcttatcttggcccctctctgtgtgtcagcctccctcctctccctgcagcccagctttgggtgcacacctccccatggtggcagaggtcaattccacagtgcctagtgttgacattttcttgacacgagactagtcccaattccaaatgtccaggaggcacttggcccagtctgacctggtgtgataaagtgatgcctgtcagtggataaggctggggccnttgctcatgggctagattgggtatcacctttaggataacccaaaaggtggcctcataagaactgtctcagttcatcaattttcacattttagcatctctgatattgagatagagcatacaattgatctcactttaggattaatggtgtcttacaattgctgttggccagatagcagtcatgacttagtgtcattgcctgcctatttgagacaggaatgtgagtcctgtcttttgtctcaaaaacttccattantcttacctcctggtaagatcaagctccagtatcaaaagttgcatagtgggtacccagagagaaaatgctgatgatcatagtgtagtactggcttacgaaatgctagccagggtgcaatggctcatgcctataatcccagcactttggcaggctgaggtgggcggatcgctcgagcccagaagttcaagaccagcctgagcaacatgatgaaactccgtctttactaaaaatacaaaattagccggatgtggtgccgcatgcctgtaatcccagctacttgggtggctgaggcaggcgaattacttcaacctgggagatggaggttgcagtgagccgagatcatgctgaaggaaggaagggagtaagggagggagggaggcgagagagagagaaagaaaaagaaatgctgcattttcagttctattgatggcacagcaggcaacggtgtgtgaaaaacaggcacttaaagactctgggccgggcacggtggcccatgcctgtaatcccagcactttgggaggctgaggcgggtgaatcatgaggtcaggagttcgagactagcctgaccaacatggtgaaactatgtctctactaaaaatacaaaaaattagctgggtgtggtggtgggtgcctgtaatctcagctactcgggaggctgaggcaggagaattgcttgaacccgggaggcggaggttgcggtgagccgagatcgcgctactgcactccagcctgggtgacagtgtgaaactttgtctc

SEQ ID NO: 432575 - DNA, 6852 bp, Homo sapiens
  misc_feature (4301)..(4301): n is a, c, g, or t
  misc_feature (4761)..(4761): n is a, c, g, or t
  misc_feature (5306)..(5306): n is a, c, g, or t
  misc_feature (5843)..(5843): n is a, c, g, or t
  misc_feature (6096)..(6096): n is a, c, g, or t
agcgctagtgtgtccgcctagttcaagtgtgcgtggagattaggtccaagcgcccgcccagaggcaggcagtccgcgagcccagccgccgctgtcgccgccagtagcagccttcgccagcagcgccgcggcggaaccgggcgcaggggagcgagcccggccccgccagcccagcccagcccagccctactccctccccacgccagggcagcagccgttgctcagagagaaggtggaggaagaaatccagaccctagcacgcgcgcaccatcatggaccattatgattctcagcaaaccaacgattacatgcagccagaagaggactgggaccgggacctgctcctggacccggcctgggagaagcagcagagaaagacattcacggcatggtgtaactcccacctccggaaggcggggacacagatcgagaacatcgaagaggacttccgggatggcctgaagctcatgctgctgctggaggtcatctcaggtgaacgcttggccaagccagagcgaggcaagatgagagtgcacaagatctccaacgtcaacaaggccctggatttcatagccagcaaaggcgtcaaactggtgtccatcggagccgaagaaatcgtggatgggaatgtgaagatgaccctgggcatgatctggaccatcatcctgcgctttgccatccaggacatctccgtggaagagacttcagccaaggaagggctgctcctgtggtgtcagagaaagacagccccttacaaaaatgtcaacatccagaacttccacataagctggaaggatggcctcggcttctgtgctttgatccaccgacaccggcccgagctgattgactacgggaagctgcggaaggatgatccactcacaaatctgaatacggcttttgacgtggcagagaagtacctggacatccccaagatgctggatgccgaagacatcgttggaactgcccgaccggatgagaaagccatcatgacttacgtgtctagcttctaccacgccttctctggagcccagaaggcggagacagcagccaatcgcatctgcaaggtgttggccgtcaaccaggagaacgagcagcttatggaagactacgagaagctggccagtgatctgttggagtggatccgccgcacaatcccgtggctggagaaccgggtgcccgagaacaccatgcatgccatgcaacagaagctggaggacttccgggactaccggcgcctgcacaagccgcccaaggtgcaggagaagtgccagctggagatcaacttcaacacgctgcagaccaagctgcggctcagcaaccggcctgccttcatgccctctgagggcaggatggtctcggacatcaacaatgcctggggctgcctggagcaggtggagaagggctatgaggagtggttgctgaatgagatccggaggctggagcgactggaccacctggcagagaagttccggcagaaggcctccatccacgaggcctggactgacggcaaagaggccatgctgcgacagaaggactatgagaccgccaccctctcggagatcaaggccctgctcaagaagcatgaggccttcgagagtgacctggctgcccaccaggaccgtgtggagcagattgccgccatcgcacaggagctcaatgagctggactattatgactcacccagtgtcaacgcccgttgccaaaagatctgtgaccagtgggacaatctgggggccctaactcagaagcgaagggaagctctggagcggaccgagaaactgctggagaccattgaccagctgtacttggagtatgccaagcgggctgcacccttcaacaactggatggagggggccatggaggacctgcaggacaccttcattgtgcacaccattgaggagatccagggactgaccacagcccatgagcagttcaaggccaccctccctgatgccgacaaggagcgcctggccatcctgggcatccacaatgaggtgtccaagattgtccagacctaccacgtcaatatggcgggcaccaacccctacacaaccatcacgcctcaggagatcaatggcaaatgggaccacgtgcggcagctggtgcctcggagggaccaagctctgacggaggagcatgcccgacagcagcacaatgagaggctacgcaagcagtttggagcccaggccaatgtcatcgggccctggatccagaccaagatggaggagatcgggaggatctccattgagatgcatgggaccctggaggaccagctcagccacctgcggcagtatgagaagagcatcgtcaactacaagccaaagattgatcagctggagggcgaccaccagctcatccaggaggcgctcatcttcgacaacaagcacaccaactacaccatggagcacatccgtgtgggctgggagcagctgctcaccaccatcgccaggaccatcaatgaggtagagaaccagatcctgacccgggatgccaagggcatcagccaggagcagatgaatgagttccgggcctccttcaaccactttgaccgggatcactccggcacactgggtcccgaggagttcaaagcctgcctcatcagcttgggttatgatattggcaacgacccccagtgcccgcgaagtgacagtttacaaaattattttctgcaaaaaagaaaaaaaagttacgttaaaaaccaaaaaactacatattttattatagaaaaagtattttttctccaccagacaaatggaaaaaaagaggaaagattaactatttgcaccgaaatgtcttgttttgttgcgacataggaaaataaccaagcacaaagttatattccatcctttttactgatttttttttcttctatctgttccatctgctgtattcatttctccaatctcatgtccattttggtgtgggagtcggggtagggggtactcttgtcaaaaggcacattggtgcatgtgtgtttgctagctcacttgtccatgaaaatattttatgatattaaagaaaatcttttgaaatggctgttttttaaggaagagaatttatgtggcttctcatttttaaatcccctcagaggtgtgactagtctctttatcagcacacacttaaaaaatttttaatattgtctattaaaaataggacaaacttggagagtatggacaactttgatattgcttggcacagatggtattaaaaaaaccacactcctatgacagctctttgcctgctccttgcttgatgttttctggaagtgtgtgtggggtcaaggatggtgtggggcacctgtatctactcctaatgtttttgaccctgctgtgttcaatcttcttacacttcagtttcttcattttaaaaaggaaaaggtaatttcttcacagtctcctatgagttggacagaaagtcatggatgtgtaaaggacttcttgatgataagccccaccttcatttttccacggcaccaaacagccctgtgacatctgcattcaccccactcgtttttatttttgctgcagtgaacagcttgagttgtctcttaagagtcatctcatcccttgctattcgagatgacccacagatggcagctgttcagcatcacctgggagttcattggaaatacagaatctcaggccccacccctgaatgtcgaatactgtgtgtactgctctagcttctccagagtaaaagatagtctctataggatgccgtctgctctggcaccaggccccctgagcccatgccttttatctgacgtttgttttgcaacccattacatcacttgcccccgggcatcctttaaatttcatccttggctaattctcattgtaaccggttccagcttgctttaaatgattgggtggatggaattctccccattgacaattgacaggtggcaattaattgttcatgcctcagtgggatgaatccattacatctctttcctgcctaatatttttatctacctccgacttttttgtagggactttgttgatatcctcatgaaggcccatctctcctctctctggcttgtccatcccttgacaaaaccttaatgactgttctgggtaccaaatctgtggcaggagtgtgacccagctgccacccacctcctccatcactggaccagctcatagttgtcccttggacatggggttagtgcccaacaagtgtagtcatttggctaagtgagttactaggagggagaacagattcaatttcctgaggtggtgaggagagactgaaggctttgccagttctttggcctatgccaggctctctggtacttctgcnggtggcatgagctgtgtgaagcgcctctaaatttaaggctccaaagctctccaacacaaacaagactttagggtctgcgttatggacgccaagggaagaaatacaacctcaacatcagtgcctgtcaagggaggcagatgtgagctcgtctgcctgccaccggccatttggactaccttgggcaagtgacctccttaaatggggccgataatgttgctttccttctctccctggcacacagtaggcatttaataagtggcaatgggtattgtccctagagttgtataaaaaaccagctctagcagggcgtggtggtgcatgtccgtagtgccagctgcttgggaggctgaggtgaggatcacttgagcccaggagttttgagtccagcctgaacaacataacaagaccctgtctgtaaaatgggggaaaaagtcagctgtgctttgttatgctgtttaanatattcttaaagaaaaaggcctgattacagaaaaataccattaaggggaaccctctttcagtctctgtgctgagggtagtagtaggctgagtaatggtcccccaagatatccatttccgagtccctggaacccatgattgttaattcatatgacaaataagactttgcagatgggattaagaatcttgaggtggggagattggttctggattatctgggtgggtccttagggagcaggcatgtcggcatcagaggaaatgtgacgacagaagcaggggttggagtgatgtgaggccacaagccaatgaatgcggacagcctctagaagctagaaaagccagggaaacagattctccctgagagcctccagatagaatgcaggtctacagacccattttgggtctctattctccagaacttgagataatacgtttgtgttgttttaagccacttcatttgtgataatttgttacagcaaccataggaagctaatatgtgctccatcgttcatgccctggggagctggctgcctccctgacgtcagngacccgtggtataggcatgacctgctggagaaactgccctagcttcaaaggcctgagtgtgcaacattggcccttgggaggctgccttagctgctggacttgatctcctaagccttaaaagcgccattcatggagaggggagaaggaagcttccaagttctgagagcccaaaaaggccagaatagctgggcccagcaggagatgtaaggcttcctgttgtctcagatgcaggagccagagggcagcccagctccaggtaggcaccagccacagaactggaaagcccttgggaggctgaggtcctgccttctctatagcttatcttggcccctctctgtgtgtcagcctccctcctctccctgcagcccagctttgggtgcacacctccccatggtggcagaggtcaattccacagtgcctagtgttgacattttcttgacacgagactagtcccaattccaaatgtccaggaggcacttggcccagtctgacctggtgtgataaagtgatgcctgtcagtggataaggctggggccnttgctcatgggctagattgggtatcacctttaggataacccaaaaggtggcctcataagaactgtctcagttcatcaattttcacattttagcatctctgatattgagatagagcatacaattgatctcactttaggattaatggtgtcttacaattgctgttggccagatagcagtcatgacttagtgtcattgcctgcctatttgagacaggaatgtgagtcctgtcttttgtctcaaaaacttccattantcttacctcctggtaagatcaagctccagtatcaaaagttgcatagtgggtacccagagagaaaatgctgatgatcatagtgtagtactggcttacgaaatgctagccagggtgcaatggctcatgcctataatcccagcactttggcaggctgaggtgggcggatcgctcgagcccagaagttcaagaccagcctgagcaacatgatgaaactccgtctttactaaaaatacaaaattagccggatgtggtgccgcatgcctgtaatcccagctacttgggtggctgaggcaggcgaattacttcaacctgggagatggaggttgcagtgagccgagatcatgctgaaggaaggaagggagtaagggagggagggaggcgagagagagagaaagaaaaagaaatgctgcattttcagttctattgatggcacagcaggcaacggtgtgtgaaaaacaggcacttaaagactctgggccgggcacggtggcccatgcctgtaatcccagcactttgggaggctgaggcgggtgaatcatgaggtcaggagttcgagactagcctgaccaacatggtgaaactatgtctctactaaaaatacaaaaaattagctgggtgtggtggtgggtgcctgtaatctcagctactcgggaggctgaggcaggagaattgcttgaacccgggaggcggaggttgcggtgagccgagatcgcgctactgcactccagcctgggtgacagtgtgaaactttgtctc

SEQ ID NO: 432576 - DNA, 3031 bp, Homo sapiens
agcgctagtgtgtccgcctagttcaagtgtgcgtggagattaggtccaagcgcccgcccagaggcaggcagtccgcgagcccagccgccgctgtcgccgccagtagcagccttcgccagcagcgccgcggcggaaccgggcgcaggggagcgagcccggccccgccagcccagcccagcccagccctactccctccccacgccagggcagcagccgttgctcagagagaaggtggaggaagaaatccagaccctagcacgcgcgcaccatcatggaccattatgattctcagcaaaccaacgattacatgcagccagaagaggactgggaccgggacctgctcctggacccggcctgggagaagcagcagagaaagacattcacggcatggtgtaactcccacctccggaaggcggggacacagatcgagaacatcgaagaggacttccgggatggcctgaagctcatgctgctgctggaggtcatctcaggtgaacgcttggccaagccagagcgaggcaagatgagagtgcacaagatctccaacgtcaacaaggccctggatttcatagccagcaaaggcgtcaaactggtgtccatcggagccgaagaaatcgtggatgggaatgtgaagatgaccctgggcatgatctggaccatcatcctgcgctttgccatccaggacatctccgtggaagagacttcagccaaggaagggctgctcctgtggtgtcagagaaagacagccccttacaaaaatgtcaacatccagaacttccacataagctggaaggatggcctcggcttctgtgctttgatccaccgacaccggcccgagctgattgactacgggaagctgcggaaggatgatccactcacaaatctgaatacggcttttgacgtggcagagaagtacctggacatccccaagatgctggatgccgaagacatcgttggaactgcccgaccggatgagaaagccatcatgacttacgtgtctagcttctaccacgccttctctggagcccagaaggcggagacagcagccaatcgcatctgcaaggtgttggccgtcaaccaggagaacgagcagcttatggaagactacgagaagctggccagtgatctgttggagtggatccgccgcacaatcccgtggctggagaaccgggtgcccgagaacaccatgcatgccatgcaacagaagctggaggacttccgggactaccggcgcctgcacaagccgcccaaggtgcaggagaagtgccagctggagatcaacttcaacacgctgcagaccaagctgcggctcagcaaccggcctgccttcatgccctctgagggcaggatggtctcggacatcaacaatgcctggggctgcctggagcaggtggagaagggctatgaggagtggttgctgaatgagatccggaggctggagcgactggaccacctggcagagaagttccggcagaaggcctccatccacgaggcctggactgacggcaaagaggccatgctgcgacagaaggactatgagaccgccaccctctcggagatcaaggccctgctcaagaagcatgaggccttcgagagtgacctggctgcccaccaggaccgtgtggagcagattgccgccatcgcacaggagctcaatgagctggactattatgactcacccagtgtcaacgcccgttgccaaaagatctgtgaccagtgggacaatctgggggccctaactcagaagcgaagggaagctctggagcggaccgagaaactgctggagaccattgaccagctgtacttggagtatgccaagcgggctgcacccttcaacaactggatggagggggccatggaggacctgcaggacaccttcattgtgcacaccattgaggagatccagggactgaccacagcccatgagcagttcaaggccaccctccctgatgccgacaaggagcgcctggccatcctgggcatccacaatgaggtgtccaagattgtccagacctaccacgtcaatatggcgggcaccaacccctacacaaccatcacgcctcaggagatcaatggcaaatgggaccacgtgcggcagctggtgcctcggagggaccaagctctgacggaggagcatgcccgacagcagcacaatgagaggctacgcaagcagtttggagcccaggccaatgtcatcgggccctggatccagaccaagatggaggagatcgggaggatctccattgagatgcatgggaccctggaggaccagctcagccacctgcggcagtatgagaagagcatcgtcaactacaagccaaagattgatcagctggagggcgaccaccagctcatccaggaggcgctcatcttcgacaacaagcacaccaactacaccatggagcacatccgtgtgggctgggagcagctgctcaccaccatcgccaggaccatcaatgaggtagagaaccagatcctgacccgggatgccaagggcatcagccaggagcagatgaatgagttccgggcctccttcaaccactttgaccgggatcactccggcacactgggtcccgaggagttcaaagcctgcctcatcagcttgggttatgatattggcaacgacccccagggagaagcagaatttgcccgcatcatgagcattgtggaccccaaccgcctgggggtagtgacattccaggccttcattgacttcatgtcccgcgagacagccgacacagatacagcagaccaagtcatggcttccttcaagatcctggctggggacaagaactacattaccatggacgagctgcgccgcgagctgccacccgaccaggctgagtactgcatcgcgcggatggccccctacaccggccccgactccgtgccaggtgctctggactacatgtccttctccacggcgctgtacggcgagagtgacctctaatccaccccgcccggccgccctcgtcttgtgcgccgtgccctgccttgcacctccgccgccggggaagtataaagcgttgag

SEQ ID NO: 432577 - DNA, 5871 bp, Homo sapiens
  misc_feature (3320)..(3320): n is a, c, g, or t
  misc_feature (3780)..(3780): n is a, c, g, or t
  misc_feature (4325)..(4325): n is a, c, g, or t
  misc_feature (4862)..(4862): n is a, c, g, or t
  misc_feature (5115)..(5115): n is a, c, g, or t
ctggtacgggagtggacactgggtgagtcataatagtccagctcattgagctcctgtgcgatggcggcaaagaggccatgctgcgacagaaggactatgagaccgccaccctctcggagatcaaggccctgctcaagaagcatgaggccttcgagagtgacctggctgcccaccaggaccgtgtggagcagattgccgccatcgcacaggagctcaatgagctggactattatgactcacccagtgtcaacgcccgttgccaaaagatctgtgaccagtgggacaatctgggggccctaactcagaagcgaagggaagctctggagcggaccgagaaactgctggagaccattgaccagctgtacttggagtatgccaagcgggctgcacccttcaacaactggatggagggggccatggaggacctgcaggacaccttcattgtgcacaccattgaggagatccagggactgaccacagcccatgagcagttcaaggccaccctccctgatgccgacaaggagcgcctggccatcctgggcatccacaatgaggtgtccaagattgtccagacctaccacgtcaatatggcgggcaccaacccctacacaaccatcacgcctcaggagatcaatggcaaatgggaccacgtgcggcagctggtgcctcggagggaccaagctctgacggaggagcatgcccgacagcagcacaatgagaggctacgcaagcagtttggagcccaggccaatgtcatcgggccctggatccagaccaagatggaggagatcgggaggatctccattgagatgcatgggaccctggaggaccagctcagccacctgcggcagtatgagaagagcatcgtcaactacaagccaaagattgatcagctggagggcgaccaccagctcatccaggaggcgctcatcttcgacaacaagcacaccaactacaccatggagcacatccgtgtgggctgggagcagctgctcaccaccatcgccaggaccatcaatgaggtagagaaccagatcctgacccgggatgccaagggcatcagccaggagcagatgaatgagttccgggcctccttcaaccactttgaccgggatcactccggcacactgggtcccgaggagttcaaagcctgcctcatcagcttgggttatgatattggcaacgacccccagggagaagcagaatttgcccgcatcatgagcattgtggaccccaaccgcctgggggtagtgacattccaggccttcattgacttcatgtcccgcgagacagccgacacagatacagcagaccaagtcatggcttccttcaagatcctggctggggacaagaactacattaccatggacgagctgcgccgcgagctgccacccgaccaggctgagtactgcatcgcgcggatggccccctacaccggccccgactccgtgccaggtgctctggactacatgtccttctccacggcgctgtacggcgagagtgacctctaatccaccccgcccggccgccctcgtcttgtgcgccgtgccctgccttgcacctccgccgtcgcccatctcctgcctgggttcggtttcagctcccagcctccacccgggtgagctggggcccacgtggcatcgatcctccctgcccgcgaagtgacagtttacaaaattattttctgcaaaaaagaaaaaaaagttacgttaaaaaccaaaaaactacatattttattatagaaaaagtattttttctccaccagacaaatggaaaaaaagaggaaagattaactatttgcaccgaaatgtcttgttttgttgcgacataggaaaataaccaagcacaaagttatattccatcctttttactgatttttttttcttctatctgttccatctgctgtattcatttctccaatctcatgtccattttggtgtgggagtcggggtagggggtactcttgtcaaaaggcacattggtgcatgtgtgtttgctagctcacttgtccatgaaaatattttatgatattaaagaaaatcttttgaaatggctgttttttaaggaagagaatttatgtggcttctcatttttaaatcccctcagaggtgtgactagtctctttatcagcacacacttaaaaaatttttaatattgtctattaaaaataggacaaacttggagagtatggacaactttgatattgcttggcacagatggtattaaaaaaaccacactcctatgacagctctttgcctgctccttgcttgatgttttctggaagtgtgtgtggggtcaaggatggtgtggggcacctgtatctactcctaatgtttttgaccctgctgtgttcaatcttcttacacttcagtttcttcattttaaaaaggaaaaggtaatttcttcacagtctcctatgagttggacagaaagtcatggatgtgtaaaggacttcttgatgataagccccaccttcatttttccacggcaccaaacagccctgtgacatctgcattcaccccactcgtttttatttttgctgcagtgaacagcttgagttgtctcttaagagtcatctcatcccttgctattcgagatgacccacagatggcagctgttcagcatcacctgggagttcattggaaatacagaatctcaggccccacccctgaatgtcgaatactgtgtgtactgctctagcttctccagagtaaaagatagtctctataggatgccgtctgctctggcaccaggccccctgagcccatgccttttatctgacgtttgttttgcaacccattacatcacttgcccccgggcatcctttaaatttcatccttggctaattctcattgtaaccggttccagcttgctttaaatgattgggtggatggaattctccccattgacaattgacaggtggcaattaattgttcatgcctcagtgggatgaatccattacatctctttcctgcctaatatttttatctacctccgacttttttgtagggactttgttgatatcctcatgaaggcccatctctcctctctctggcttgtccatcccttgacaaaaccttaatgactgttctgggtaccaaatctgtggcaggagtgtgacccagctgccacccacctcctccatcactggaccagctcatagttgtcccttggacatggggttagtgcccaacaagtgtagtcatttggctaagtgagttactaggagggagaacagattcaatttcctgaggtggtgaggagagactgaaggctttgccagttctttggcctatgccaggctctctggtacttctgcnggtggcatgagctgtgtgaagcgcctctaaatttaaggctccaaagctctccaacacaaacaagactttagggtctgcgttatggacgccaagggaagaaatacaacctcaacatcagtgcctgtcaagggaggcagatgtgagctcgtctgcctgccaccggccatttggactaccttgggcaagtgacctccttaaatggggccgataatgttgctttccttctctccctggcacacagtaggcatttaataagtggcaatgggtattgtccctagagttgtataaaaaaccagctctagcagggcgtggtggtgcatgtccgtagtgccagctgcttgggaggctgaggtgaggatcacttgagcccaggagttttgagtccagcctgaacaacataacaagaccctgtctgtaaaatgggggaaaaagtcagctgtgctttgttatgctgtttaanatattcttaaagaaaaaggcctgattacagaaaaataccattaaggggaaccctctttcagtctctgtgctgagggtagtagtaggctgagtaatggtcccccaagatatccatttccgagtccctggaacccatgattgttaattcatatgacaaataagactttgcagatgggattaagaatcttgaggtggggagattggttctggattatctgggtgggtccttagggagcaggcatgtcggcatcagaggaaatgtgacgacagaagcaggggttggagtgatgtgaggccacaagccaatgaatgcggacagcctctagaagctagaaaagccagggaaacagattctccctgagagcctccagatagaatgcaggtctacagacccattttgggtctctattctccagaacttgagataatacgtttgtgttgttttaagccacttcatttgtgataatttgttacagcaaccataggaagctaatatgtgctccatcgttcatgccctggggagctggctgcctccctgacgtcagngacccgtggtataggcatgacctgctggagaaactgccctagcttcaaaggcctgagtgtgcaacattggcccttgggaggctgccttagctgctggacttgatctcctaagccttaaaagcgccattcatggagaggggagaaggaagcttccaagttctgagagcccaaaaaggccagaatagctgggcccagcaggagatgtaaggcttcctgttgtctcagatgcaggagccagagggcagcccagctccaggtaggcaccagccacagaactggaaagcccttgggaggctgaggtcctgccttctctatagcttatcttggcccctctctgtgtgtcagcctccctcctctccctgcagcccagctttgggtgcacacctccccatggtggcagaggtcaattccacagtgcctagtgttgacattttcttgacacgagactagtcccaattccaaatgtccaggaggcacttggcccagtctgacctggtgtgataaagtgatgcctgtcagtggataaggctggggccnttgctcatgggctagattgggtatcacctttaggataacccaaaaggtggcctcataagaactgtctcagttcatcaattttcacattttagcatctctgatattgagatagagcatacaattgatctcactttaggattaatggtgtcttacaattgctgttggccagatagcagtcatgacttagtgtcattgcctgcctatttgagacaggaatgtgagtcctgtcttttgtctcaaaaacttccattantcttacctcctggtaagatcaagctccagtatcaaaagttgcatagtgggtacccagagagaaaatgctgatgatcatagtgtagtactggcttacgaaatgctagccagggtgcaatggctcatgcctataatcccagcactttggcaggctgaggtgggcggatcgctcgagcccagaagttcaagaccagcctgagcaacatgatgaaactccgtctttactaaaaatacaaaattagccggatgtggtgccgcatgcctgtaatcccagctacttgggtggctgaggcaggcgaattacttcaacctgggagatggaggttgcagtgagccgagatcatgctgaaggaaggaagggagtaagggagggagggaggcgagagagagagaaagaaaaagaaatgctgcattttcagttctattgatggcacagcaggcaacggtgtgtgaaaaacaggcacttaaagactctgggccgggcacggtggcccatgcctgtaatcccagcactttgggaggctgaggcgggtgaatcatgaggtcaggagttcgagactagcctgaccaacatggtgaaactatgtctctactaaaaatacaaaaaattagctgggtgtggtggtgggtgcctgtaatctcagctactcgggaggctgaggcaggagaattgcttgaacccgggaggcggaggttgcggtgagccgagatcgcgctactgcactccagcctgggtgacagtgtgaaactttgtctc

SEQ ID NO: 432578 - DNA, 6794 bp, Homo sapiens
  misc_feature (4243)..(4243): n is a, c, g, or t
  misc_feature (4703)..(4703): n is a, c, g, or t
  misc_feature (5248)..(5248): n is a, c, g, or t
  misc_feature (5785)..(5785): n is a, c, g, or t
  misc_feature (6038)..(6038): n is a, c, g, or t
agcgctagtgtgtccgcctagttcaagtgtgcgtggagattaggtccaagcgcccgcccagaggcaggcagtccgcgagcccagccgccgctgtcgccgccagtagcagccttcgccagcagcgccgcggcggaaccgggcgcaggggagcgagcccggccccgccagcccagcccagcccagccctactccctccccacgccagggcagcagccgttgctcagagagaaggtggaggaagaaatccagaccctagcacgcgcgcaccatcatggaccattatgattctcagcaaaccaacgattacatgcagccagaagaggactgggaccgggacctgctcctggacccggcctgggagaagcagcagagaaagacattcacggcatggtgtaactcccacctccggaaggcggggacacagatcgagaacatcgaagaggacttccgggatggcctgaagctcatgctgctgctggaggtcatctcaggtgaacgcttggccaagccagagcgaggcaagatgagagtgcacaagatctccaacgtcaacaaggccctggatttcatagccagcaaaggcgtcaaactggtgtccatcggagccgaagaaatcgtggatgggaatgtgaagatgaccctgggcatgatctggaccatcatcctgcgctttgccatccaggacatctccgtggaagagacttcagccaaggaagggctgctcctgtggtgtcagagaaagacagccccttacaaaaatgtcaacatccagaacttccacataagctggaaggatggcctcggcttctgtgctttgatccaccgacaccggcccgagctgattgactacgggaagctgcggaaggatgatccactcacaaatctgaatacggcttttgacgtggcagagaagtacctggacatccccaagatgctggatgccgaagacatcgttggaactgcccgaccggatgagaaagccatcatgacttacgtgtctagcttctaccacgccttctctggagcccagaaggcggagacagcagccaatcgcatctgcaaggtgttggccgtcaaccaggagaacgagcagcttatggaagactacgagaagctggccagtgatctgttggagtggatccgccgcacaatcccgtggctggagaaccgggtgcccgagaacaccatgcatgccatgcaacagaagctggaggacttccgggactaccggcgcctgcacaagccgcccaaggtgcaggagaagtgccagctggagatcaacttcaacacgctgcagaccaagctgcggctcagcaaccggcctgccttcatgccctctgagggcaggatggtctcggacatcaacaatgcctggggctgcctggagcaggtggagaagggctatgaggagtggttgctgaatgagatccggaggctggagcgactggaccacctggcagagaagttccggcagaaggcctccatccacgaggcctggactgacggcaaagaggccatgctgcgacagaaggactatgagaccgccaccctctcggagatcaaggccctgctcaagaagcatgaggccttcgagagtgacctggctgcccaccaggaccgtgtggagcagattgccgccatcgcacaggagctcaatgagctggactattatgactcacccagtgtcaacgcccgttgccaaaagatctgtgaccagtgggacaatctgggggccctaactcagaagcgaagggaagctctggagcggaccgagaaactgctggagaccattgaccagctgtacttggagtatgccaagcgggctgcacccttcaacaactggatggagggggccatggaggacctgcaggacaccttcattgtgcacaccattgaggagatccagggactgaccacagcccatgagcagttcaaggccaccctccctgatgccgacaaggagcgcctggccatcctgggcatccacaatgaggtgtccaagattgtccagacctaccacgtcaatatggcgggcaccaacccctacacaaccatcacgcctcaggagatcaatggcaaatgggaccacgtgcggcagctggtgcctcggagggaccaagctctgacggaggagcatgcccgacagcagcacaatgagaggctacgcaagcagtttggagcccaggccaatgtcatcgggccctggatccagaccaagatggaggagatcgggaggatctccattgagatgcatgggaccctggaggaccagctcagccacctgcggcagtatgagaagagcatcgtcaactacaagccaaagattgatcagctggagggcgaccaccagctcatccaggaggcgctcatcttcgacggtgctctggactacatgtccttctccacggcgctgtacggcgagagtgacctctaatccaccccgcccggccgccctcgtcttgtgcgccgtgccctgccttgcacctccgccgtcgcccatctcctgcctgggttcggtttcagctcccagcctccacccgggtgagctggggcccacgtggcatcgatcctccctgcccgcgaagtgacagtttacaaaattattttctgcaaaaaagaaaaaaaagttacgttaaaaaccaaaaaactacatattttattatagaaaaagtattttttctccaccagacaaatggaaaaaaagaggaaagattaactatttgcaccgaaatgtcttgttttgttgcgacataggaaaataaccaagcacaaagttatattccatcctttttactgatttttttttcttctatctgttccatctgctgtattcatttctccaatctcatgtccattttggtgtgggagtcggggtagggggtactcttgtcaaaaggcacattggtgcatgtgtgtttgctagctcacttgtccatgaaaatattttatgatattaaagaaaatcttttgaaatggctgttttttaaggaagagaatttatgtggcttctcatttttaaatcccctcagaggtgtgactagtctctttatcagcacacacttaaaaaatttttaatattgtctattaaaaataggacaaacttggagagtatggacaactttgatattgcttggcacagatggtattaaaaaaaccacactcctatgacagctctttgcctgctccttgcttgatgttttctggaagtgtgtgtggggtcaaggatggtgtggggcacctgtatctactcctaatgtttttgaccctgctgtgttcaatcttcttacacttcagtttcttcattttaaaaaggaaaaggtaatttcttcacagtctcctatgagttggacagaaagtcatggatgtgtaaaggacttcttgatgataagccccaccttcatttttccacggcaccaaacagccctgtgacatctgcattcaccccactcgtttttatttttgctgcagtgaacagcttgagttgtctcttaagagtcatctcatcccttgctattcgagatgacccacagatggcagctgttcagcatcacctgggagttcattggaaatacagaatctcaggccccacccctgaatgtcgaatactgtgtgtactgctctagcttctccagagtaaaagatagtctctataggatgccgtctgctctggcaccaggccccctgagcccatgccttttatctgacgtttgttttgcaacccattacatcacttgcccccgggcatcctttaaatttcatccttggctaattctcattgtaaccggttccagcttgctttaaatgattgggtggatggaattctccccattgacaattgacaggtggcaattaattgttcatgcctcagtgggatgaatccattacatctctttcctgcctaatatttttatctacctccgacttttttgtagggactttgttgatatcctcatgaaggcccatctctcctctctctggcttgtccatcccttgacaaaaccttaatgactgttctgggtaccaaatctgtggcaggagtgtgacccagctgccacccacctcctccatcactggaccagctcatagttgtcccttggacatggggttagtgcccaacaagtgtagtcatttggctaagtgagttactaggagggagaacagattcaatttcctgaggtggtgaggagagactgaaggctttgccagttctttggcctatgccaggctctctggtacttctgcnggtggcatgagctgtgtgaagcgcctctaaatttaaggctccaaagctctccaacacaaacaagactttagggtctgcgttatggacgccaagggaagaaatacaacctcaacatcagtgcctgtcaagggaggcagatgtgagctcgtctgcctgccaccggccatttggactaccttgggcaagtgacctccttaaatggggccgataatgttgctttccttctctccctggcacacagtaggcatttaataagtggcaatgggtattgtccctagagttgtataaaaaaccagctctagcagggcgtggtggtgcatgtccgtagtgccagctgcttgggaggctgaggtgaggatcacttgagcccaggagttttgagtccagcctgaacaacataacaagaccctgtctgtaaaatgggggaaaaagtcagctgtgctttgttatgctgtttaanatattcttaaagaaaaaggcctgattacagaaaaataccattaaggggaaccctctttcagtctctgtgctgagggtagtagtaggctgagtaatggtcccccaagatatccatttccgagtccctggaacccatgattgttaattcatatgacaaataagactttgcagatgggattaagaatcttgaggtggggagattggttctggattatctgggtgggtccttagggagcaggcatgtcggcatcagaggaaatgtgacgacagaagcaggggttggagtgatgtgaggccacaagccaatgaatgcggacagcctctagaagctagaaaagccagggaaacagattctccctgagagcctccagatagaatgcaggtctacagacccattttgggtctctattctccagaacttgagataatacgtttgtgttgttttaagccacttcatttgtgataatttgttacagcaaccataggaagctaatatgtgctccatcgttcatgccctggggagctggctgcctccctgacgtcagngacccgtggtataggcatgacctgctggagaaactgccctagcttcaaaggcctgagtgtgcaacattggcccttgggaggctgccttagctgctggacttgatctcctaagccttaaaagcgccattcatggagaggggagaaggaagcttccaagttctgagagcccaaaaaggccagaatagctgggcccagcaggagatgtaaggcttcctgttgtctcagatgcaggagccagagggcagcccagctccaggtaggcaccagccacagaactggaaagcccttgggaggctgaggtcctgccttctctatagcttatcttggcccctctctgtgtgtcagcctccctcctctccctgcagcccagctttgggtgcacacctccccatggtggcagaggtcaattccacagtgcctagtgttgacattttcttgacacgagactagtcccaattccaaatgtccaggaggcacttggcccagtctgacctggtgtgataaagtgatgcctgtcagtggataaggctggggccnttgctcatgggctagattgggtatcacctttaggataacccaaaaggtggcctcataagaactgtctcagttcatcaattttcacattttagcatctctgatattgagatagagcatacaattgatctcactttaggattaatggtgtcttacaattgctgttggccagatagcagtcatgacttagtgtcattgcctgcctatttgagacaggaatgtgagtcctgtcttttgtctcaaaaacttccattantcttacctcctggtaagatcaagctccagtatcaaaagttgcatagtgggtacccagagagaaaatgctgatgatcatagtgtagtactggcttacgaaatgctagccagggtgcaatggctcatgcctataatcccagcactttggcaggctgaggtgggcggatcgctcgagcccagaagttcaagaccagcctgagcaacatgatgaaactccgtctttactaaaaatacaaaattagccggatgtggtgccgcatgcctgtaatcccagctacttgggtggctgaggcaggcgaattacttcaacctgggagatggaggttgcagtgagccgagatcatgctgaaggaaggaagggagtaagggagggagggaggcgagagagagagaaagaaaaagaaatgctgcattttcagttctattgatggcacagcaggcaacggtgtgtgaaaaacaggcacttaaagactctgggccgggcacggtggcccatgcctgtaatcccagcactttgggaggctgaggcgggtgaatcatgaggtcaggagttcgagactagcctgaccaacatggtgaaactatgtctctactaaaaatacaaaaaattagctgggtgtggtggtgggtgcctgtaatctcagctactcgggaggctgaggcaggagaattgcttgaacccgggaggcggaggttgcggtgagccgagatcgcgctactgcactccagcctgggtgacagtgtgaaactttgtctc

SEQ ID NO: 432579 - DNA, 6005 bp, Homo sapiens
  misc_feature (3454)..(3454): n is a, c, g, or t
  misc_feature (3914)..(3914): n is a, c, g, or t
  misc_feature (4459)..(4459): n is a, c, g, or t
  misc_feature (4996)..(4996): n is a, c, g, or t
  misc_feature (5249)..(5249): n is a, c, g, or t
agcgctagtgtgtccgcctagttcaagtgtgcgtggagattaggtccaagcgcccgcccagaggcaggcagtccgcgagcccagccgccgctgtcgccgccagtagcagccttcgccagcagcgccgcggcggaaccgggcgcaggggagcgagcccggccccgccagcccagcccagcccagccctactccctccccacgccagggcagcagccgttgctcagagagaaggtggaggaagaaatccagaccctagcacgcgcgcaccatcatggaccattatgattctcagcaaaccaacgattacatgcagccagaagaggactgggaccgggacctgctcctggacccggcctgggagaagcagcagagaaagacattcacggcatggtgtaactcccacctccggaaggcggggacacagatcgagaacatcgaagaggacttccgggatggcctgaagctcatgctgctgctggaggtcatctcaggtgaacgcttggccaagccagagcgaggcaagatgagagtgcacaagatctccaacgtcaacaaggccctggatttcatagccagcaaaggcgtcaaactggtgtccatcggagccgaagaaatcgtggatgggaatgtgaagatgaccctgggcatgatctggaccatcatcctgcgctttgccatccacaatgaggtgtccaagattgtccagacctaccacgtcaatatggcgggcaccaacccctacacaaccatcacgcctcaggagatcaatggcaaatgggaccacgtgcggcagctggtgcctcggagggaccaagctctgacggaggagcatgcccgacagcagcacaatgagaggctacgcaagcagtttggagcccaggccaatgtcatcgggccctggatccagaccaagatggaggagatcgggaggatctccattgagatgcatgggaccctggaggaccagctcagccacctgcggcagtatgagaagagcatcgtcaactacaagccaaagattgatcagctggagggcgaccaccagctcatccaggaggcgctcatcttcgacaacaagcacaccaactacaccatggagcacatccgtgtgggctgggagcagctgctcaccaccatcgccaggaccatcaatgaggtagagaaccagatcctgacccgggatgccaagggcatcagccaggagcagatgaatgagttccgggcctccttcaaccactttgaccgggatcactccggcacactgggtcccgaggagttcaaagcctgcctcatcagcttgggttatgatattggcaacgacccccagggagaagcagaatttgcccgcatcatgagcattgtggaccccaaccgcctgggggtagtgacattccaggccttcattgacttcatgtcccgcgagacagccgacacagatacagcagaccaagtcatggcttccttcaagatcctggctggggacaagaactacattaccatggacgagctgcgccgcgagctgccacccgaccaggctgagtactgcatcgcgcggatggccccctacaccggccccgactccgtgccaggtgctctggactacatgtccttctccacggcgctgtacggcgagagtgacctctaatccaccccgcccggccgccctcgtcttgtgcgccgtgccctgccttgcacctccgccgtcgcccatctcctgcctgggttcggtttcagctcccagcctccacccgggtgagctggggcccacgtggcatcgatcctccctgcccgcgaagtgacagtttacaaaattattttctgcaaaaaagaaaaaaaagttacgttaaaaaccaaaaaactacatattttattatagaaaaagtattttttctccaccagacaaatggaaaaaaagaggaaagattaactatttgcaccgaaatgtcttgttttgttgcgacataggaaaataaccaagcacaaagttatattccatcctttttactgatttttttttcttctatctgttccatctgctgtattcatttctccaatctcatgtccattttggtgtgggagtcggggtagggggtactcttgtcaaaaggcacattggtgcatgtgtgtttgctagctcacttgtccatgaaaatattttatgatattaaagaaaatcttttgaaatggctgttttttaaggaagagaatttatgtggcttctcatttttaaatcccctcagaggtgtgactagtctctttatcagcacacacttaaaaaatttttaatattgtctattaaaaataggacaaacttggagagtatggacaactttgatattgcttggcacagatggtattaaaaaaaccacactcctatgacagctctttgcctgctccttgcttgatgttttctggaagtgtgtgtggggtcaaggatggtgtggggcacctgtatctactcctaatgtttttgaccctgctgtgttcaatcttcttacacttcagtttcttcattttaaaaaggaaaaggtaatttcttcacagtctcctatgagttggacagaaagtcatggatgtgtaaaggacttcttgatgataagccccaccttcatttttccacggcaccaaacagccctgtgacatctgcattcaccccactcgtttttatttttgctgcagtgaacagcttgagttgtctcttaagagtcatctcatcccttgctattcgagatgacccacagatggcagctgttcagcatcacctgggagttcattggaaatacagaatctcaggccccacccctgaatgtcgaatactgtgtgtactgctctagcttctccagagtaaaagatagtctctataggatgccgtctgctctggcaccaggccccctgagcccatgccttttatctgacgtttgttttgcaacccattacatcacttgcccccgggcatcctttaaatttcatccttggctaattctcattgtaaccggttccagcttgctttaaatgattgggtggatggaattctccccattgacaattgacaggtggcaattaattgttcatgcctcagtgggatgaatccattacatctctttcctgcctaatatttttatctacctccgacttttttgtagggactttgttgatatcctcatgaaggcccatctctcctctctctggcttgtccatcccttgacaaaaccttaatgactgttctgggtaccaaatctgtggcaggagtgtgacccagctgccacccacctcctccatcactggaccagctcatagttgtcccttggacatggggttagtgcccaacaagtgtagtcatttggctaagtgagttactaggagggagaacagattcaatttcctgaggtggtgaggagagactgaaggctttgccagttctttggcctatgccaggctctctggtacttctgcnggtggcatgagctgtgtgaagcgcctctaaatttaaggctccaaagctctccaacacaaacaagactttagggtctgcgttatggacgccaagggaagaaatacaacctcaacatcagtgcctgtcaagggaggcagatgtgagctcgtctgcctgccaccggccatttggactaccttgggcaagtgacctccttaaatggggccgataatgttgctttccttctctccctggcacacagtaggcatttaataagtggcaatgggtattgtccctagagttgtataaaaaaccagctctagcagggcgtggtggtgcatgtccgtagtgccagctgcttgggaggctgaggtgaggatcacttgagcccaggagttttgagtccagcctgaacaacataacaagaccctgtctgtaaaatgggggaaaaagtcagctgtgctttgttatgctgtttaanatattcttaaagaaaaaggcctgattacagaaaaataccattaaggggaaccctctttcagtctctgtgctgagggtagtagtaggctgagtaatggtcccccaagatatccatttccgagtccctggaacccatgattgttaattcatatgacaaataagactttgcagatgggattaagaatcttgaggtggggagattggttctggattatctgggtgggtccttagggagcaggcatgtcggcatcagaggaaatgtgacgacagaagcaggggttggagtgatgtgaggccacaagccaatgaatgcggacagcctctagaagctagaaaagccagggaaacagattctccctgagagcctccagatagaatgcaggtctacagacccattttgggtctctattctccagaacttgagataatacgtttgtgttgttttaagccacttcatttgtgataatttgttacagcaaccataggaagctaatatgtgctccatcgttcatgccctggggagctggctgcctccctgacgtcagngacccgtggtataggcatgacctgctggagaaactgccctagcttcaaaggcctgagtgtgcaacattggcccttgggaggctgccttagctgctggacttgatctcctaagccttaaaagcgccattcatggagaggggagaaggaagcttccaagttctgagagcccaaaaaggccagaatagctgggcccagcaggagatgtaaggcttcctgttgtctcagatgcaggagccagagggcagcccagctccaggtaggcaccagccacagaactggaaagcccttgggaggctgaggtcctgccttctctatagcttatcttggcccctctctgtgtgtcagcctccctcctctccctgcagcccagctttgggtgcacacctccccatggtggcagaggtcaattccacagtgcctagtgttgacattttcttgacacgagactagtcccaattccaaatgtccaggaggcacttggcccagtctgacctggtgtgataaagtgatgcctgtcagtggataaggctggggccnttgctcatgggctagattgggtatcacctttaggataacccaaaaggtggcctcataagaactgtctcagttcatcaattttcacattttagcatctctgatattgagatagagcatacaattgatctcactttaggattaatggtgtcttacaattgctgttggccagatagcagtcatgacttagtgtcattgcctgcctatttgagacaggaatgtgagtcctgtcttttgtctcaaaaacttccattantcttacctcctggtaagatcaagctccagtatcaaaagttgcatagtgggtacccagagagaaaatgctgatgatcatagtgtagtactggcttacgaaatgctagccagggtgcaatggctcatgcctataatcccagcactttggcaggctgaggtgggcggatcgctcgagcccagaagttcaagaccagcctgagcaacatgatgaaactccgtctttactaaaaatacaaaattagccggatgtggtgccgcatgcctgtaatcccagctacttgggtggctgaggcaggcgaattacttcaacctgggagatggaggttgcagtgagccgagatcatgctgaaggaaggaagggagtaagggagggagggaggcgagagagagagaaagaaaaagaaatgctgcattttcagttctattgatggcacagcaggcaacggtgtgtgaaaaacaggcacttaaagactctgggccgggcacggtggcccatgcctgtaatcccagcactttgggaggctgaggcgggtgaatcatgaggtcaggagttcgagactagcctgaccaacatggtgaaactatgtctctactaaaaatacaaaaaattagctgggtgtggtggtgggtgcctgtaatctcagctactcgggaggctgaggcaggagaattgcttgaacccgggaggcggaggttgcggtgagccgagatcgcgctactgcactccagcctgggtgacagtgtgaaactttgtctc

SEQ ID NO: 432580 - DNA, 5468 bp, Homo sapiens
  misc_feature (12)..(12): n is a, c, g, or t
  misc_feature (17)..(17): n is a, c, g, or t
  misc_feature (23)..(23): n is a, c, g, or t
  misc_feature (2917)..(2917): n is a, c, g, or t
  misc_feature (3377)..(3377): n is a, c, g, or t
  misc_feature (3922)..(3922): n is a, c, g, or t
  misc_feature (4459)..(4459): n is a, c, g, or t
  misc_feature (4712)..(4712): n is a, c, g, or t
ctttgatggccnttcgnctactnctactatgctgcgagaagacgacacgaatggggagatccagggactgaccacagcccatgagcagttcaaggccaccctccctgatgccgacaaggagcgcctggccatcctgggcatccacaatgaggtgtccaagattgtccagacctaccacgtcaatatggcgggcaccaacccctacacaaccatcacgcctcaggagatcaatggcaaatgggaccacgtgcggcagctggtgcctcggagggaccaagctctgacggaggagcatgcccgacagcagcacaatgagaggctacgcaagcagtttggagcccaggccaatgtcatcgggccctggatccagaccaagatggaggagatcgggaggatctccattgagatgcatgggaccctggaggaccagctcagccacctgcggcagtatgagaagagcatcgtcaactacaagccaaagattgatcagctggagggcgaccaccagctcatccaggaggcgctcatcttcgacaacaagcacaccaactacaccatggagcacatccgtgtgggctgggagcagctgctcaccaccatcgccaggaccatcaatgaggtagagaaccagatcctgacccgggatgccaagggcatcagccaggagcagatgaatgagttccgggcctccttcaaccactttgaccgggatcactccggcacactgggtcccgaggagttcaaagcctgcctcatcagcttgggttatgatattggcaacgacccccagggagaagcagaatttgcccgcatcatgagcattgtggaccccaaccgcctgggggtagtgacattccaggccttcattgacttcatgtcccgcgagacagccgacacagatacagcagaccaagtcatggcttccttcaagatcctggctggggacaagaactacattaccatggacgagctgcgccgcgagctgccacccgaccaggctgagtactgcatcgcgcggatggccccctacaccggccccgactccgtgccaggtgctctggactacatgtccttctccacggcgctgtacggcgagagtgacctctaatccaccccgcccggccgccctcgtcttgtgcgccgtgccctgccttgcacctccgccgtcgcccatctcctgcctgggttcggtttcagctcccagcctccacccgggtgagctggggcccacgtggcatcgatcctccctgcccgcgaagtgacagtttacaaaattattttctgcaaaaaagaaaaaaaagttacgttaaaaaccaaaaaactacatattttattatagaaaaagtattttttctccaccagacaaatggaaaaaaagaggaaagattaactatttgcaccgaaatgtcttgttttgttgcgacataggaaaataaccaagcacaaagttatattccatcctttttactgatttttttttcttctatctgttccatctgctgtattcatttctccaatctcatgtccattttggtgtgggagtcggggtagggggtactcttgtcaaaaggcacattggtgcatgtgtgtttgctagctcacttgtccatgaaaatattttatgatattaaagaaaatcttttgaaatggctgttttttaaggaagagaatttatgtggcttctcatttttaaatcccctcagaggtgtgactagtctctttatcagcacacacttaaaaaatttttaatattgtctattaaaaataggacaaacttggagagtatggacaactttgatattgcttggcacagatggtattaaaaaaaccacactcctatgacagctctttgcctgctccttgcttgatgttttctggaagtgtgtgtggggtcaaggatggtgtggggcacctgtatctactcctaatgtttttgaccctgctgtgttcaatcttcttacacttcagtttcttcattttaaaaaggaaaaggtaatttcttcacagtctcctatgagttggacagaaagtcatggatgtgtaaaggacttcttgatgataagccccaccttcatttttccacggcaccaaacagccctgtgacatctgcattcaccccactcgtttttatttttgctgcagtgaacagcttgagttgtctcttaagagtcatctcatcccttgctattcgagatgacccacagatggcagctgttcagcatcacctgggagttcattggaaatacagaatctcaggccccacccctgaatgtcgaatactgtgtgtactgctctagcttctccagagtaaaagatagtctctataggatgccgtctgctctggcaccaggccccctgagcccatgccttttatctgacgtttgttttgcaacccattacatcacttgcccccgggcatcctttaaatttcatccttggctaattctcattgtaaccggttccagcttgctttaaatgattgggtggatggaattctccccattgacaattgacaggtggcaattaattgttcatgcctcagtgggatgaatccattacatctctttcctgcctaatatttttatctacctccgacttttttgtagggactttgttgatatcctcatgaaggcccatctctcctctctctggcttgtccatcccttgacaaaaccttaatgactgttctgggtaccaaatctgtggcaggagtgtgacccagctgccacccacctcctccatcactggaccagctcatagttgtcccttggacatggggttagtgcccaacaagtgtagtcatttggctaagtgagttactaggagggagaacagattcaatttcctgaggtggtgaggagagactgaaggctttgccagttctttggcctatgccaggctctctggtacttctgcnggtggcatgagctgtgtgaagcgcctctaaatttaaggctccaaagctctccaacacaaacaagactttagggtctgcgttatggacgccaagggaagaaatacaacctcaacatcagtgcctgtcaagggaggcagatgtgagctcgtctgcctgccaccggccatttggactaccttgggcaagtgacctccttaaatggggccgataatgttgctttccttctctccctggcacacagtaggcatttaataagtggcaatgggtattgtccctagagttgtataaaaaaccagctctagcagggcgtggtggtgcatgtccgtagtgccagctgcttgggaggctgaggtgaggatcacttgagcccaggagttttgagtccagcctgaacaacataacaagaccctgtctgtaaaatgggggaaaaagtcagctgtgctttgttatgctgtttaanatattcttaaagaaaaaggcctgattacagaaaaataccattaaggggaaccctctttcagtctctgtgctgagggtagtagtaggctgagtaatggtcccccaagatatccatttccgagtccctggaacccatgattgttaattcatatgacaaataagactttgcagatgggattaagaatcttgaggtggggagattggttctggattatctgggtgggtccttagggagcaggcatgtcggcatcagaggaaatgtgacgacagaagcaggggttggagtgatgtgaggccacaagccaatgaatgcggacagcctctagaagctagaaaagccagggaaacagattctccctgagagcctccagatagaatgcaggtctacagacccattttgggtctctattctccagaacttgagataatacgtttgtgttgttttaagccacttcatttgtgataatttgttacagcaaccataggaagctaatatgtgctccatcgttcatgccctggggagctggctgcctccctgacgtcagngacccgtggtataggcatgacctgctggagaaactgccctagcttcaaaggcctgagtgtgcaacattggcccttgggaggctgccttagctgctggacttgatctcctaagccttaaaagcgccattcatggagaggggagaaggaagcttccaagttctgagagcccaaaaaggccagaatagctgggcccagcaggagatgtaaggcttcctgttgtctcagatgcaggagccagagggcagcccagctccaggtaggcaccagccacagaactggaaagcccttgggaggctgaggtcctgccttctctatagcttatcttggcccctctctgtgtgtcagcctccctcctctccctgcagcccagctttgggtgcacacctccccatggtggcagaggtcaattccacagtgcctagtgttgacattttcttgacacgagactagtcccaattccaaatgtccaggaggcacttggcccagtctgacctggtgtgataaagtgatgcctgtcagtggataaggctggggccnttgctcatgggctagattgggtatcacctttaggataacccaaaaggtggcctcataagaactgtctcagttcatcaattttcacattttagcatctctgatattgagatagagcatacaattgatctcactttaggattaatggtgtcttacaattgctgttggccagatagcagtcatgacttagtgtcattgcctgcctatttgagacaggaatgtgagtcctgtcttttgtctcaaaaacttccattantcttacctcctggtaagatcaagctccagtatcaaaagttgcatagtgggtacccagagagaaaatgctgatgatcatagtgtagtactggcttacgaaatgctagccagggtgcaatggctcatgcctataatcccagcactttggcaggctgaggtgggcggatcgctcgagcccagaagttcaagaccagcctgagcaacatgatgaaactccgtctttactaaaaatacaaaattagccggatgtggtgccgcatgcctgtaatcccagctacttgggtggctgaggcaggcgaattacttcaacctgggagatggaggttgcagtgagccgagatcatgctgaaggaaggaagggagtaagggagggagggaggcgagagagagagaaagaaaaagaaatgctgcattttcagttctattgatggcacagcaggcaacggtgtgtgaaaaacaggcacttaaagactctgggccgggcacggtggcccatgcctgtaatcccagcactttgggaggctgaggcgggtgaatcatgaggtcaggagttcgagactagcctgaccaacatggtgaaactatgtctctactaaaaatacaaaaaattagctgggtgtggtggtgggtgcctgtaatctcagctactcgggaggctgaggcaggagaattgcttgaacccgggaggcggaggttgcggtgagccgagatcgcgctactgcactccagcctgggtgacagtgtgaaactttgtctc

SEQ ID NO: 432581 - DNA, 3150 bp, Homo sapiens
agcgctagtgtgtccgcctagttcaagtgtgcgtggagattaggtccaagcgcccgcccagaggcaggcagtccgcgagcccagccgccgctgtcgccgccagtagcagccttcgccagcagcgccgcggcggaaccgggcgcaggggagcgagcccggccccgccagcccagcccagcccagccctactccctccccacgccagggcagcagccgttgctcagagagaaggtggaggaagaaatccagaccctagcacgcgcgcaccatcatggaccattatgattctcagcaaaccaacgattacatgcagccagaagaggactgggaccgggacctgctcctggacccggcctgggagaagcagcagagaaagacattcacggcatggtgtaactcccacctccggaaggcggggacacagatcgagaacatcgaagaggacttccgggatggcctgaagctcatgctgctgctggaggtcatctcaggtgaacgcttggccaagccagagcgaggcaagatgagagtgcacaagatctccaacgtcaacaaggccctggatttcatagccagcaaaggcgtcaaactggtgtccatcggagccgaagaaatcgtggatgggaatgtgaagatgaccctgggcatgatctggaccatcatcctgcgctttgccatccaggacatctccgtggaagagacttcagccaaggaagggctgctcctgtggtgtcagagaaagacagccccttacaaaaatgtcaacatccagaacttccacataagctggaaggatggcctcggcttctgtgctttgatccaccgacaccggcccgagctgattgactacgggaagctgcggaaggatgatccactcacaaatctgaatacggcttttgacgtggcagagaagtacctggacatccccaagatgctggatgccgaagacatcgttggaactgcccgaccggatgagaaagccatcatgacttacgtgtctagcttctaccacgccttctctggagcccagaaggcggagacagcagccaatcgcatctgcaaggtgttggccgtcaaccaggagaacgagcagcttatggaagactacgagaagctggccagtgatctgttggagtggatccgccgcacaatcccgtggctggagaaccgggtgcccgagaacaccatgcatgccatgcaacagaagctggaggacttccgggactaccggcgcctgcacaagccgcccaaggtgcaggagaagtgccagctggagatcaacttcaacacgctgcagaccaagctgcggctcagcaaccggcctgccttcatgccctctgagggcaggatggtctcggacatcaacaatgcctggggctgcctggagcaggtggagaagggctatgaggagtggttgctgaatgagatccggaggctggagcgactggaccacctggcagagaagttccggcagaaggcctccatccacgaggcctggactgacggcaaagaggccatgctgcgacagaaggactatgagaccgccaccctctcggagatcaaggccctgctcaagaagcatgaggccttcgagagtgacctggctgcccaccaggaccgtgtggagcagattgccgccatcgcacaggagctcaatgagctggactattatgactcacccagtgtcaacgcccgttgccaaaagatctgtgaccagtgggacaatctgggggccctaactcagaagcgaagggaagctctggagcggaccgagaaactgctggagaccattgaccagctgtacttggagtatgccaagcgggctgcacccttcaacaactggatggagggggccatggaggacctgcaggacaccttcattgtgcacaccattgaggagatccagggactgaccacagcccatgagcagttcaaggccaccctccctgatgccgacaaggagcgcctggccatcctgggcatccacaatgaggtgtccaagattgtccagacctaccacgtcaatatggcgggcaccaacccctacacaaccatcacgcctcaggagatcaatggcaaatgggaccacgtgcggcagctggtgcctcggagggaccaagctctgacggaggagcatgcccgacagcagcacaatgagaggctacgcaagcagtttggagcccaggccaatgtcatcgggccctggatccagaccaagatggaggagatcgggaggatctccattgagatgcatgggaccctggaggaccagctcagccacctgcggcagtatgagaagagcatcgtcaactacaagccaaagattgatcagctggagggcgaccaccagctcatccaggaggcgctcatcttcgacaacaagcacaccaactacaccatggagcacatccgtgtgggctgggagcagctgctcaccaccatcgccaggaccatcaatgaggtagagaaccagatcctgacccgggatgccaagggcatcagccaggagcagatgaatgagttccgggcctcggtgctctggactacatgtccttctccacggcgctgtacggcgagagtgacctctaatccaccccgcccggccgccctcgtcttgtgcgccgtgccctgccttgcacctccgccgtcgcccatctcctgcctgggttcggtttcagctcccagcctccacccgggtgagctggggcccacgtggcatcgatcctccctgcccgcgaagtgacagtttacaaaattattttctgcaaaaaagaaaaaaaagttacgttaaaaaccaaaaaactacatattttattatagaaaaagtattttttctccaccagacaaatggaaaaaaagaggaaagattaactatttgcaccgaaatgtcttgttttgttgcgacataggaaaataaccaagcacaaagttatattccatcctttttactgatttttttttcttctatctgttccatctgctgtattcatttctccaatctcatgtccattttggtgtgggagtcggggtagggggtactcttgtcaaaaggcacattggtgcatgtgtgtttgctagctcacttgtccatgaaaatattttatgatattaaagaaaatcttttgaaatgcaaaaacaaaaaaaaaacct

SEQ ID NO: 432582 - DNA, 6460 bp, Homo sapiens
  misc_feature (3909)..(3909): n is a, c, g, or t
  misc_feature (4369)..(4369): n is a, c, g, or t
  misc_feature (4914)..(4914): n is a, c, g, or t
  misc_feature (5451)..(5451): n is a, c, g, or t
  misc_feature (5704)..(5704): n is a, c, g, or t
agcgctagtgtgtccgcctagttcaagtgtgcgtggagattaggtccaagcgcccgcccagaggcaggcagtccgcgagcccagccgccgctgtcgccgccagtagcagccttcgccagcagcgccgcggcggaaccgggcgcaggggagcgagcccggccccgccagcccagcccagcccagccctactccctccccacgccagggcagcagccgttgctcagagagaaggtggaggaagaaatccagaccctagcacgcgcgcaccatcatggaccattatgattctcagcaaaccaacgattacatgcagccagaagaggactgggaccgggacctgctcctggacccggcctgggagaagcagcagagaaagacattcacggcatggtgtaactcccacctccggaaggcggggacacagatcgagaacatcgaagaggacttccgggatggcctgaagctcatgctgctgctggaggtcatctcaggtgaacgcttggccaagccagagcgaggcaagatgagagtgcacaagatctccaacgtcaacaaggccctggatttcatagccagcaaaggcgtcaaactggtgtccatcggagccgaagaaatcgtggatgggaatgtgaagatgaccctgggcatgatctggaccatcatcctgcgctttgccatccaggacatctccgtggaagagacttcagccaaggaagggctgctcctgtggtgtcagagaaagacagccccttacaaaaatgtcaacatccagaacttccacataagctggaaggatggcctcggcttctgtgctttgatccaccgacaccggcccgagctgattgactacgggaagctgcggaaggatgatccactcacaaatctgaatacggcttttgacgtggcagagaagtacctggacatccccaagatgctggatgccgaagacatcgttggaactgcccgaccggatgagaaagccatcatgacttacgtgtctagcttctaccacgccttctctggagcccagaaggcggagacagcagccaatcgcatctgcaaggtgttggccgtcaaccaggagaacgagcagcttatggaagactacgagaagctggccagtgatctgttggagtggatccgccgcacaatcccgtggctggagaaccgggtgcccgagaacaccatgcatgccatgcaacagaagctggaggacttccgggactaccggcgcctgcacaagccgcccaaggtgcaggagaagtgccagctggagatcaacttcaacacgctgcagaccaagctgcggctcagcaaccggcctgccttcatgccctctgagggcaggatggtctcggacatcaacaatgcctggggctgcctggagcaggtggagaagggctatgaggagtggttgctgaatgagatccggaggctggagcgactggaccacctggcagagaagttccggcagaaggcctccatccacgaggcctggactgacggcaaagaggccatgctgcgacagaaggactatgagaccgccaccctctcggagatcaaggccctgctcaagaagcatgaggccttcgagagtgacctggctgcccaccaggaccgtgtggagcagattgccgccatcgcacaggagctcaatgagctggactattatgactcacccagtgtcaacgcccgttgccaaaagatctgtgaccagtgggacaatctgggggccctaactcagaagcgaagggaagctctggagcggaccgagaaactgctggagaccattgaccagctgtacttggagtatgccaagcgggctgcacccttcaacaactggatggagggggccatggaggacctgcaggacaccttcattgtgcacaccattgaggagatccagggactgaccacagcccatgagcagttcaaggccaccctccctgatgccgacaaggagcgcctggccatcctgggcatccacaatgaggtgtccaagattgtccagacctaccacgtcaatatggcgggcaccaacccggtgctctggactacatgtccttctccacggcgctgtacggcgagagtgacctctaatccaccccgcccggccgccctcgtcttgtgcgccgtgccctgccttgcacctccgccgtcgcccatctcctgcctgggttcggtttcagctcccagcctccacccgggtgagctggggcccacgtggcatcgatcctccctgcccgcgaagtgacagtttacaaaattattttctgcaaaaaagaaaaaaaagttacgttaaaaaccaaaaaactacatattttattatagaaaaagtattttttctccaccagacaaatggaaaaaaagaggaaagattaactatttgcaccgaaatgtcttgttttgttgcgacataggaaaataaccaagcacaaagttatattccatcctttttactgatttttttttcttctatctgttccatctgctgtattcatttctccaatctcatgtccattttggtgtgggagtcggggtagggggtactcttgtcaaaaggcacattggtgcatgtgtgtttgctagctcacttgtccatgaaaatattttatgatattaaagaaaatcttttgaaatggctgttttttaaggaagagaatttatgtggcttctcatttttaaatcccctcagaggtgtgactagtctctttatcagcacacacttaaaaaatttttaatattgtctattaaaaataggacaaacttggagagtatggacaactttgatattgcttggcacagatggtattaaaaaaaccacactcctatgacagctctttgcctgctccttgcttgatgttttctggaagtgtgtgtggggtcaaggatggtgtggggcacctgtatctactcctaatgtttttgaccctgctgtgttcaatcttcttacacttcagtttcttcattttaaaaaggaaaaggtaatttcttcacagtctcctatgagttggacagaaagtcatggatgtgtaaaggacttcttgatgataagccccaccttcatttttccacggcaccaaacagccctgtgacatctgcattcaccccactcgtttttatttttgctgcagtgaacagcttgagttgtctcttaagagtcatctcatcccttgctattcgagatgacccacagatggcagctgttcagcatcacctgggagttcattggaaatacagaatctcaggccccacccctgaatgtcgaatactgtgtgtactgctctagcttctccagagtaaaagatagtctctataggatgccgtctgctctggcaccaggccccctgagcccatgccttttatctgacgtttgttttgcaacccattacatcacttgcccccgggcatcctttaaatttcatccttggctaattctcattgtaaccggttccagcttgctttaaatgattgggtggatggaattctccccattgacaattgacaggtggcaattaattgttcatgcctcagtgggatgaatccattacatctctttcctgcctaatatttttatctacctccgacttttttgtagggactttgttgatatcctcatgaaggcccatctctcctctctctggcttgtccatcccttgacaaaaccttaatgactgttctgggtaccaaatctgtggcaggagtgtgacccagctgccacccacctcctccatcactggaccagctcatagttgtcccttggacatggggttagtgcccaacaagtgtagtcatttggctaagtgagttactaggagggagaacagattcaatttcctgaggtggtgaggagagactgaaggctttgccagttctttggcctatgccaggctctctggtacttctgcnggtggcatgagctgtgtgaagcgcctctaaatttaaggctccaaagctctccaacacaaacaagactttagggtctgcgttatggacgccaagggaagaaatacaacctcaacatcagtgcctgtcaagggaggcagatgtgagctcgtctgcctgccaccggccatttggactaccttgggcaagtgacctccttaaatggggccgataatgttgctttccttctctccctggcacacagtaggcatttaataagtggcaatgggtattgtccctagagttgtataaaaaaccagctctagcagggcgtggtggtgcatgtccgtagtgccagctgcttgggaggctgaggtgaggatcacttgagcccaggagttttgagtccagcctgaacaacataacaagaccctgtctgtaaaatgggggaaaaagtcagctgtgctttgttatgctgtttaanatattcttaaagaaaaaggcctgattacagaaaaataccattaaggggaaccctctttcagtctctgtgctgagggtagtagtaggctgagtaatggtcccccaagatatccatttccgagtccctggaacccatgattgttaattcatatgacaaataagactttgcagatgggattaagaatcttgaggtggggagattggttctggattatctgggtgggtccttagggagcaggcatgtcggcatcagaggaaatgtgacgacagaagcaggggttggagtgatgtgaggccacaagccaatgaatgcggacagcctctagaagctagaaaagccagggaaacagattctccctgagagcctccagatagaatgcaggtctacagacccattttgggtctctattctccagaacttgagataatacgtttgtgttgttttaagccacttcatttgtgataatttgttacagcaaccataggaagctaatatgtgctccatcgttcatgccctggggagctggctgcctccctgacgtcagngacccgtggtataggcatgacctgctggagaaactgccctagcttcaaaggcctgagtgtgcaacattggcccttgggaggctgccttagctgctggacttgatctcctaagccttaaaagcgccattcatggagaggggagaaggaagcttccaagttctgagagcccaaaaaggccagaatagctgggcccagcaggagatgtaaggcttcctgttgtctcagatgcaggagccagagggcagcccagctccaggtaggcaccagccacagaactggaaagcccttgggaggctgaggtcctgccttctctatagcttatcttggcccctctctgtgtgtcagcctccctcctctccctgcagcccagctttgggtgcacacctccccatggtggcagaggtcaattccacagtgcctagtgttgacattttcttgacacgagactagtcccaattccaaatgtccaggaggcacttggcccagtctgacctggtgtgataaagtgatgcctgtcagtggataaggctggggccnttgctcatgggctagattgggtatcacctttaggataacccaaaaggtggcctcataagaactgtctcagttcatcaattttcacattttagcatctctgatattgagatagagcatacaattgatctcactttaggattaatggtgtcttacaattgctgttggccagatagcagtcatgacttagtgtcattgcctgcctatttgagacaggaatgtgagtcctgtcttttgtctcaaaaacttccattantcttacctcctggtaagatcaagctccagtatcaaaagttgcatagtgggtacccagagagaaaatgctgatgatcatagtgtagtactggcttacgaaatgctagccagggtgcaatggctcatgcctataatcccagcactttggcaggctgaggtgggcggatcgctcgagcccagaagttcaagaccagcctgagcaacatgatgaaactccgtctttactaaaaatacaaaattagccggatgtggtgccgcatgcctgtaatcccagctacttgggtggctgaggcaggcgaattacttcaacctgggagatggaggttgcagtgagccgagatcatgctgaaggaaggaagggagtaagggagggagggaggcgagagagagagaaagaaaaagaaatgctgcattttcagttctattgatggcacagcaggcaacggtgtgtgaaaaacaggcacttaaagactctgggccgggcacggtggcccatgcctgtaatcccagcactttgggaggctgaggcgggtgaatcatgaggtcaggagttcgagactagcctgaccaacatggtgaaactatgtctctactaaaaatacaaaaaattagctgggtgtggtggtgggtgcctgtaatctcagctactcgggaggctgaggcaggagaattgcttgaacccgggaggcggaggttgcggtgagccgagatcgcgctactgcactccagcctgggtgacagtgtgaaactttgtctc

SEQ ID NO: 432583 - DNA, 3343 bp, Homo sapiens
agcgctagtgtgtccgcctagttcaagtgtgcgtggagattaggtccaagcgcccgcccagaggcaggcagtccgcgagcccagccgccgctgtcgccgccagtagcagccttcgccagcagcgccgcggcggaaccgggcgcaggggagcgagcccggccccgccagcccagcccagcccagccctactccctccccacgccagggcagcagccgttgctcagagagaaggtggaggaagaaatccagaccctagcacgcgcgcaccatcatggaccattatgattctcagcaaaccaacgattacatgcagccagaagaggactgggaccgggacctgctcctggacccggcctgggagaagcagcagagaaagacattcacggcatggtgtaactcccacctccggaaggcggggacacagatcgagaacatcgaagaggacttccgggatggcctgaagctcatgctgctgctggaggtcatctcaggtgaacgcttggccaagccagagcgaggcaagatgagagtgcacaagatctccaacgtcaacaaggccctggatttcatagccagcaaaggcgtcaaactggtgtccatcggagccgaagaaatcgtggatgggaatgtgaagatgaccctgggcatgatctggaccatcatcctgcgctttgccatccaggacatctccgtggaagagacttcagccaaggaagggctgctcctgtggtgtcagagaaagacagccccttacaaaaatgtcaacatccagaacttccacataagctggaaggatggcctcggcttctgtgctttgatccaccgacaccggcccgagctgattgactacgggaagctgcggaaggatgatccactcacaaatctgaatacggcttttgacgtggcagagaagtacctggacatccccaagatgctggatgccgaagacatcgttggaactgcccgaccggatgagaaagccatcatgacttacgtgtctagcttctaccacgccttctctggagcccagaaggcggagacagcagccaatcgcatctgcaaggtgttggccgtcaaccaggagaacgagcagcttatggaagactacgagaagctggccagtgatctgttggagtggatccgccgcacaatcccgtggctggagaaccgggtgcccgagaacaccatgcatgccatgcaacagaagctggaggacttccgggactaccggcgcctgcacaagccgcccaaggtgcaggagaagtgccagctggagatcaacttcaacacgctgcagaccaagctgcggctcagcaaccggcctgccttcatgccctctgagggcaggatggtctcggacatcaacaatgcctggggctgcctggagcaggtggagaagggctatgaggagtggttgctgaatgagatccggaggctggagcgactggaccacctggcagagaagttccggcagaaggcctccatccacgaggcctggactgacggcaaagaggccatgctgcgacagaaggactatgagaccgccaccctctcggagatcaaggccctgctcaagaagcatgaggccttcgagagtgacctggctgcccaccaggaccgtgtggagcagattgccgccatcgcacaggagctcaatgagctggactattatgactcacccagtgtcaacgcccgttgccaaaagatctgtgaccagtgggacaatctgggggccctaactcagaagcgaagggaagctctggagcggaccgagaaactgctggagaccattgaccagctgtacttggagtatgccaagcgggctgcacccttcaacaactggatggagggggccatggaggacctgcaggacaccttcattgtgcacaccattgaggagatccagggactgaccacagcccatgagcagttcaaggccaccctccctgatgccgacaaggagcgcctggccatcctgggcatccacaatgaggtgtccaagattgtccagacctaccacgtcaatatggcgggcaccaacccctacacaaccatcacgcctcaggagatcaatggcaaatgggaccacgtgcggcagctggtgcctcggagggaccaagctctgacggaggagcatgcccgacagcagcacaatgagaggctacgcaagcagtttggagcccaggccaatgtcatcgggccctggatccagaccaagatggaggagatcgggaggatctccattgagatgcatgggaccctggaggaccagctcagccacctgcggcagtatgagaagagcatcgtcaactacaagccaaagattgatcagctggagggcgaccaccagctcatccaggaggcgctcatcttcgacaacaagcacaccaactacaccatggagcacatccgtgtgggctgggagcagctgctcaccaccatcgccaggaccatcaatgaggtagagaaccagatcctgacccgggatgccaagggcatcagccaggagcagatgaatgagttccgggcctccttcaaccactttgaccggaagaagacaggcatgatggacacggatgatttccgcgcctgcctgatctccatgggttacaacatggtaacgtaaaccccaccctctgtctgccctggtgagaaggcagccagctggcgggagcagccaagtcccaggagtggcaggctggaggccctcaggctaggggctgccctccctggaggagccccagggcccatgtccttggggaagatggctccctgaaagccggcccggccacgggcgtgtgtgtatccgggaggcctgacctcctcgcctcaatctctgtgccacttcatcttctggtacttctcactcccactgtggacagctgggctgaccctgaggctggcaggaaggactggtggtgtgggacatcccaggtttcgggctggcatgcgtcacctcacatggagcatggaaaccgagacttccacctctgtcctggcggtgactctggttgggcctgccgcccctctggattgtcccaggccgtcccccaccccccaaccttcctagtctgtccccccttgcacagacattctgagcagagcagtcaggtgactcctgagccatggtgccaagtgcagagcccacaggctgtccagcgcagggcatgggcatggggctaggagcagtgaacctgggagtaaatcccagccctgccgtcattagtgtgttacctcaggtgaagtgggggaaccctacaggactgttacaaggattaaatgaaggaatttaagtgtgtgcatgtatctggcatgtagaaaatacagtgtggtggggagagaa

SEQ ID NO: 432584 - DNA, 2613 bp, Homo sapiens
agcgctagtgtgtccgcctagttcaagtgtgcgtggagattaggtccaagcgcccgcccagaggcaggcagtccgcgagcccagccgccgctgtcgccgccagtagcagccttcgccagcagcgccgcggcggaaccgggcgcaggggagcgagcccggccccgccagcccagcccagcccagccctactccctccccacgccagggcagcagccgttgctcagagagaaggtggaggaagaaatccagaccctagcacgcgcgcaccatcatggaccattatgattctcagcaaaccaacgattacatgcagccagaagaggactgggaccgggacctgctcctggacccggcctgggagaagcagcagagaaagacattcacggcatggtgtaactcccacctccggaaggcggggacacagatcgagaacatcgaagaggacttccgggatggcctgaagctcatgctgctgctggaggtcatctcaggtgaacgcttggccaagccagagcgaggcaagatgagagtgcacaagatctccaacgtcaacaaggccctggatttcatagccagcaaaggcgtcaaactggtgtccatcggagccgaagaaatcgtggatgggaatgtgaagatgaccctgggcatgatctggaccatcatcctgcgctttgccatccaggacatctccgtggaagagacttcagccaaggaagggctgctcctgtggtgtcagagaaagacagccccttacaaaaatgtcaacatccagaacttccacataagctggaaggatggcctcggcttctgtgctttgatccaccgacaccggcccgagctgattgactacgggaagctgcggaaggatgatccactcacaaatctgaatacggcttttgacgtggcagagaagtacctggacatccccaagatgctggatgccgaagacatcgttggaactgcccgaccggatgagaaagccatcatgacttacgtgtctagcttctaccacgccttctctggagcccagaaggcggagacagcagccaatcgcatctgcaaggtgttggccgtcaaccaggagaacgagcagcttatggaagactacgagaagctggccagtgatctgttggagtggatccgccgcacaatcccgtggctggagaaccgggtgcccgagaacaccatgcatgccatgcaacagaagctggaggacttccgggactaccggcgcctgcacaagccgcccaaggtgcaggagaagtgccagctggagatcaacttcaacacgctgcagaccaagctgcggctcagcaaccggcctgccttcatgccctctgagggcaggatggtctcggacatcaacaatgcctggggctgcctggagcaggtggagaagggctatgaggagtggttgctgaatgagatccggaggctggagcgactggaccacctggcagagaagttccggcagaaggcctccatccacgaggcctggactgacggcaaagaggccatgctgcgacagaaggactatgagaccgccaccctctcggagatcaaggccctgctcaagaagcatgaggccttcgagagtgacctggctgcccaccaggaccgtgtggagcagattgccgccatcgcacaggagctcaatgagctggactattatgactcacccagtgtcaacgcccgttgccaaaagatctgtgaccagtgggacaatctgggggccctaactcagaagcgaagggaagctctggagcggaccgagaaactgctggagaccattgaccagctgtacttggagtatgccaagcgggctgcacccttcaacaactggatggagggggccatggaggacctgcaggacaccttcattgtgcacaccattgaggagatccagggactgaccacagcccatgagcagttcaaggccaccctccctgatgccgacaaggagcgcctggccatcctgggcatccacaatgaggtgtccaagattgtccagacctaccacgtcaatatggcgggcaccaacccctacacaaccatcacgcctcaggagatcaatggcaaatgggaccacgtgcggcagctggtgcctcggagggaccaagctctgacggaggagcatgcccgacagcagcacaatgagaggctacgcaagcagtttggagcccaggccaatgtcatcgggccctggatccagaccaagatggaggagatcgggaggatctccattgagatgcatgggaccctggaggaccagctcagccacctgcggcagtatgagaagagcatcgtcaactacaagccaaagattgatcagctggagggcgaccaccagctcatccaggaggcgctcatcttcgacaacaagcacaccaactacaccatggagcacatccgtgtgggctgggagcagctgctcaccaccatcgccaggaccatcaatgaggtagagaaccagatcctgacccgggatgccaagggcatcagccaggagcagatgaatgagttccgggcctccttcaaccactttgaccgggtgagagccccatcctgtgctttcttagtgcagcccccaacccctgccccagggccctggag

SEQ ID NO: 432585 - DNA, 5134 bp, Homo sapiens
  misc_feature (2583)..(2583): n is a, c, g, or t
  misc_feature (3043)..(3043): n is a, c, g, or t
  misc_feature (3588)..(3588): n is a, c, g, or t
  misc_feature (4125)..(4125): n is a, c, g, or t
  misc_feature (4378)..(4378): n is a, c, g, or t
atcctcccgatctcctccatcttggtctggatccagggcccgatggaggagatcgggaggatctccattgagatgcatgggaccctggaggaccagctcagccacctgcggcagtatgagaagagcatcgtcaactacaagccaaagattgatcagctggagggcgaccaccagctcatccaggaggcgctcatcttcgacaacaagcacaccaactacaccatggagcacatccgtgtgggctgggagcagctgctcaccaccatcgccaggaccatcaatgaggtagagaaccagatcctgacccgggatgccaagggcatcagccaggagcagatgaatgagttccgggcctccttcaaccactttgaccgggatcactccggcacactgggtcccgaggagttcaaagcctgcctcatcagcttgggttatgatattggcaacgacccccagggagaagcagaatttgcccgcatcatgagcattgtggaccccaaccgcctgggggtagtgacattccaggccttcattgacttcatgtcccgcgagacagccgacacagatacagcagaccaagtcatggcttccttcaagatcctggctggggacaagaactacattaccatggacgagctgcgccgcgagctgccacccgaccaggctgagtactgcatcgcgcggatggccccctacaccggccccgactccgtgccaggtgctctggactacatgtccttctccacggcgctgtacggcgagagtgacctctaatccaccccgcccggccgccctcgtcttgtgcgccgtgccctgccttgcacctccgccgtcgcccatctcctgcctgggttcggtttcagctcccagcctccacccgggtgagctggggcccacgtggcatcgatcctccctgcccgcgaagtgacagtttacaaaattattttctgcaaaaaagaaaaaaaagttacgttaaaaaccaaaaaactacatattttattatagaaaaagtattttttctccaccagacaaatggaaaaaaagaggaaagattaactatttgcaccgaaatgtcttgttttgttgcgacataggaaaataaccaagcacaaagttatattccatcctttttactgatttttttttcttctatctgttccatctgctgtattcatttctccaatctcatgtccattttggtgtgggagtcggggtagggggtactcttgtcaaaaggcacattggtgcatgtgtgtttgctagctcacttgtccatgaaaatattttatgatattaaagaaaatcttttgaaatggctgttttttaaggaagagaatttatgtggcttctcatttttaaatcccctcagaggtgtgactagtctctttatcagcacacacttaaaaaatttttaatattgtctattaaaaataggacaaacttggagagtatggacaactttgatattgcttggcacagatggtattaaaaaaaccacactcctatgacagctctttgcctgctccttgcttgatgttttctggaagtgtgtgtggggtcaaggatggtgtggggcacctgtatctactcctaatgtttttgaccctgctgtgttcaatcttcttacacttcagtttcttcattttaaaaaggaaaaggtaatttcttcacagtctcctatgagttggacagaaagtcatggatgtgtaaaggacttcttgatgataagccccaccttcatttttccacggcaccaaacagccctgtgacatctgcattcaccccactcgtttttatttttgctgcagtgaacagcttgagttgtctcttaagagtcatctcatcccttgctattcgagatgacccacagatggcagctgttcagcatcacctgggagttcattggaaatacagaatctcaggccccacccctgaatgtcgaatactgtgtgtactgctctagcttctccagagtaaaagatagtctctataggatgccgtctgctctggcaccaggccccctgagcccatgccttttatctgacgtttgttttgcaacccattacatcacttgcccccgggcatcctttaaatttcatccttggctaattctcattgtaaccggttccagcttgctttaaatgattgggtggatggaattctccccattgacaattgacaggtggcaattaattgttcatgcctcagtgggatgaatccattacatctctttcctgcctaatatttttatctacctccgacttttttgtagggactttgttgatatcctcatgaaggcccatctctcctctctctggcttgtccatcccttgacaaaaccttaatgactgttctgggtaccaaatctgtggcaggagtgtgacccagctgccacccacctcctccatcactggaccagctcatagttgtcccttggacatggggttagtgcccaacaagtgtagtcatttggctaagtgagttactaggagggagaacagattcaatttcctgaggtggtgaggagagactgaaggctttgccagttctttggcctatgccaggctctctggtacttctgcnggtggcatgagctgtgtgaagcgcctctaaatttaaggctccaaagctctccaacacaaacaagactttagggtctgcgttatggacgccaagggaagaaatacaacctcaacatcagtgcctgtcaagggaggcagatgtgagctcgtctgcctgccaccggccatttggactaccttgggcaagtgacctccttaaatggggccgataatgttgctttccttctctccctggcacacagtaggcatttaataagtggcaatgggtattgtccctagagttgtataaaaaaccagctctagcagggcgtggtggtgcatgtccgtagtgccagctgcttgggaggctgaggtgaggatcacttgagcccaggagttttgagtccagcctgaacaacataacaagaccctgtctgtaaaatgggggaaaaagtcagctgtgctttgttatgctgtttaanatattcttaaagaaaaaggcctgattacagaaaaataccattaaggggaaccctctttcagtctctgtgctgagggtagtagtaggctgagtaatggtcccccaagatatccatttccgagtccctggaacccatgattgttaattcatatgacaaataagactttgcagatgggattaagaatcttgaggtggggagattggttctggattatctgggtgggtccttagggagcaggcatgtcggcatcagaggaaatgtgacgacagaagcaggggttggagtgatgtgaggccacaagccaatgaatgcggacagcctctagaagctagaaaagccagggaaacagattctccctgagagcctccagatagaatgcaggtctacagacccattttgggtctctattctccagaacttgagataatacgtttgtgttgttttaagccacttcatttgtgataatttgttacagcaaccataggaagctaatatgtgctccatcgttcatgccctggggagctggctgcctccctgacgtcagngacccgtggtataggcatgacctgctggagaaactgccctagcttcaaaggcctgagtgtgcaacattggcccttgggaggctgccttagctgctggacttgatctcctaagccttaaaagcgccattcatggagaggggagaaggaagcttccaagttctgagagcccaaaaaggccagaatagctgggcccagcaggagatgtaaggcttcctgttgtctcagatgcaggagccagagggcagcccagctccaggtaggcaccagccacagaactggaaagcccttgggaggctgaggtcctgccttctctatagcttatcttggcccctctctgtgtgtcagcctccctcctctccctgcagcccagctttgggtgcacacctccccatggtggcagaggtcaattccacagtgcctagtgttgacattttcttgacacgagactagtcccaattccaaatgtccaggaggcacttggcccagtctgacctggtgtgataaagtgatgcctgtcagtggataaggctggggccnttgctcatgggctagattgggtatcacctttaggataacccaaaaggtggcctcataagaactgtctcagttcatcaattttcacattttagcatctctgatattgagatagagcatacaattgatctcactttaggattaatggtgtcttacaattgctgttggccagatagcagtcatgacttagtgtcattgcctgcctatttgagacaggaatgtgagtcctgtcttttgtctcaaaaacttccattantcttacctcctggtaagatcaagctccagtatcaaaagttgcatagtgggtacccagagagaaaatgctgatgatcatagtgtagtactggcttacgaaatgctagccagggtgcaatggctcatgcctataatcccagcactttggcaggctgaggtgggcggatcgctcgagcccagaagttcaagaccagcctgagcaacatgatgaaactccgtctttactaaaaatacaaaattagccggatgtggtgccgcatgcctgtaatcccagctacttgggtggctgaggcaggcgaattacttcaacctgggagatggaggttgcagtgagccgagatcatgctgaaggaaggaagggagtaagggagggagggaggcgagagagagagaaagaaaaagaaatgctgcattttcagttctattgatggcacagcaggcaacggtgtgtgaaaaacaggcacttaaagactctgggccgggcacggtggcccatgcctgtaatcccagcactttgggaggctgaggcgggtgaatcatgaggtcaggagttcgagactagcctgaccaacatggtgaaactatgtctctactaaaaatacaaaaaattagctgggtgtggtggtgggtgcctgtaatctcagctactcgggaggctgaggcaggagaattgcttgaacccgggaggcggaggttgcggtgagccgagatcgcgctactgcactccagcctgggtgacagtgtgaaactttgtctc

SEQ ID NO: 432586 - DNA, 5140 bp, Homo sapiens
  misc_feature (2589)..(2589): n is a, c, g, or t
  misc_feature (3049)..(3049): n is a, c, g, or t
  misc_feature (3594)..(3594): n is a, c, g, or t
  misc_feature (4131)..(4131): n is a, c, g, or t
  misc_feature (4384)..(4384): n is a, c, g, or t
tgcgtagcctctcattgtgctgctgtcgggccctggatccagaccaagatggaggagatcgggaggatctccattgagatgcatgggaccctggaggaccagctcagccacctgcggcagtatgagaagagcatcgtcaactacaagccaaagattgatcagctggagggcgaccaccagctcatccaggaggcgctcatcttcgacaacaagcacaccaactacaccatggagcacatccgtgtgggctgggagcagctgctcaccaccatcgccaggaccatcaatgaggtagagaaccagatcctgacccgggatgccaagggcatcagccaggagcagatgaatgagttccgggcctccttcaaccactttgaccgggatcactccggcacactgggtcccgaggagttcaaagcctgcctcatcagcttgggttatgatattggcaacgacccccagggagaagcagaatttgcccgcatcatgagcattgtggaccccaaccgcctgggggtagtgacattccaggccttcattgacttcatgtcccgcgagacagccgacacagatacagcagaccaagtcatggcttccttcaagatcctggctggggacaagaactacattaccatggacgagctgcgccgcgagctgccacccgaccaggctgagtactgcatcgcgcggatggccccctacaccggccccgactccgtgccaggtgctctggactacatgtccttctccacggcgctgtacggcgagagtgacctctaatccaccccgcccggccgccctcgtcttgtgcgccgtgccctgccttgcacctccgccgtcgcccatctcctgcctgggttcggtttcagctcccagcctccacccgggtgagctggggcccacgtggcatcgatcctccctgcccgcgaagtgacagtttacaaaattattttctgcaaaaaagaaaaaaaagttacgttaaaaaccaaaaaactacatattttattatagaaaaagtattttttctccaccagacaaatggaaaaaaagaggaaagattaactatttgcaccgaaatgtcttgttttgttgcgacataggaaaataaccaagcacaaagttatattccatcctttttactgatttttttttcttctatctgttccatctgctgtattcatttctccaatctcatgtccattttggtgtgggagtcggggtagggggtactcttgtcaaaaggcacattggtgcatgtgtgtttgctagctcacttgtccatgaaaatattttatgatattaaagaaaatcttttgaaatggctgttttttaaggaagagaatttatgtggcttctcatttttaaatcccctcagaggtgtgactagtctctttatcagcacacacttaaaaaatttttaatattgtctattaaaaataggacaaacttggagagtatggacaactttgatattgcttggcacagatggtattaaaaaaaccacactcctatgacagctctttgcctgctccttgcttgatgttttctggaagtgtgtgtggggtcaaggatggtgtggggcacctgtatctactcctaatgtttttgaccctgctgtgttcaatcttcttacacttcagtttcttcattttaaaaaggaaaaggtaatttcttcacagtctcctatgagttggacagaaagtcatggatgtgtaaaggacttcttgatgataagccccaccttcatttttccacggcaccaaacagccctgtgacatctgcattcaccccactcgtttttatttttgctgcagtgaacagcttgagttgtctcttaagagtcatctcatcccttgctattcgagatgacccacagatggcagctgttcagcatcacctgggagttcattggaaatacagaatctcaggccccacccctgaatgtcgaatactgtgtgtactgctctagcttctccagagtaaaagatagtctctataggatgccgtctgctctggcaccaggccccctgagcccatgccttttatctgacgtttgttttgcaacccattacatcacttgcccccgggcatcctttaaatttcatccttggctaattctcattgtaaccggttccagcttgctttaaatgattgggtggatggaattctccccattgacaattgacaggtggcaattaattgttcatgcctcagtgggatgaatccattacatctctttcctgcctaatatttttatctacctccgacttttttgtagggactttgttgatatcctcatgaaggcccatctctcctctctctggcttgtccatcccttgacaaaaccttaatgactgttctgggtaccaaatctgtggcaggagtgtgacccagctgccacccacctcctccatcactggaccagctcatagttgtcccttggacatggggttagtgcccaacaagtgtagtcatttggctaagtgagttactaggagggagaacagattcaatttcctgaggtggtgaggagagactgaaggctttgccagttctttggcctatgccaggctctctggtacttctgcnggtggcatgagctgtgtgaagcgcctctaaatttaaggctccaaagctctccaacacaaacaagactttagggtctgcgttatggacgccaagggaagaaatacaacctcaacatcagtgcctgtcaagggaggcagatgtgagctcgtctgcctgccaccggccatttggactaccttgggcaagtgacctccttaaatggggccgataatgttgctttccttctctccctggcacacagtaggcatttaataagtggcaatgggtattgtccctagagttgtataaaaaaccagctctagcagggcgtggtggtgcatgtccgtagtgccagctgcttgggaggctgaggtgaggatcacttgagcccaggagttttgagtccagcctgaacaacataacaagaccctgtctgtaaaatgggggaaaaagtcagctgtgctttgttatgctgtttaanatattcttaaagaaaaaggcctgattacagaaaaataccattaaggggaaccctctttcagtctctgtgctgagggtagtagtaggctgagtaatggtcccccaagatatccatttccgagtccctggaacccatgattgttaattcatatgacaaataagactttgcagatgggattaagaatcttgaggtggggagattggttctggattatctgggtgggtccttagggagcaggcatgtcggcatcagaggaaatgtgacgacagaagcaggggttggagtgatgtgaggccacaagccaatgaatgcggacagcctctagaagctagaaaagccagggaaacagattctccctgagagcctccagatagaatgcaggtctacagacccattttgggtctctattctccagaacttgagataatacgtttgtgttgttttaagccacttcatttgtgataatttgttacagcaaccataggaagctaatatgtgctccatcgttcatgccctggggagctggctgcctccctgacgtcagngacccgtggtataggcatgacctgctggagaaactgccctagcttcaaaggcctgagtgtgcaacattggcccttgggaggctgccttagctgctggacttgatctcctaagccttaaaagcgccattcatggagaggggagaaggaagcttccaagttctgagagcccaaaaaggccagaatagctgggcccagcaggagatgtaaggcttcctgttgtctcagatgcaggagccagagggcagcccagctccaggtaggcaccagccacagaactggaaagcccttgggaggctgaggtcctgccttctctatagcttatcttggcccctctctgtgtgtcagcctccctcctctccctgcagcccagctttgggtgcacacctccccatggtggcagaggtcaattccacagtgcctagtgttgacattttcttgacacgagactagtcccaattccaaatgtccaggaggcacttggcccagtctgacctggtgtgataaagtgatgcctgtcagtggataaggctggggccnttgctcatgggctagattgggtatcacctttaggataacccaaaaggtggcctcataagaactgtctcagttcatcaattttcacattttagcatctctgatattgagatagagcatacaattgatctcactttaggattaatggtgtcttacaattgctgttggccagatagcagtcatgacttagtgtcattgcctgcctatttgagacaggaatgtgagtcctgtcttttgtctcaaaaacttccattantcttacctcctggtaagatcaagctccagtatcaaaagttgcatagtgggtacccagagagaaaatgctgatgatcatagtgtagtactggcttacgaaatgctagccagggtgcaatggctcatgcctataatcccagcactttggcaggctgaggtgggcggatcgctcgagcccagaagttcaagaccagcctgagcaacatgatgaaactccgtctttactaaaaatacaaaattagccggatgtggtgccgcatgcctgtaatcccagctacttgggtggctgaggcaggcgaattacttcaacctgggagatggaggttgcagtgagccgagatcatgctgaaggaaggaagggagtaagggagggagggaggcgagagagagagaaagaaaaagaaatgctgcattttcagttctattgatggcacagcaggcaacggtgtgtgaaaaacaggcacttaaagactctgggccgggcacggtggcccatgcctgtaatcccagcactttgggaggctgaggcgggtgaatcatgaggtcaggagttcgagactagcctgaccaacatggtgaaactatgtctctactaaaaatacaaaaaattagctgggtgtggtggtgggtgcctgtaatctcagctactcgggaggctgaggcaggagaattgcttgaacccgggaggcggaggttgcggtgagccgagatcgcgctactgcactccagcctgggtgacagtgtgaaactttgtctc

SEQ ID NO: 432587 - DNA, 2493 bp, Homo sapiens
  misc_feature (2424)..(2424): n is a, c, g, or t
  misc_feature (2442)..(2442): n is a, c, g, or t
  misc_feature (2488)..(2488): n is a, c, g, or t
agcgctagtgtgtccgcctagttcaagtgtgcgtggagattaggtccaagcgcccgcccagaggcaggcagtccgcgagcccagccgccgctgtcgccgccagtagcagccttcgccagcagcgccgcggcggaaccgggcgcaggggagcgagcccggccccgccagcccagcccagcccagccctactccctccccacgccagggcagcagccgttgctcagagagaaggtggaggaagaaatccagaccctagcacgcgcgcaccatcatggaccattatgattctcagcaaaccaacgattacatgcagccagaagaggactgggaccgggacctgctcctggacccggcctgggagaagcagcagagaaagacattcacggcatggtgtaactcccacctccggaaggcggggacacagatcgagaacatcgaagaggacttccgggatggcctgaagctcatgctgctgctggaggtcatctcaggtgaacgcttggccaagccagagcgaggcaagatgagagtgcacaagatctccaacgtcaacaaggccctggatttcatagccagcaaaggcgtcaaactggtgtccatcggagccgaagaaatcgtggatgggaatgtgaagatgaccctgggcatgatctggaccatcatcctgcgctttgccatccaggacatctccgtggaagagacttcagccaaggaagggctgctcctgtggtgtcagagaaagacagccccttacaaaaatgtcaacatccagaacttccacataagctggaaggatggcctcggcttctgtgctttgatccaccgacaccggcccgagctgattgactacgggaagctgcggaaggatgatccactcacaaatctgaatacggcttttgacgtggcagagaagtacctggacatccccaagatgctggatgccgaagacatcgttggaactgcccgaccggatgagaaagccatcatgacttacgtgtctagcttctaccacgccttctctggagcccagaaggcggagacagcagccaatcgcatctgcaaggtgttggccgtcaaccaggagaacgagcagcttatggaagactacgagaagctggccagtgatctgttggagtggatccgccgcacaatcccgtggctggagaaccgggtgcccgagaacaccatgcatgccatgcaacagaagctggaggacttccgggactaccggcgcctgcacaagccgcccaaggtgcaggagaagtgccagctggagatcaacttcaacacgctgcagaccaagctgcggctcagcaaccggcctgccttcatgccctctgagggcaggatggtctcggacatcaacaatgcctggggctgcctggagcaggtggagaagggctatgaggagtggttgctgaatgagatccggaggctggagcgactggaccacctggcagagaagttccggcagaaggcctccatccacgaggcctggactgacggcaaagaggccatgctgcgacagaaggactatgagaccgccaccctctcggagatcaaggccctgctcaagaagcatgaggccttcgagagtgacctggctgcccaccaggaccgtgtggagcagattgccgccatcgcacaggagctcaatgagctggactattatgactcacccagtgtcaacgcccgttgccaaaagatctgtgaccagtgggacaatctgggggccctaactcagaagcgaagggaagctctggagcggaccgagaaactgctggagaccattgaccagctgtacttggagtatgccaagcgggctgcacccttcaacaactggatggagggggccatggaggacctgcaggacaccttcattgtgcacaccattgaggagatccagggactgaccacagcccatgagcagttcaaggccaccctccctgatgccgacaaggagcgcctggccatcctgggcatccacaatgaggtgtccaagattgtccagacctaccacgtcaatatggcgggcaccaacccctacacaaccatcacgcctcaggagatcaatggcaaatgggaccacgtgcggcagctggtgcctcggagggaccaagctctgacggaggagcatgcccgacagcagcacaatgagaggctacgcaagcagtttggagcccaggccaatgtcatcgggccctggatccagaccaagatggaggagatcgggaggatctccattgagatgcatgggaccctggaggaccagctcagccacctgcggcagtatgagaagagcatcgtcaactacaagccaaagattgatcagctggagggcgaccaccagctcatccaggaggcgctcatcttcgacaccttccaacaaacaaggcaacaaccaaacttacaaccaattgggangcaacaatcccgtttttngggccttggggaaaccaaaccttgcttccaaccaaacccaatccgnccaaa

SEQ ID NO: 432588 - DNA, 2430 bp, Homo sapiens
agcgctagtgtgtccgcctagttcaagtgtgcgtggagattaggtccaagcgcccgcccagaggcaggcagtccgcgagcccagccgccgctgtcgccgccagtagcagccttcgccagcagcgccgcggcggaaccgggcgcaggggagcgagcccggccccgccagcccagcccagcccagccctactccctccccacgccagggcagcagccgttgctcagagagaaggtggaggaagaaatccagaccctagcacgcgcgcaccatcatggaccattatgattctcagcaaaccaacgattacatgcagccagaagaggactgggaccgggacctgctcctggacccggcctgggagaagcagcagagaaagacattcacggcatggtgtaactcccacctccggaaggcggggacacagatcgagaacatcgaagaggacttccgggatggcctgaagctcatgctgctgctggaggtcatctcaggtgaacgcttggccaagccagagcgaggcaagatgagagtgcacaagatctccaacgtcaacaaggccctggatttcatagccagcaaaggcgtcaaactggtgtccatcggagccgaagaaatcgtggatgggaatgtgaagatgaccctgggcatgatctggaccatcatcctgcgctttgccatccaggacatctccgtggaagagacttcagccaaggaagggctgctcctgtggtgtcagagaaagacagccccttacaaaaatgtcaacatccagaacttccacataagctggaaggatggcctcggcttctgtgctttgatccaccgacaccggcccgagctgattgactacgggaagctgcggaaggatgatccactcacaaatctgaatacggcttttgacgtggcagagaagtacctggacatccccaagatgctggatgccgaagacatcgttggaactgcccgaccggatgagaaagccatcatgacttacgtgtctagcttctaccacgccttctctggagcccagaaggcggagacagcagccaatcgcatctgcaaggtgttggccgtcaaccaggagaacgagcagcttatggaagactacgagaagctggccagtgatctgttggagtggatccgccgcacaatcccgtggctggagaaccgggtgcccgagaacaccatgcatgccatgcaacagaagctggaggacttccgggactaccggcgcctgcacaagccgcccaaggtgcaggagaagtgccagctggagatcaacttcaacacgctgcagaccaagctgcggctcagcaaccggcctgccttcatgccctctgagggcaggatggtctcggacatcaacaatgcctggggctgcctggagcaggtggagaagggctatgaggagtggttgctgaatgagatccggaggctggagcgactggaccacctggcagagaagttccggcagaaggcctccatccacgaggcctggactgacggcaaagaggccatgctgcgacagaaggactatgagaccgccaccctctcggagatcaaggccctgctcaagaagcatgaggccttcgagagtgacctggctgcccaccaggaccgtgtggagcagattgccgccatcgcacaggagctcaatgagctggactattatgactcacccagtgtcaacgcccgttgccaaaagatctgtgaccagtgggacaatctgggggccctaactcagaagcgaagggaagctctggagcggaccgagaaactgctggagaccattgaccagctgtacttggagtatgccaagcgggctgcacccttcaacaactggatggagggggccatggaggacctgcaggacaccttcattgtgcacaccattgaggagatccagggactgaccacagcccatgagcagttcaaggccaccctccctgatgccgacaaggagcgcctggccatcctgggcatccacaatgaggtgtccaagattgtccagacctaccacgtcaatatggcgggcaccaacccctacacaaccatcacgcctcaggagatcaatggcaaatgggaccacctcagccacctgcggcagtatgagaagagcatcgtcaactacaagccaaagattgatcagctggagggcgaccaccagctcatccaggaggcgctcatcttcgacaacaagcacaccaactacaccatggagcacatccgtgtgggctgggagcagctgctcaccaccatcgccaggaccatcaatgaggtagagaaccagatcctgacccgggatgccaagggcatcagccaggagcagatgaatgagttccgggcctccttcaaccactttgaccgggtgagagccccatcctgtgctttcttagtgcagcccccaacccctgccccagggccctggag

SEQ ID NO: 432589 - DNA, 5909 bp, Homo sapiens
  misc_feature (3358)..(3358): n is a, c, g, or t
  misc_feature (3818)..(3818): n is a, c, g, or t
  misc_feature (4363)..(4363): n is a, c, g, or t
  misc_feature (4900)..(4900): n is a, c, g, or t
  misc_feature (5153)..(5153): n is a, c, g, or t
agcgctagtgtgtccgcctagttcaagtgtgcgtggagattaggtccaagcgcccgcccagaggcaggcagtccgcgagcccagccgccgctgtcgccgccagtagcagccttcgccagcagcgccgcggcggaaccgggcgcaggggagcgagcccggccccgccagcccagcccagcccagccctactccctccccacgccagggcagcagccgttgctcagagagaaggtggaggaagaaatccagaccctagcacgcgcgcaccatcatggaccattatgattctcagcaaaccaacgattacatgcagccagaagaggactgggaccgggacctgctcctggacccggcctgggagaagcagcagagaaagacattcacggcatggtgtaactcccacctccggaaggcggggacacagatcgagaacatcgaagaggacttccgggatggcctgaagctcatgctgctgctggaggtcatctcaggtgaacgcttggccaagccagagcgaggcaagatgagagtgcacaagatctccaacgtcaacaaggccctggatttcatagccagcaaaggcgtcaaactggtgtccatcggagccgaagaaatcgtggatgggaatgtgaagatgaccctgggcatgatctggaccatcatcctgcgctttgccatccaggacatctccgtggaagagacttcagccaaggaagggctgctcctgtggtgtcagagaaagacagccccttacaaaaatgtcaacatccagaacttccacataagctggaaggatggcctcggcttctgtgctttgatccaccgacaccggcccgagctgattgactacgggaagctgcggaaggatgatccactcacaaatctgaatacggcttttgacgtggcagagaagtacctggacatccccaagatgctggatgccgaagacatcgttggaactgcccgaccggatgagaaagccatcatgacttacgtgtctagcttctaccacgccttctctggagcccagaaggcggagacagcagccaatcgcatctgcaaggtgttggccgtcaaccaggagaacgagcagcttatggaagactacgagaagctggccagtgatctgttggagtggatccgccgcacaatcccgtggctggagaaccgggtgcccgagaacaccatgcatgccatgcaacagaagctggaggacttccgggactaccggcgcctgcacaagccgcccaaggtgcaggagaagtgccagctggagatcaacttcaacacgctgcagaccaagctgcggctcagcaaccggcctgccttcatgccctctgagggcaggatggtctcggacatcaacaatgcctggggctgcctggagcaggtggagaagggctatgaggagtggttgctgaatgagatccggaggctggagcgactggaccacctggcagagaagttccggcagaaggcctccatccacgaggcctggactgacggcaaagaggccatgctgcgacagaaggactatgagaccgccaccctctcggagatcaaggccctgctcaagaagcatgaggccttcgagagtgacctggctgcccaccaggaccgtgtggagcagattgccgccatcgcacaggagctcaagtgagctggggcccacgtggcatcgatcctccctgcccgcgaagtgacagtttacaaaattattttctgcaaaaaagaaaaaaaagttacgttaaaaaccaaaaaactacatattttattatagaaaaagtattttttctccaccagacaaatggaaaaaaagaggaaagattaactatttgcaccgaaatgtcttgttttgttgcgacataggaaaataaccaagcacaaagttatattccatcctttttactgatttttttttcttctatctgttccatctgctgtattcatttctccaatctcatgtccattttggtgtgggagtcggggtagggggtactcttgtcaaaaggcacattggtgcatgtgtgtttgctagctcacttgtccatgaaaatattttatgatattaaagaaaatcttttgaaatggctgttttttaaggaagagaatttatgtggcttctcatttttaaatcccctcagaggtgtgactagtctctttatcagcacacacttaaaaaatttttaatattgtctattaaaaataggacaaacttggagagtatggacaactttgatattgcttggcacagatggtattaaaaaaaccacactcctatgacagctctttgcctgctccttgcttgatgttttctggaagtgtgtgtggggtcaaggatggtgtggggcacctgtatctactcctaatgtttttgaccctgctgtgttcaatcttcttacacttcagtttcttcattttaaaaaggaaaaggtaatttcttcacagtctcctatgagttggacagaaagtcatggatgtgtaaaggacttcttgatgataagccccaccttcatttttccacggcaccaaacagccctgtgacatctgcattcaccccactcgtttttatttttgctgcagtgaacagcttgagttgtctcttaagagtcatctcatcccttgctattcgagatgacccacagatggcagctgttcagcatcacctgggagttcattggaaatacagaatctcaggccccacccctgaatgtcgaatactgtgtgtactgctctagcttctccagagtaaaagatagtctctataggatgccgtctgctctggcaccaggccccctgagcccatgccttttatctgacgtttgttttgcaacccattacatcacttgcccccgggcatcctttaaatttcatccttggctaattctcattgtaaccggttccagcttgctttaaatgattgggtggatggaattctccccattgacaattgacaggtggcaattaattgttcatgcctcagtgggatgaatccattacatctctttcctgcctaatatttttatctacctccgacttttttgtagggactttgttgatatcctcatgaaggcccatctctcctctctctggcttgtccatcccttgacaaaaccttaatgactgttctgggtaccaaatctgtggcaggagtgtgacccagctgccacccacctcctccatcactggaccagctcatagttgtcccttggacatggggttagtgcccaacaagtgtagtcatttggctaagtgagttactaggagggagaacagattcaatttcctgaggtggtgaggagagactgaaggctttgccagttctttggcctatgccaggctctctggtacttctgcnggtggcatgagctgtgtgaagcgcctctaaatttaaggctccaaagctctccaacacaaacaagactttagggtctgcgttatggacgccaagggaagaaatacaacctcaacatcagtgcctgtcaagggaggcagatgtgagctcgtctgcctgccaccggccatttggactaccttgggcaagtgacctccttaaatggggccgataatgttgctttccttctctccctggcacacagtaggcatttaataagtggcaatgggtattgtccctagagttgtataaaaaaccagctctagcagggcgtggtggtgcatgtccgtagtgccagctgcttgggaggctgaggtgaggatcacttgagcccaggagttttgagtccagcctgaacaacataacaagaccctgtctgtaaaatgggggaaaaagtcagctgtgctttgttatgctgtttaanatattcttaaagaaaaaggcctgattacagaaaaataccattaaggggaaccctctttcagtctctgtgctgagggtagtagtaggctgagtaatggtcccccaagatatccatttccgagtccctggaacccatgattgttaattcatatgacaaataagactttgcagatgggattaagaatcttgaggtggggagattggttctggattatctgggtgggtccttagggagcaggcatgtcggcatcagaggaaatgtgacgacagaagcaggggttggagtgatgtgaggccacaagccaatgaatgcggacagcctctagaagctagaaaagccagggaaacagattctccctgagagcctccagatagaatgcaggtctacagacccattttgggtctctattctccagaacttgagataatacgtttgtgttgttttaagccacttcatttgtgataatttgttacagcaaccataggaagctaatatgtgctccatcgttcatgccctggggagctggctgcctccctgacgtcagngacccgtggtataggcatgacctgctggagaaactgccctagcttcaaaggcctgagtgtgcaacattggcccttgggaggctgccttagctgctggacttgatctcctaagccttaaaagcgccattcatggagaggggagaaggaagcttccaagttctgagagcccaaaaaggccagaatagctgggcccagcaggagatgtaaggcttcctgttgtctcagatgcaggagccagagggcagcccagctccaggtaggcaccagccacagaactggaaagcccttgggaggctgaggtcctgccttctctatagcttatcttggcccctctctgtgtgtcagcctccctcctctccctgcagcccagctttgggtgcacacctccccatggtggcagaggtcaattccacagtgcctagtgttgacattttcttgacacgagactagtcccaattccaaatgtccaggaggcacttggcccagtctgacctggtgtgataaagtgatgcctgtcagtggataaggctggggccnttgctcatgggctagattgggtatcacctttaggataacccaaaaggtggcctcataagaactgtctcagttcatcaattttcacattttagcatctctgatattgagatagagcatacaattgatctcactttaggattaatggtgtcttacaattgctgttggccagatagcagtcatgacttagtgtcattgcctgcctatttgagacaggaatgtgagtcctgtcttttgtctcaaaaacttccattantcttacctcctggtaagatcaagctccagtatcaaaagttgcatagtgggtacccagagagaaaatgctgatgatcatagtgtagtactggcttacgaaatgctagccagggtgcaatggctcatgcctataatcccagcactttggcaggctgaggtgggcggatcgctcgagcccagaagttcaagaccagcctgagcaacatgatgaaactccgtctttactaaaaatacaaaattagccggatgtggtgccgcatgcctgtaatcccagctacttgggtggctgaggcaggcgaattacttcaacctgggagatggaggttgcagtgagccgagatcatgctgaaggaaggaagggagtaagggagggagggaggcgagagagagagaaagaaaaagaaatgctgcattttcagttctattgatggcacagcaggcaacggtgtgtgaaaaacaggcacttaaagactctgggccgggcacggtggcccatgcctgtaatcccagcactttgggaggctgaggcgggtgaatcatgaggtcaggagttcgagactagcctgaccaacatggtgaaactatgtctctactaaaaatacaaaaaattagctgggtgtggtggtgggtgcctgtaatctcagctactcgggaggctgaggcaggagaattgcttgaacccgggaggcggaggttgcggtgagccgagatcgcgctactgcactccagcctgggtgacagtgtgaaactttgtctc

SEQ ID NO: 432590 - DNA, 5166 bp, Homo sapiens
  misc_feature (2615)..(2615): n is a, c, g, or t
  misc_feature (3075)..(3075): n is a, c, g, or t
  misc_feature (3620)..(3620): n is a, c, g, or t
  misc_feature (4157)..(4157): n is a, c, g, or t
  misc_feature (4410)..(4410): n is a, c, g, or t
aaggcacgatggcgcgtcctgtgtgcagatactccctgcttccctctctagcccccaccctgcagagttggacccctgagctagccatgctctgacagtctcagttgcacacacgagccagcagaggggttttgtgccacttctggatgctagggttagactgggagatacagcggtgaagctgaaatgaaaaatgtgttgctgtagtttgttattagaccccttctttccattggtttaattagggaagcgcacgatggcacatccgtgtgggctgggagcagctgctcaccaccatcgccaggaccatcaatgaggtagagaaccagatcctgacccgggatgccaagggcatcagccaggagcagatgaatgagttccgggcctccttcaaccactttgaccgggatcactccggcacactgggtcccgaggagttcaaagcctgcctcatcagcttgggttatgatattggcaacgacccccagggagaagcagaatttgcccgcatcatgagcattgtggaccccaaccgcctgggggtagtgacattccaggccttcattgacttcatgtcccgcgagacagccgacacagatacagcagaccaagtcatggcttccttcaagatcctggctggggacaagaactacattaccatggacgagctgcgccgcgagctgccacccgaccaggctgagtactgcatcgcgcggatggccccctacaccggccccgactccgtgccaggtgctctggactacatgtccttctccacggcgctgtacggcgagagtgacctctaatccaccccgcccggccgccctcgtcttgtgcgccgtgccctgccttgcacctccgccgtcgcccatctcctgcctgggttcggtttcagctcccagcctccacccgggtgagctggggcccacgtggcatcgatcctccctgcccgcgaagtgacagtttacaaaattattttctgcaaaaaagaaaaaaaagttacgttaaaaaccaaaaaactacatattttattatagaaaaagtattttttctccaccagacaaatggaaaaaaagaggaaagattaactatttgcaccgaaatgtcttgttttgttgcgacataggaaaataaccaagcacaaagttatattccatcctttttactgatttttttttcttctatctgttccatctgctgtattcatttctccaatctcatgtccattttggtgtgggagtcggggtagggggtactcttgtcaaaaggcacattggtgcatgtgtgtttgctagctcacttgtccatgaaaatattttatgatattaaagaaaatcttttgaaatggctgttttttaaggaagagaatttatgtggcttctcatttttaaatcccctcagaggtgtgactagtctctttatcagcacacacttaaaaaatttttaatattgtctattaaaaataggacaaacttggagagtatggacaactttgatattgcttggcacagatggtattaaaaaaaccacactcctatgacagctctttgcctgctccttgcttgatgttttctggaagtgtgtgtggggtcaaggatggtgtggggcacctgtatctactcctaatgtttttgaccctgctgtgttcaatcttcttacacttcagtttcttcattttaaaaaggaaaaggtaatttcttcacagtctcctatgagttggacagaaagtcatggatgtgtaaaggacttcttgatgataagccccaccttcatttttccacggcaccaaacagccctgtgacatctgcattcaccccactcgtttttatttttgctgcagtgaacagcttgagttgtctcttaagagtcatctcatcccttgctattcgagatgacccacagatggcagctgttcagcatcacctgggagttcattggaaatacagaatctcaggccccacccctgaatgtcgaatactgtgtgtactgctctagcttctccagagtaaaagatagtctctataggatgccgtctgctctggcaccaggccccctgagcccatgccttttatctgacgtttgttttgcaacccattacatcacttgcccccgggcatcctttaaatttcatccttggctaattctcattgtaaccggttccagcttgctttaaatgattgggtggatggaattctccccattgacaattgacaggtggcaattaattgttcatgcctcagtgggatgaatccattacatctctttcctgcctaatatttttatctacctccgacttttttgtagggactttgttgatatcctcatgaaggcccatctctcctctctctggcttgtccatcccttgacaaaaccttaatgactgttctgggtaccaaatctgtggcaggagtgtgacccagctgccacccacctcctccatcactggaccagctcatagttgtcccttggacatggggttagtgcccaacaagtgtagtcatttggctaagtgagttactaggagggagaacagattcaatttcctgaggtggtgaggagagactgaaggctttgccagttctttggcctatgccaggctctctggtacttctgcnggtggcatgagctgtgtgaagcgcctctaaatttaaggctccaaagctctccaacacaaacaagactttagggtctgcgttatggacgccaagggaagaaatacaacctcaacatcagtgcctgtcaagggaggcagatgtgagctcgtctgcctgccaccggccatttggactaccttgggcaagtgacctccttaaatggggccgataatgttgctttccttctctccctggcacacagtaggcatttaataagtggcaatgggtattgtccctagagttgtataaaaaaccagctctagcagggcgtggtggtgcatgtccgtagtgccagctgcttgggaggctgaggtgaggatcacttgagcccaggagttttgagtccagcctgaacaacataacaagaccctgtctgtaaaatgggggaaaaagtcagctgtgctttgttatgctgtttaanatattcttaaagaaaaaggcctgattacagaaaaataccattaaggggaaccctctttcagtctctgtgctgagggtagtagtaggctgagtaatggtcccccaagatatccatttccgagtccctggaacccatgattgttaattcatatgacaaataagactttgcagatgggattaagaatcttgaggtggggagattggttctggattatctgggtgggtccttagggagcaggcatgtcggcatcagaggaaatgtgacgacagaagcaggggttggagtgatgtgaggccacaagccaatgaatgcggacagcctctagaagctagaaaagccagggaaacagattctccctgagagcctccagatagaatgcaggtctacagacccattttgggtctctattctccagaacttgagataatacgtttgtgttgttttaagccacttcatttgtgataatttgttacagcaaccataggaagctaatatgtgctccatcgttcatgccctggggagctggctgcctccctgacgtcagngacccgtggtataggcatgacctgctggagaaactgccctagcttcaaaggcctgagtgtgcaacattggcccttgggaggctgccttagctgctggacttgatctcctaagccttaaaagcgccattcatggagaggggagaaggaagcttccaagttctgagagcccaaaaaggccagaatagctgggcccagcaggagatgtaaggcttcctgttgtctcagatgcaggagccagagggcagcccagctccaggtaggcaccagccacagaactggaaagcccttgggaggctgaggtcctgccttctctatagcttatcttggcccctctctgtgtgtcagcctccctcctctccctgcagcccagctttgggtgcacacctccccatggtggcagaggtcaattccacagtgcctagtgttgacattttcttgacacgagactagtcccaattccaaatgtccaggaggcacttggcccagtctgacctggtgtgataaagtgatgcctgtcagtggataaggctggggccnttgctcatgggctagattgggtatcacctttaggataacccaaaaggtggcctcataagaactgtctcagttcatcaattttcacattttagcatctctgatattgagatagagcatacaattgatctcactttaggattaatggtgtcttacaattgctgttggccagatagcagtcatgacttagtgtcattgcctgcctatttgagacaggaatgtgagtcctgtcttttgtctcaaaaacttccattantcttacctcctggtaagatcaagctccagtatcaaaagttgcatagtgggtacccagagagaaaatgctgatgatcatagtgtagtactggcttacgaaatgctagccagggtgcaatggctcatgcctataatcccagcactttggcaggctgaggtgggcggatcgctcgagcccagaagttcaagaccagcctgagcaacatgatgaaactccgtctttactaaaaatacaaaattagccggatgtggtgccgcatgcctgtaatcccagctacttgggtggctgaggcaggcgaattacttcaacctgggagatggaggttgcagtgagccgagatcatgctgaaggaaggaagggagtaagggagggagggaggcgagagagagagaaagaaaaagaaatgctgcattttcagttctattgatggcacagcaggcaacggtgtgtgaaaaacaggcacttaaagactctgggccgggcacggtggcccatgcctgtaatcccagcactttgggaggctgaggcgggtgaatcatgaggtcaggagttcgagactagcctgaccaacatggtgaaactatgtctctactaaaaatacaaaaaattagctgggtgtggtggtgggtgcctgtaatctcagctactcgggaggctgaggcaggagaattgcttgaacccgggaggcggaggttgcggtgagccgagatcgcgctactgcactccagcctgggtgacagtgtgaaactttgtctc

SEQ ID NO: 432591 - DNA, 2052 bp, Homo sapiens
agcgctagtgtgtccgcctagttcaagtgtgcgtggagattaggtccaagcgcccgcccagaggcaggcagtccgcgagcccagccgccgctgtcgccgccagtagcagccttcgccagcagcgccgcggcggaaccgggcgcaggggagcgagcccggccccgccagcccagcccagcccagccctactccctccccacgccagggcagcagccgttgctcagagagaaggtggaggaagaaatccagaccctagcacgcgcgcaccatcatggaccattatgattctcagcaaaccaacgattacatgcagccagaagaggactgggaccgggacctgctcctggacccggcctgggagaagcagcagagaaagacattcacggcatggtgtaactcccacctccggaaggcggggacacagatcgagaacatcgaagaggacttccgggatggcctgaagctcatgctgctgctggaggtcatctcaggtgaacgcttggccaagccagagcgaggcaagatgagagtgcacaagatctccaacgtcaacaaggccctggatttcatagccagcaaaggcgtcaaactggtgtccatcggagccgaagaaatcgtggatgggaatgtgaagatgaccctgggcatgatctggaccatcatcctgcgctttgccatccaggacatctccgtggaagagacttcagccaaggaagggctgctcctgtggtgtcagagaaagacagccccttacaaaaatgtcaacatccagaacttccacataagctggaaggatggcctcggcttctgtgctttgatccaccgacaccggcccgagctgattgactacgggaagctgcggaaggatgatccactcacaaatctgaatacggcttttgacgtggcagagaagtacctggacatccccaagatgctggatgccgaagacatcgttggaactgcccgaccggatgagaaagccatcatgacttacgtgtctagcttctaccacgccttctctggagcccagaaggcggagacagcagccaatcgcatctgcaaggtgttggccgtcaaccaggagaacgagcagcttatggaagactacgagaagctggccagtgatctgttggagtggatccgccgcacaatcccgtggctggagaaccgggtgcccgagaacaccatgcatgccatgcaacagaagctggaggacttccgggactaccggcgcctgcacaagccgcccaaggtgcaggagaagtgccagctggagatcaacttcaacacgctgcagaccaagctgcggctcagcaaccggcctgccttcatgccctctgagggcaggatggtctcggacatcaacaatgcctggggctgcctggagcaggtggagaagggctatgaggagtggttgctgaatgagatccggaggctggagcgactggaccacctggcagagaagttccggcagaaggcctccatccacgaggcctggactgacggcaaagaggccatgctgcgacagaaggactatgagaccgccaccctctcggagatcaaggccctgctcaagaagcatgaggccttcgagagtgacctggctgcccaccaggaccgtgtggagcagattgccgccatcgcacaggagctcaatgagctggactattatgactcacccagtgtcaacgcccgttgccaaaagatctgtgaccagtgggacaatctgggggccctaactcagaagcgaagggaagctctggagcggaccgagaaactgctggagaccattgaccagctgtacttggagtatgccaagcgggctgcacccttcaacaactggatggagggggccatggaggacctgcaggacaccttcattgtgcacaccattgaggagatccagttgcagaatactggatttaaaaggttttgccaggagctaaggaagctcatgttgtgggaggtcacctgggtagtgagcctctggagcagcccttctccctgacctgtgaggtggtgaacacaccagagaggttgctgctaatttga

SEQ ID NO: 432592 - DNA, 1784 bp, Homo sapiens
agcgctagtgtgtccgcctagttcaagtgtgcgtggagattaggtccaagcgcccgcccagaggcaggcagtccgcgagcccagccgccgctgtcgccgccagtagcagccttcgccagcagcgccgcggcggaaccgggcgcaggggagcgagcccggccccgccagcccagcccagcccagccctactccctccccacgccagggcagcagccgttgctcagagagaaggtggaggaagaaatccagaccctagcacgcgcgcaccatcatggaccattatgattctcagcaaaccaacgattacatgcagccagaagaggactgggaccgggacctgctcctggacccggcctgggagaagcagcagagaaagacattcacggcatggtgtaactcccacctccggaaggcggggacacagatcgagaacatcgaagaggacttccgggatggcctgaagctcatgctgctgctggaggtcatctcaggtgaacgcttggccaagccagagcgaggcaagatgagagtgcacaagatctccaacgtcaacaaggccctggatttcatagccagcaaaggcgtcaaactggtgtccatcggagccgaagaaatcgtggatgggaatgtgaagatgaccctgggcatgatctggaccatcatcctgcgctttgccatccaggacatctccgtggaagagacttcagccaaggaagggctgctcctgtggtgtcagagaaagacagccccttacaaaaatgtcaacatccagaacttccacataagctggaaggatggcctcggcttctgtgctttgatccaccgacaccggcccgagctgattgactacgggaagctgcggaaggatgatccactcacaaatctgaatacggcttttgacgtggcagagaagtacctggacatccccaagatgctggatgccgaagacatcgttggaactgcccgaccggatgagaaagccatcatgacttacgtgtctagcttctaccacgccttctctggagcccagaaggcggagacagcagccaatcgcatctgcaaggtgttggccgtcaaccaggagaacgagcagcttatggaagactacgagaagctggccagtgatctgttggagtggatccgccgcacaatcccgtggctggagaaccgggtgcccgagaacaccatgcatgccatgcaacagaagctggaggacttccgggactaccggcgcctgcacaagccgcccaaggtgcaggagaagtgccagctggagatcaacttcaacacgctgcagaccaagctgcggctcagcaaccggcctgccttcatgccctctgagggcaggatggtctcggacatcaacaatgcctggggctgcctggagcaggtggagaagggctatgaggagtggttgctgaatgagatccggaggctggagcgactggaccacctggcagagaagttccggcagaaggcctccatccacgaggcctggactgacggcaaagaggccatgctgcgacagaaggactatgagaccgccaccctctcggagatcaaggccctgctcaagaagcatgaggccttcgagagtgacctggctgcccaccaggaccgtgtggagcagattgccgccatcgcacaggagctcaatgagctggactattatgactcacccagtgtcaacgcccgttgccaaaagatctgtgaccagtgggacaatctgggaccccccccgcaactggggatactctagatacgaccaacacgcatgcagcgtg

SEQ ID NO: 432593 - DNA, 1761 bp, Homo sapiens
agcgctagtgtgtccgcctagttcaagtgtgcgtggagattaggtccaagcgcccgcccagaggcaggcagtccgcgagcccagccgccgctgtcgccgccagtagcagccttcgccagcagcgccgcggcggaaccgggcgcaggggagcgagcccggccccgccagcccagcccagcccagccctactccctccccacgccagggcagcagccgttgctcagagagaaggtggaggaagaaatccagaccctagcacgcgcgcaccatcatggaccattatgattctcagcaaaccaacgattacatgcagccagaagaggactgggaccgggacctgctcctggacccggcctgggagaagcagcagagaaagacattcacggcatggtgtaactcccacctccggaaggcggggacacagatcgagaacatcgaagaggacttccgggatggcctgaagctcatgctgctgctggaggtcatctcaggtgaacgcttggccaagccagagcgaggcaagatgagagtgcacaagatctccaacgtcaacaaggccctggatttcatagccagcaaaggcgtcaaactggtgtccatcggagccgaagaaatcgtggatgggaatgtgaagatgaccctgggcatgatctggaccatcatcctgcgctttgccatccaggacatctccgtggaagagacttcagccaaggaagggctgctcctgtggtgtcagagaaagacagccccttacaaaaatgtcaacatccagaacttccacataagctggaaggatggcctcggcttctgtgctttgatccaccgacaccggcccgagctgattgactacgggaagctgcggaaggatgatccactcacaaatctgaatacggcttttgacgtggcagagaagtacctggacatccccaagatgctggatgccgaagacatcgttggaactgcccgaccggatgagaaagccatcatgacttacgtgtctagcttctaccacgccttctctggagcccagaaggcggagacagcagccaatcgcatctgcaaggtgttggccgtcaaccaggagaacgagcagcttatggaagactacgagaagctggccagtgatctgttggagtggatccgccgcacaatcccgtggctggagaaccgggtgcccgagaacaccatgcatgccatgcaacagaagctggaggacttccgggactaccggcgcctgcacaagccgcccaaggtgcaggagaagtgccagctggagatcaacttcaacacgctgcagaccaagctgcggctcagcaaccggcctgccttcatgccctctgagggcaggatggtctcggacatcaacaatgcctggggctgcctggagcaggtggagaagggctatgaggagtggttgctgaatgagatccggaggctggagcgactggaccacctggcagagaagttccggcagaaggcctccatccacgaggcctggactgacggcaaagaggccatgctgcgagagaagggctatgaggagcggacatgatgctgtggaagtagtttgaggaacatcctatgagttttcttagaatgtataaaggttgtagcccgtccaacttcaaagaaaaaaatgaccacatactttgcaatcaggctgaaatgtggcatgcttttctaattccaactttataaactagtaaaaaagtgtttgcttattccaccagttctactgggacatactcgagtataaagaga

SEQ ID NO: 432594 - DNA, 4578 bp, Homo sapiens
  misc_feature (2027)..(2027): n is a, c, g, or t
  misc_feature (2487)..(2487): n is a, c, g, or t
  misc_feature (3032)..(3032): n is a, c, g, or t
  misc_feature (3569)..(3569): n is a, c, g, or t
  misc_feature (3822)..(3822): n is a, c, g, or t
ccaggatcttgaaggaagccatgacttggtctgctgtatctgtgtcggctggggacaagaactacattaccatggacgagctgcgccgcgagctgccacccgaccaggctgagtactgcatcgcgcggatggccccctacaccggccccgactccgtgccaggtgctctggactacatgtccttctccacggcgctgtacggcgagagtgacctctaatccaccccgcccggccgccctcgtcttgtgcgccgtgccctgccttgcacctccgccgtcgcccatctcctgcctgggttcggtttcagctcccagcctccacccgggtgagctggggcccacgtggcatcgatcctccctgcccgcgaagtgacagtttacaaaattattttctgcaaaaaagaaaaaaaagttacgttaaaaaccaaaaaactacatattttattatagaaaaagtattttttctccaccagacaaatggaaaaaaagaggaaagattaactatttgcaccgaaatgtcttgttttgttgcgacataggaaaataaccaagcacaaagttatattccatcctttttactgatttttttttcttctatctgttccatctgctgtattcatttctccaatctcatgtccattttggtgtgggagtcggggtagggggtactcttgtcaaaaggcacattggtgcatgtgtgtttgctagctcacttgtccatgaaaatattttatgatattaaagaaaatcttttgaaatggctgttttttaaggaagagaatttatgtggcttctcatttttaaatcccctcagaggtgtgactagtctctttatcagcacacacttaaaaaatttttaatattgtctattaaaaataggacaaacttggagagtatggacaactttgatattgcttggcacagatggtattaaaaaaaccacactcctatgacagctctttgcctgctccttgcttgatgttttctggaagtgtgtgtggggtcaaggatggtgtggggcacctgtatctactcctaatgtttttgaccctgctgtgttcaatcttcttacacttcagtttcttcattttaaaaaggaaaaggtaatttcttcacagtctcctatgagttggacagaaagtcatggatgtgtaaaggacttcttgatgataagccccaccttcatttttccacggcaccaaacagccctgtgacatctgcattcaccccactcgtttttatttttgctgcagtgaacagcttgagttgtctcttaagagtcatctcatcccttgctattcgagatgacccacagatggcagctgttcagcatcacctgggagttcattggaaatacagaatctcaggccccacccctgaatgtcgaatactgtgtgtactgctctagcttctccagagtaaaagatagtctctataggatgccgtctgctctggcaccaggccccctgagcccatgccttttatctgacgtttgttttgcaacccattacatcacttgcccccgggcatcctttaaatttcatccttggctaattctcattgtaaccggttccagcttgctttaaatgattgggtggatggaattctccccattgacaattgacaggtggcaattaattgttcatgcctcagtgggatgaatccattacatctctttcctgcctaatatttttatctacctccgacttttttgtagggactttgttgatatcctcatgaaggcccatctctcctctctctggcttgtccatcccttgacaaaaccttaatgactgttctgggtaccaaatctgtggcaggagtgtgacccagctgccacccacctcctccatcactggaccagctcatagttgtcccttggacatggggttagtgcccaacaagtgtagtcatttggctaagtgagttactaggagggagaacagattcaatttcctgaggtggtgaggagagactgaaggctttgccagttctttggcctatgccaggctctctggtacttctgcnggtggcatgagctgtgtgaagcgcctctaaatttaaggctccaaagctctccaacacaaacaagactttagggtctgcgttatggacgccaagggaagaaatacaacctcaacatcagtgcctgtcaagggaggcagatgtgagctcgtctgcctgccaccggccatttggactaccttgggcaagtgacctccttaaatggggccgataatgttgctttccttctctccctggcacacagtaggcatttaataagtggcaatgggtattgtccctagagttgtataaaaaaccagctctagcagggcgtggtggtgcatgtccgtagtgccagctgcttgggaggctgaggtgaggatcacttgagcccaggagttttgagtccagcctgaacaacataacaagaccctgtctgtaaaatgggggaaaaagtcagctgtgctttgttatgctgtttaanatattcttaaagaaaaaggcctgattacagaaaaataccattaaggggaaccctctttcagtctctgtgctgagggtagtagtaggctgagtaatggtcccccaagatatccatttccgagtccctggaacccatgattgttaattcatatgacaaataagactttgcagatgggattaagaatcttgaggtggggagattggttctggattatctgggtgggtccttagggagcaggcatgtcggcatcagaggaaatgtgacgacagaagcaggggttggagtgatgtgaggccacaagccaatgaatgcggacagcctctagaagctagaaaagccagggaaacagattctccctgagagcctccagatagaatgcaggtctacagacccattttgggtctctattctccagaacttgagataatacgtttgtgttgttttaagccacttcatttgtgataatttgttacagcaaccataggaagctaatatgtgctccatcgttcatgccctggggagctggctgcctccctgacgtcagngacccgtggtataggcatgacctgctggagaaactgccctagcttcaaaggcctgagtgtgcaacattggcccttgggaggctgccttagctgctggacttgatctcctaagccttaaaagcgccattcatggagaggggagaaggaagcttccaagttctgagagcccaaaaaggccagaatagctgggcccagcaggagatgtaaggcttcctgttgtctcagatgcaggagccagagggcagcccagctccaggtaggcaccagccacagaactggaaagcccttgggaggctgaggtcctgccttctctatagcttatcttggcccctctctgtgtgtcagcctccctcctctccctgcagcccagctttgggtgcacacctccccatggtggcagaggtcaattccacagtgcctagtgttgacattttcttgacacgagactagtcccaattccaaatgtccaggaggcacttggcccagtctgacctggtgtgataaagtgatgcctgtcagtggataaggctggggccnttgctcatgggctagattgggtatcacctttaggataacccaaaaggtggcctcataagaactgtctcagttcatcaattttcacattttagcatctctgatattgagatagagcatacaattgatctcactttaggattaatggtgtcttacaattgctgttggccagatagcagtcatgacttagtgtcattgcctgcctatttgagacaggaatgtgagtcctgtcttttgtctcaaaaacttccattantcttacctcctggtaagatcaagctccagtatcaaaagttgcatagtgggtacccagagagaaaatgctgatgatcatagtgtagtactggcttacgaaatgctagccagggtgcaatggctcatgcctataatcccagcactttggcaggctgaggtgggcggatcgctcgagcccagaagttcaagaccagcctgagcaacatgatgaaactccgtctttactaaaaatacaaaattagccggatgtggtgccgcatgcctgtaatcccagctacttgggtggctgaggcaggcgaattacttcaacctgggagatggaggttgcagtgagccgagatcatgctgaaggaaggaagggagtaagggagggagggaggcgagagagagagaaagaaaaagaaatgctgcattttcagttctattgatggcacagcaggcaacggtgtgtgaaaaacaggcacttaaagactctgggccgggcacggtggcccatgcctgtaatcccagcactttgggaggctgaggcgggtgaatcatgaggtcaggagttcgagactagcctgaccaacatggtgaaactatgtctctactaaaaatacaaaaaattagctgggtgtggtggtgggtgcctgtaatctcagctactcgggaggctgaggcaggagaattgcttgaacccgggaggcggaggttgcggtgagccgagatcgcgctactgcactccagcctgggtgacagtgtgaaactttgtctc

SEQ ID NO: 432595 - DNA, 4572 bp, Homo sapiens
  misc_feature (2021)..(2021): n is a, c, g, or t
  misc_feature (2481)..(2481): n is a, c, g, or t
  misc_feature (3026)..(3026): n is a, c, g, or t
  misc_feature (3563)..(3563): n is a, c, g, or t
  misc_feature (3816)..(3816): n is a, c, g, or t
atgtatatttattaattcacacacacgtaacgtatcgaccggggacgctttagaactacattaccatggacgagctgcgccgcgagctgccacccgaccaggctgagtactgcatcgcgcggatggccccctacaccggccccgactccgtgccaggtgctctggactacatgtccttctccacggcgctgtacggcgagagtgacctctaatccaccccgcccggccgccctcgtcttgtgcgccgtgccctgccttgcacctccgccgtcgcccatctcctgcctgggttcggtttcagctcccagcctccacccgggtgagctggggcccacgtggcatcgatcctccctgcccgcgaagtgacagtttacaaaattattttctgcaaaaaagaaaaaaaagttacgttaaaaaccaaaaaactacatattttattatagaaaaagtattttttctccaccagacaaatggaaaaaaagaggaaagattaactatttgcaccgaaatgtcttgttttgttgcgacataggaaaataaccaagcacaaagttatattccatcctttttactgatttttttttcttctatctgttccatctgctgtattcatttctccaatctcatgtccattttggtgtgggagtcggggtagggggtactcttgtcaaaaggcacattggtgcatgtgtgtttgctagctcacttgtccatgaaaatattttatgatattaaagaaaatcttttgaaatggctgttttttaaggaagagaatttatgtggcttctcatttttaaatcccctcagaggtgtgactagtctctttatcagcacacacttaaaaaatttttaatattgtctattaaaaataggacaaacttggagagtatggacaactttgatattgcttggcacagatggtattaaaaaaaccacactcctatgacagctctttgcctgctccttgcttgatgttttctggaagtgtgtgtggggtcaaggatggtgtggggcacctgtatctactcctaatgtttttgaccctgctgtgttcaatcttcttacacttcagtttcttcattttaaaaaggaaaaggtaatttcttcacagtctcctatgagttggacagaaagtcatggatgtgtaaaggacttcttgatgataagccccaccttcatttttccacggcaccaaacagccctgtgacatctgcattcaccccactcgtttttatttttgctgcagtgaacagcttgagttgtctcttaagagtcatctcatcccttgctattcgagatgacccacagatggcagctgttcagcatcacctgggagttcattggaaatacagaatctcaggccccacccctgaatgtcgaatactgtgtgtactgctctagcttctccagagtaaaagatagtctctataggatgccgtctgctctggcaccaggccccctgagcccatgccttttatctgacgtttgttttgcaacccattacatcacttgcccccgggcatcctttaaatttcatccttggctaattctcattgtaaccggttccagcttgctttaaatgattgggtggatggaattctccccattgacaattgacaggtggcaattaattgttcatgcctcagtgggatgaatccattacatctctttcctgcctaatatttttatctacctccgacttttttgtagggactttgttgatatcctcatgaaggcccatctctcctctctctggcttgtccatcccttgacaaaaccttaatgactgttctgggtaccaaatctgtggcaggagtgtgacccagctgccacccacctcctccatcactggaccagctcatagttgtcccttggacatggggttagtgcccaacaagtgtagtcatttggctaagtgagttactaggagggagaacagattcaatttcctgaggtggtgaggagagactgaaggctttgccagttctttggcctatgccaggctctctggtacttctgcnggtggcatgagctgtgtgaagcgcctctaaatttaaggctccaaagctctccaacacaaacaagactttagggtctgcgttatggacgccaagggaagaaatacaacctcaacatcagtgcctgtcaagggaggcagatgtgagctcgtctgcctgccaccggccatttggactaccttgggcaagtgacctccttaaatggggccgataatgttgctttccttctctccctggcacacagtaggcatttaataagtggcaatgggtattgtccctagagttgtataaaaaaccagctctagcagggcgtggtggtgcatgtccgtagtgccagctgcttgggaggctgaggtgaggatcacttgagcccaggagttttgagtccagcctgaacaacataacaagaccctgtctgtaaaatgggggaaaaagtcagctgtgctttgttatgctgtttaanatattcttaaagaaaaaggcctgattacagaaaaataccattaaggggaaccctctttcagtctctgtgctgagggtagtagtaggctgagtaatggtcccccaagatatccatttccgagtccctggaacccatgattgttaattcatatgacaaataagactttgcagatgggattaagaatcttgaggtggggagattggttctggattatctgggtgggtccttagggagcaggcatgtcggcatcagaggaaatgtgacgacagaagcaggggttggagtgatgtgaggccacaagccaatgaatgcggacagcctctagaagctagaaaagccagggaaacagattctccctgagagcctccagatagaatgcaggtctacagacccattttgggtctctattctccagaacttgagataatacgtttgtgttgttttaagccacttcatttgtgataatttgttacagcaaccataggaagctaatatgtgctccatcgttcatgccctggggagctggctgcctccctgacgtcagngacccgtggtataggcatgacctgctggagaaactgccctagcttcaaaggcctgagtgtgcaacattggcccttgggaggctgccttagctgctggacttgatctcctaagccttaaaagcgccattcatggagaggggagaaggaagcttccaagttctgagagcccaaaaaggccagaatagctgggcccagcaggagatgtaaggcttcctgttgtctcagatgcaggagccagagggcagcccagctccaggtaggcaccagccacagaactggaaagcccttgggaggctgaggtcctgccttctctatagcttatcttggcccctctctgtgtgtcagcctccctcctctccctgcagcccagctttgggtgcacacctccccatggtggcagaggtcaattccacagtgcctagtgttgacattttcttgacacgagactagtcccaattccaaatgtccaggaggcacttggcccagtctgacctggtgtgataaagtgatgcctgtcagtggataaggctggggccnttgctcatgggctagattgggtatcacctttaggataacccaaaaggtggcctcataagaactgtctcagttcatcaattttcacattttagcatctctgatattgagatagagcatacaattgatctcactttaggattaatggtgtcttacaattgctgttggccagatagcagtcatgacttagtgtcattgcctgcctatttgagacaggaatgtgagtcctgtcttttgtctcaaaaacttccattantcttacctcctggtaagatcaagctccagtatcaaaagttgcatagtgggtacccagagagaaaatgctgatgatcatagtgtagtactggcttacgaaatgctagccagggtgcaatggctcatgcctataatcccagcactttggcaggctgaggtgggcggatcgctcgagcccagaagttcaagaccagcctgagcaacatgatgaaactccgtctttactaaaaatacaaaattagccggatgtggtgccgcatgcctgtaatcccagctacttgggtggctgaggcaggcgaattacttcaacctgggagatggaggttgcagtgagccgagatcatgctgaaggaaggaagggagtaagggagggagggaggcgagagagagagaaagaaaaagaaatgctgcattttcagttctattgatggcacagcaggcaacggtgtgtgaaaaacaggcacttaaagactctgggccgggcacggtggcccatgcctgtaatcccagcactttgggaggctgaggcgggtgaatcatgaggtcaggagttcgagactagcctgaccaacatggtgaaactatgtctctactaaaaatacaaaaaattagctgggtgtggtggtgggtgcctgtaatctcagctactcgggaggctgaggcaggagaattgcttgaacccgggaggcggaggttgcggtgagccgagatcgcgctactgcactccagcctgggtgacagtgtgaaactttgtctc

SEQ ID NO: 432596 - DNA, 1717 bp, Homo sapiens
agcgctagtgtgtccgcctagttcaagtgtgcgtggagattaggtccaagcgcccgcccagaggcaggcagtccgcgagcccagccgccgctgtcgccgccagtagcagccttcgccagcagcgccgcggcggaaccgggcgcaggggagcgagcccggccccgccagcccagcccagcccagccctactccctccccacgccagggcagcagccgttgctcagagagaaggtggaggaagaaatccagaccctagcacgcgcgcaccatcatggaccattatgattctcagcaaaccaacgattacatgcagccagaagaggactgggaccgggacctgctcctggacccggcctgggagaagcagcagagaaagacattcacggcatggtgtaactcccacctccggaaggcggggacacagatcgagaacatcgaagaggacttccgggatggcctgaagctcatgctgctgctggaggtcatctcaggtgaacgcttggccaagccagagcgaggcaagatgagagtgcacaagatctccaacgtcaacaaggccctggatttcatagccagcaaaggcgtcaaactggtgtccatcggagccgaagaaatcgtggatgggaatgtgaagatgaccctgggcatgatctggaccatcatcctgcgctttgccatccaggacatctccgtggaagagacttcagccaaggaagggctgctcctgtggtgtcagagaaagacagccccttacaaaaatgtcaacatccagaacttccacataagctggaaggatggcctcggcttctgtgctttgatccaccgacaccggcccgagctgattgactacgggaagctgcggaaggatgatccactcacaaatctgaatacggcttttgacgtggcagagaagtacctggacatccccaagatgctggatgccgaagacatcgttggaactgcccgaccggatgagaaagccatcatgacttacgtgtctagcttctaccacgccttctctggagcccagaaggcggagacagcagccaatcgcatctgcaaggtgttggccgtcaaccaggagaacgagcagcttatggaagactacgagaagctggccagtgatctgttggagtggatccgccgcacaatcccgtggctggagaaccgggtgcccgagaacaccatgcatgccatgcaacagaagctggaggacttccgggactaccggcgcctgcacaagccgcccaaggtgcaggagaagtgccagctggagatcaacttcaacacgctgcagaccaagctgcggctcagcaaccggcctgccttcatgccctctgagggcaggatggtctcgggtgagcactgggggtgagcctgggcccccagactggactgcctccacctctgagctgctcctagttgtggtcaaattcagctttatgggggtgcggatgggcgtgtttgcttctacctacatacactgctccagaagtcacttcccccttccagttaccacccaggctcaatcccaaactcggccatgtggggcagccccctctgcccagaccattctgggtcaggcttgcccttccagacccctgagcatctactccagacctccctctcacaaaaaatcatccctatgaacacaatgcttttgacaccctgaaccaaacagggcataattgaatcgcagtcaagttgatttctactt

SEQ ID NO: 432597 - DNA, 1404 bp, Homo sapiens
agcgctagtgtgtccgcctagttcaagtgtgcgtggagattaggtccaagcgcccgcccagaggcaggcagtccgcgagcccagccgccgctgtcgccgccagtagcagccttcgccagcagcgccgcggcggaaccgggcgcaggggagcgagcccggccccgccagcccagcccagcccagccctactccctccccacgccagggcagcagccgttgctcagagagaaggtggaggaagaaatccagaccctagcacgcgcgcaccatcatggaccattatgattctcagcaaaccaacgattacatgcagccagaagaggactgggaccgggacctgctcctggacccggcctgggagaagcagcagagaaagacattcacggcatggtgtaactcccacctccggaaggcggggacacagatcgagaacatcgaagaggacttccgggatggcctgaagctcatgctgctgctggaggtcatctcaggtgaacgcttggccaagccagagcgaggcaagatgagagtgcacaagatctccaacgtcaacaaggccctggatttcatagccagcaaaggcgtcaaactggtgtccatcggagccgaagaaatcgtggatgggaatgtgaagatgaccctgggcatgatctggaccatcatcctgcgctttgccatccaggacatctccgtggaagagacttcagccaaggaagggctgctcctgtggtgtcagagaaagacagccccttacaaaaatgtcaacatccagaacttccacataagctggaaggatggcctcggcttctgtgctttgatccaccgacaccggcccgagctgattgactacgggaagctgcggaaggatgatccactcacaaatctgaatacggcttttgacgtggcagagaagtacctggacatccccaagatgctggatgccgaagacatcgttggaactgcccgaccggatgagaaagccatcatgacttacgtgtctagcttctaccacgccttctctggagcccagaaggcggagacagcagccaatcgcatctgcaaggtgttggccgtcaaccaggagaacgagcagcttatggaagactacgagaagctggccagtgatctgttggagtggatccgccgcacaatcccgtggctggagaaccgggtgcccgagaacaccatgcatgccatgcaacagaagctggaggacttccgggactaccggcgcctgcacaagccgcccaaggtgcaggagaagtgccagctggagatcaacttcaacacgctgcagaccaagctgcggctcagcaagcgcatcacccgttcgaaacgggtgatgcgggttgccgaaaggcacagagcaacagaggaatcctgaccctgaagtacccgatagaa

SEQ ID NO: 432598 - DNA, 5280 bp, Homo sapiens
  misc_feature (2729)..(2729): n is a, c, g, or t
  misc_feature (3189)..(3189): n is a, c, g, or t
  misc_feature (3734)..(3734): n is a, c, g, or t
  misc_feature (4271)..(4271): n is a, c, g, or t
  misc_feature (4524)..(4524): n is a, c, g, or t
agcgctagtgtgtccgcctagttcaagtgtgcgtggagattaggtccaagcgcccgcccagaggcaggcagtccgcgagcccagccgccgctgtcgccgccagtagcagccttcgccagcagcgccgcggcggaaccgggcgcaggggagcgagcccggccccgccagcccagcccagcccagccctactccctccccacgccagggcagcagccgttgctcagagagaaggtggaggaagaaatccagaccctagcacgcgcgcaccatcatggaccattatgattctcagcaaaccaacgattacatgcagccagaagaggactgggaccgggacctgctcctggacccggcctgggagaagcagcagagaaagacattcacggcatggtgtaactcccacctccggaaggcggggacacagatcgagaacatcgaagaggacttccgggatggcctgaagctcatgctgctgctggaggtcatctcaggtgaacgcttggccaagccagagcgaggcaagatgagagtgcacaagatctccaacgtcaacaaggccctggatttcatagccagcaaaggcgtcaaactggtgtccatcggagccgaagaaatcgtggatgggaatgtgaagatgaccctgggcatgatctggaccatcatcctgcgctttgccatccacaatgaggtgtccaagattgtccagacctaccacgtcaatatggcgggcaccaacccctacacaaccatcacgcctcaggagatcaatggcaaatgggaccacgtgcggcagctggtgcctcggagggaccaagctctgacggaggagcatgcccgacagcagcacaatgagaggctacgcaagcagtttggagcccaggccaatgtcatcgggccctggatccagaccaagatggaggagatcgggaggatctccattgagatgcatgggaccctggaggaccagctcagccacctgcggcagtatgagaagagcatcgtcaactacaagccaaagattgatcaggtgagctggggcccacgtggcatcgatcctccctgcccgcgaagtgacagtttacaaaattattttctgcaaaaaagaaaaaaaagttacgttaaaaaccaaaaaactacatattttattatagaaaaagtattttttctccaccagacaaatggaaaaaaagaggaaagattaactatttgcaccgaaatgtcttgttttgttgcgacataggaaaataaccaagcacaaagttatattccatcctttttactgatttttttttcttctatctgttccatctgctgtattcatttctccaatctcatgtccattttggtgtgggagtcggggtagggggtactcttgtcaaaaggcacattggtgcatgtgtgtttgctagctcacttgtccatgaaaatattttatgatattaaagaaaatcttttgaaatggctgttttttaaggaagagaatttatgtggcttctcatttttaaatcccctcagaggtgtgactagtctctttatcagcacacacttaaaaaatttttaatattgtctattaaaaataggacaaacttggagagtatggacaactttgatattgcttggcacagatggtattaaaaaaaccacactcctatgacagctctttgcctgctccttgcttgatgttttctggaagtgtgtgtggggtcaaggatggtgtggggcacctgtatctactcctaatgtttttgaccctgctgtgttcaatcttcttacacttcagtttcttcattttaaaaaggaaaaggtaatttcttcacagtctcctatgagttggacagaaagtcatggatgtgtaaaggacttcttgatgataagccccaccttcatttttccacggcaccaaacagccctgtgacatctgcattcaccccactcgtttttatttttgctgcagtgaacagcttgagttgtctcttaagagtcatctcatcccttgctattcgagatgacccacagatggcagctgttcagcatcacctgggagttcattggaaatacagaatctcaggccccacccctgaatgtcgaatactgtgtgtactgctctagcttctccagagtaaaagatagtctctataggatgccgtctgctctggcaccaggccccctgagcccatgccttttatctgacgtttgttttgcaacccattacatcacttgcccccgggcatcctttaaatttcatccttggctaattctcattgtaaccggttccagcttgctttaaatgattgggtggatggaattctccccattgacaattgacaggtggcaattaattgttcatgcctcagtgggatgaatccattacatctctttcctgcctaatatttttatctacctccgacttttttgtagggactttgttgatatcctcatgaaggcccatctctcctctctctggcttgtccatcccttgacaaaaccttaatgactgttctgggtaccaaatctgtggcaggagtgtgacccagctgccacccacctcctccatcactggaccagctcatagttgtcccttggacatggggttagtgcccaacaagtgtagtcatttggctaagtgagttactaggagggagaacagattcaatttcctgaggtggtgaggagagactgaaggctttgccagttctttggcctatgccaggctctctggtacttctgcnggtggcatgagctgtgtgaagcgcctctaaatttaaggctccaaagctctccaacacaaacaagactttagggtctgcgttatggacgccaagggaagaaatacaacctcaacatcagtgcctgtcaagggaggcagatgtgagctcgtctgcctgccaccggccatttggactaccttgggcaagtgacctccttaaatggggccgataatgttgctttccttctctccctggcacacagtaggcatttaataagtggcaatgggtattgtccctagagttgtataaaaaaccagctctagcagggcgtggtggtgcatgtccgtagtgccagctgcttgggaggctgaggtgaggatcacttgagcccaggagttttgagtccagcctgaacaacataacaagaccctgtctgtaaaatgggggaaaaagtcagctgtgctttgttatgctgtttaanatattcttaaagaaaaaggcctgattacagaaaaataccattaaggggaaccctctttcagtctctgtgctgagggtagtagtaggctgagtaatggtcccccaagatatccatttccgagtccctggaacccatgattgttaattcatatgacaaataagactttgcagatgggattaagaatcttgaggtggggagattggttctggattatctgggtgggtccttagggagcaggcatgtcggcatcagaggaaatgtgacgacagaagcaggggttggagtgatgtgaggccacaagccaatgaatgcggacagcctctagaagctagaaaagccagggaaacagattctccctgagagcctccagatagaatgcaggtctacagacccattttgggtctctattctccagaacttgagataatacgtttgtgttgttttaagccacttcatttgtgataatttgttacagcaaccataggaagctaatatgtgctccatcgttcatgccctggggagctggctgcctccctgacgtcagngacccgtggtataggcatgacctgctggagaaactgccctagcttcaaaggcctgagtgtgcaacattggcccttgggaggctgccttagctgctggacttgatctcctaagccttaaaagcgccattcatggagaggggagaaggaagcttccaagttctgagagcccaaaaaggccagaatagctgggcccagcaggagatgtaaggcttcctgttgtctcagatgcaggagccagagggcagcccagctccaggtaggcaccagccacagaactggaaagcccttgggaggctgaggtcctgccttctctatagcttatcttggcccctctctgtgtgtcagcctccctcctctccctgcagcccagctttgggtgcacacctccccatggtggcagaggtcaattccacagtgcctagtgttgacattttcttgacacgagactagtcccaattccaaatgtccaggaggcacttggcccagtctgacctggtgtgataaagtgatgcctgtcagtggataaggctggggccnttgctcatgggctagattgggtatcacctttaggataacccaaaaggtggcctcataagaactgtctcagttcatcaattttcacattttagcatctctgatattgagatagagcatacaattgatctcactttaggattaatggtgtcttacaattgctgttggccagatagcagtcatgacttagtgtcattgcctgcctatttgagacaggaatgtgagtcctgtcttttgtctcaaaaacttccattantcttacctcctggtaagatcaagctccagtatcaaaagttgcatagtgggtacccagagagaaaatgctgatgatcatagtgtagtactggcttacgaaatgctagccagggtgcaatggctcatgcctataatcccagcactttggcaggctgaggtgggcggatcgctcgagcccagaagttcaagaccagcctgagcaacatgatgaaactccgtctttactaaaaatacaaaattagccggatgtggtgccgcatgcctgtaatcccagctacttgggtggctgaggcaggcgaattacttcaacctgggagatggaggttgcagtgagccgagatcatgctgaaggaaggaagggagtaagggagggagggaggcgagagagagagaaagaaaaagaaatgctgcattttcagttctattgatggcacagcaggcaacggtgtgtgaaaaacaggcacttaaagactctgggccgggcacggtggcccatgcctgtaatcccagcactttgggaggctgaggcgggtgaatcatgaggtcaggagttcgagactagcctgaccaacatggtgaaactatgtctctactaaaaatacaaaaaattagctgggtgtggtggtgggtgcctgtaatctcagctactcgggaggctgaggcaggagaattgcttgaacccgggaggcggaggttgcggtgagccgagatcgcgctactgcactccagcctgggtgacagtgtgaaactttgtctc

SEQ ID NO: 432599 - DNA, 4496 bp, Homo sapiens
  misc_feature (1945)..(1945): n is a, c, g, or t
  misc_feature (2405)..(2405): n is a, c, g, or t
  misc_feature (2950)..(2950): n is a, c, g, or t
  misc_feature (3487)..(3487): n is a, c, g, or t
  misc_feature (3740)..(3740): n is a, c, g, or t
aggacatgtagtccagagcacctggcacggagtcggggccggtgtagggggccatccgcgcgatgcagtactcagcctgggtgctctggactacatgtccttctccacggcgctgtacggcgagagtgacctctaatccaccccgcccggccgccctcgtcttgtgcgccgtgccctgccttgcacctccgccgtcgcccatctcctgcctgggttcggtttcagctcccagcctccacccgggtgagctggggcccacgtggcatcgatcctccctgcccgcgaagtgacagtttacaaaattattttctgcaaaaaagaaaaaaaagttacgttaaaaaccaaaaaactacatattttattatagaaaaagtattttttctccaccagacaaatggaaaaaaagaggaaagattaactatttgcaccgaaatgtcttgttttgttgcgacataggaaaataaccaagcacaaagttatattccatcctttttactgatttttttttcttctatctgttccatctgctgtattcatttctccaatctcatgtccattttggtgtgggagtcggggtagggggtactcttgtcaaaaggcacattggtgcatgtgtgtttgctagctcacttgtccatgaaaatattttatgatattaaagaaaatcttttgaaatggctgttttttaaggaagagaatttatgtggcttctcatttttaaatcccctcagaggtgtgactagtctctttatcagcacacacttaaaaaatttttaatattgtctattaaaaataggacaaacttggagagtatggacaactttgatattgcttggcacagatggtattaaaaaaaccacactcctatgacagctctttgcctgctccttgcttgatgttttctggaagtgtgtgtggggtcaaggatggtgtggggcacctgtatctactcctaatgtttttgaccctgctgtgttcaatcttcttacacttcagtttcttcattttaaaaaggaaaaggtaatttcttcacagtctcctatgagttggacagaaagtcatggatgtgtaaaggacttcttgatgataagccccaccttcatttttccacggcaccaaacagccctgtgacatctgcattcaccccactcgtttttatttttgctgcagtgaacagcttgagttgtctcttaagagtcatctcatcccttgctattcgagatgacccacagatggcagctgttcagcatcacctgggagttcattggaaatacagaatctcaggccccacccctgaatgtcgaatactgtgtgtactgctctagcttctccagagtaaaagatagtctctataggatgccgtctgctctggcaccaggccccctgagcccatgccttttatctgacgtttgttttgcaacccattacatcacttgcccccgggcatcctttaaatttcatccttggctaattctcattgtaaccggttccagcttgctttaaatgattgggtggatggaattctccccattgacaattgacaggtggcaattaattgttcatgcctcagtgggatgaatccattacatctctttcctgcctaatatttttatctacctccgacttttttgtagggactttgttgatatcctcatgaaggcccatctctcctctctctggcttgtccatcccttgacaaaaccttaatgactgttctgggtaccaaatctgtggcaggagtgtgacccagctgccacccacctcctccatcactggaccagctcatagttgtcccttggacatggggttagtgcccaacaagtgtagtcatttggctaagtgagttactaggagggagaacagattcaatttcctgaggtggtgaggagagactgaaggctttgccagttctttggcctatgccaggctctctggtacttctgcnggtggcatgagctgtgtgaagcgcctctaaatttaaggctccaaagctctccaacacaaacaagactttagggtctgcgttatggacgccaagggaagaaatacaacctcaacatcagtgcctgtcaagggaggcagatgtgagctcgtctgcctgccaccggccatttggactaccttgggcaagtgacctccttaaatggggccgataatgttgctttccttctctccctggcacacagtaggcatttaataagtggcaatgggtattgtccctagagttgtataaaaaaccagctctagcagggcgtggtggtgcatgtccgtagtgccagctgcttgggaggctgaggtgaggatcacttgagcccaggagttttgagtccagcctgaacaacataacaagaccctgtctgtaaaatgggggaaaaagtcagctgtgctttgttatgctgtttaanatattcttaaagaaaaaggcctgattacagaaaaataccattaaggggaaccctctttcagtctctgtgctgagggtagtagtaggctgagtaatggtcccccaagatatccatttccgagtccctggaacccatgattgttaattcatatgacaaataagactttgcagatgggattaagaatcttgaggtggggagattggttctggattatctgggtgggtccttagggagcaggcatgtcggcatcagaggaaatgtgacgacagaagcaggggttggagtgatgtgaggccacaagccaatgaatgcggacagcctctagaagctagaaaagccagggaaacagattctccctgagagcctccagatagaatgcaggtctacagacccattttgggtctctattctccagaacttgagataatacgtttgtgttgttttaagccacttcatttgtgataatttgttacagcaaccataggaagctaatatgtgctccatcgttcatgccctggggagctggctgcctccctgacgtcagngacccgtggtataggcatgacctgctggagaaactgccctagcttcaaaggcctgagtgtgcaacattggcccttgggaggctgccttagctgctggacttgatctcctaagccttaaaagcgccattcatggagaggggagaaggaagcttccaagttctgagagcccaaaaaggccagaatagctgggcccagcaggagatgtaaggcttcctgttgtctcagatgcaggagccagagggcagcccagctccaggtaggcaccagccacagaactggaaagcccttgggaggctgaggtcctgccttctctatagcttatcttggcccctctctgtgtgtcagcctccctcctctccctgcagcccagctttgggtgcacacctccccatggtggcagaggtcaattccacagtgcctagtgttgacattttcttgacacgagactagtcccaattccaaatgtccaggaggcacttggcccagtctgacctggtgtgataaagtgatgcctgtcagtggataaggctggggccnttgctcatgggctagattgggtatcacctttaggataacccaaaaggtggcctcataagaactgtctcagttcatcaattttcacattttagcatctctgatattgagatagagcatacaattgatctcactttaggattaatggtgtcttacaattgctgttggccagatagcagtcatgacttagtgtcattgcctgcctatttgagacaggaatgtgagtcctgtcttttgtctcaaaaacttccattantcttacctcctggtaagatcaagctccagtatcaaaagttgcatagtgggtacccagagagaaaatgctgatgatcatagtgtagtactggcttacgaaatgctagccagggtgcaatggctcatgcctataatcccagcactttggcaggctgaggtgggcggatcgctcgagcccagaagttcaagaccagcctgagcaacatgatgaaactccgtctttactaaaaatacaaaattagccggatgtggtgccgcatgcctgtaatcccagctacttgggtggctgaggcaggcgaattacttcaacctgggagatggaggttgcagtgagccgagatcatgctgaaggaaggaagggagtaagggagggagggaggcgagagagagagaaagaaaaagaaatgctgcattttcagttctattgatggcacagcaggcaacggtgtgtgaaaaacaggcacttaaagactctgggccgggcacggtggcccatgcctgtaatcccagcactttgggaggctgaggcgggtgaatcatgaggtcaggagttcgagactagcctgaccaacatggtgaaactatgtctctactaaaaatacaaaaaattagctgggtgtggtggtgggtgcctgtaatctcagctactcgggaggctgaggcaggagaattgcttgaacccgggaggcggaggttgcggtgagccgagatcgcgctactgcactccagcctgggtgacagtgtgaaactttgtctc

SEQ ID NO: 432600 - DNA, 4694 bp, Homo sapiens
  misc_feature (2143)..(2143): n is a, c, g, or t
  misc_feature (2603)..(2603): n is a, c, g, or t
  misc_feature (3148)..(3148): n is a, c, g, or t
  misc_feature (3685)..(3685): n is a, c, g, or t
  misc_feature (3938)..(3938): n is a, c, g, or t
atcctcccgatctcctccatcttggtctggatccagggcccgatggaggagatcgggaggatctccattgagatgcatgggaccctggaggaccagctcagccacctgcggcagtatgagaagagcatcgtcaactacaagccaaagattgatcagctggagggcgaccaccagctcatccaggaggcgctcatcttcgacaacaagcacaccaactacaccatggagcacatccgtgtgggctgggagcagctgctcaccaccatcgccaggaccatcaatgaggtagagaaccagatcctgacccgggatgccaagggcatcagccaggagcagatgaatgagttccgggcctccttcaaccactttgaccggaagaagacaggcatgatggacacggatgatttccgcgcctgcctgatctccatgggttacaacatggtgagctggggcccacgtggcatcgatcctccctgcccgcgaagtgacagtttacaaaattattttctgcaaaaaagaaaaaaaagttacgttaaaaaccaaaaaactacatattttattatagaaaaagtattttttctccaccagacaaatggaaaaaaagaggaaagattaactatttgcaccgaaatgtcttgttttgttgcgacataggaaaataaccaagcacaaagttatattccatcctttttactgatttttttttcttctatctgttccatctgctgtattcatttctccaatctcatgtccattttggtgtgggagtcggggtagggggtactcttgtcaaaaggcacattggtgcatgtgtgtttgctagctcacttgtccatgaaaatattttatgatattaaagaaaatcttttgaaatggctgttttttaaggaagagaatttatgtggcttctcatttttaaatcccctcagaggtgtgactagtctctttatcagcacacacttaaaaaatttttaatattgtctattaaaaataggacaaacttggagagtatggacaactttgatattgcttggcacagatggtattaaaaaaaccacactcctatgacagctctttgcctgctccttgcttgatgttttctggaagtgtgtgtggggtcaaggatggtgtggggcacctgtatctactcctaatgtttttgaccctgctgtgttcaatcttcttacacttcagtttcttcattttaaaaaggaaaaggtaatttcttcacagtctcctatgagttggacagaaagtcatggatgtgtaaaggacttcttgatgataagccccaccttcatttttccacggcaccaaacagccctgtgacatctgcattcaccccactcgtttttatttttgctgcagtgaacagcttgagttgtctcttaagagtcatctcatcccttgctattcgagatgacccacagatggcagctgttcagcatcacctgggagttcattggaaatacagaatctcaggccccacccctgaatgtcgaatactgtgtgtactgctctagcttctccagagtaaaagatagtctctataggatgccgtctgctctggcaccaggccccctgagcccatgccttttatctgacgtttgttttgcaacccattacatcacttgcccccgggcatcctttaaatttcatccttggctaattctcattgtaaccggttccagcttgctttaaatgattgggtggatggaattctccccattgacaattgacaggtggcaattaattgttcatgcctcagtgggatgaatccattacatctctttcctgcctaatatttttatctacctccgacttttttgtagggactttgttgatatcctcatgaaggcccatctctcctctctctggcttgtccatcccttgacaaaaccttaatgactgttctgggtaccaaatctgtggcaggagtgtgacccagctgccacccacctcctccatcactggaccagctcatagttgtcccttggacatggggttagtgcccaacaagtgtagtcatttggctaagtgagttactaggagggagaacagattcaatttcctgaggtggtgaggagagactgaaggctttgccagttctttggcctatgccaggctctctggtacttctgcnggtggcatgagctgtgtgaagcgcctctaaatttaaggctccaaagctctccaacacaaacaagactttagggtctgcgttatggacgccaagggaagaaatacaacctcaacatcagtgcctgtcaagggaggcagatgtgagctcgtctgcctgccaccggccatttggactaccttgggcaagtgacctccttaaatggggccgataatgttgctttccttctctccctggcacacagtaggcatttaataagtggcaatgggtattgtccctagagttgtataaaaaaccagctctagcagggcgtggtggtgcatgtccgtagtgccagctgcttgggaggctgaggtgaggatcacttgagcccaggagttttgagtccagcctgaacaacataacaagaccctgtctgtaaaatgggggaaaaagtcagctgtgctttgttatgctgtttaanatattcttaaagaaaaaggcctgattacagaaaaataccattaaggggaaccctctttcagtctctgtgctgagggtagtagtaggctgagtaatggtcccccaagatatccatttccgagtccctggaacccatgattgttaattcatatgacaaataagactttgcagatgggattaagaatcttgaggtggggagattggttctggattatctgggtgggtccttagggagcaggcatgtcggcatcagaggaaatgtgacgacagaagcaggggttggagtgatgtgaggccacaagccaatgaatgcggacagcctctagaagctagaaaagccagggaaacagattctccctgagagcctccagatagaatgcaggtctacagacccattttgggtctctattctccagaacttgagataatacgtttgtgttgttttaagccacttcatttgtgataatttgttacagcaaccataggaagctaatatgtgctccatcgttcatgccctggggagctggctgcctccctgacgtcagngacccgtggtataggcatgacctgctggagaaactgccctagcttcaaaggcctgagtgtgcaacattggcccttgggaggctgccttagctgctggacttgatctcctaagccttaaaagcgccattcatggagaggggagaaggaagcttccaagttctgagagcccaaaaaggccagaatagctgggcccagcaggagatgtaaggcttcctgttgtctcagatgcaggagccagagggcagcccagctccaggtaggcaccagccacagaactggaaagcccttgggaggctgaggtcctgccttctctatagcttatcttggcccctctctgtgtgtcagcctccctcctctccctgcagcccagctttgggtgcacacctccccatggtggcagaggtcaattccacagtgcctagtgttgacattttcttgacacgagactagtcccaattccaaatgtccaggaggcacttggcccagtctgacctggtgtgataaagtgatgcctgtcagtggataaggctggggccnttgctcatgggctagattgggtatcacctttaggataacccaaaaggtggcctcataagaactgtctcagttcatcaattttcacattttagcatctctgatattgagatagagcatacaattgatctcactttaggattaatggtgtcttacaattgctgttggccagatagcagtcatgacttagtgtcattgcctgcctatttgagacaggaatgtgagtcctgtcttttgtctcaaaaacttccattantcttacctcctggtaagatcaagctccagtatcaaaagttgcatagtgggtacccagagagaaaatgctgatgatcatagtgtagtactggcttacgaaatgctagccagggtgcaatggctcatgcctataatcccagcactttggcaggctgaggtgggcggatcgctcgagcccagaagttcaagaccagcctgagcaacatgatgaaactccgtctttactaaaaatacaaaattagccggatgtggtgccgcatgcctgtaatcccagctacttgggtggctgaggcaggcgaattacttcaacctgggagatggaggttgcagtgagccgagatcatgctgaaggaaggaagggagtaagggagggagggaggcgagagagagagaaagaaaaagaaatgctgcattttcagttctattgatggcacagcaggcaacggtgtgtgaaaaacaggcacttaaagactctgggccgggcacggtggcccatgcctgtaatcccagcactttgggaggctgaggcgggtgaatcatgaggtcaggagttcgagactagcctgaccaacatggtgaaactatgtctctactaaaaatacaaaaaattagctgggtgtggtggtgggtgcctgtaatctcagctactcgggaggctgaggcaggagaattgcttgaacccgggaggcggaggttgcggtgagccgagatcgcgctactgcactccagcctgggtgacagtgtgaaactttgtctc

SEQ ID NO: 432601 - DNA, 1229 bp, Homo sapiens
agcgctagtgtgtccgcctagttcaagtgtgcgtggagattaggtccaagcgcccgcccagaggcaggcagtccgcgagcccagccgccgctgtcgccgccagtagcagccttcgccagcagcgccgcggcggaaccgggcgcaggggagcgagcccggccccgccagcccagcccagcccagccctactccctccccacgccagggcagcagccgttgctcagagagaaggtggaggaagaaatccagaccctagcacgcgcgcaccatcatggaccattatgattctcagcaaaccaacgattacatgcagccagaagaggactgggaccgggacctgctcctggacccggcctgggagaagcagcagagaaagacattcacggcatggtgtaactcccacctccggaaggcggggacacagatcgagaacatcgaagaggacttccgggatggcctgaagctcatgctgctgctggaggtcatctcaggtgaacgcttggccaagccagagcgaggcaagatgagagtgcacaagatctccaacgtcaacaaggccctggatttcatagccagcaaaggcgtcaaactggtgtccatcggagccgaagaaatcgtggatgggaatgtgaagatgaccctgggcatgatctggaccatcatcctgcgctttgccatccaggacatctccgtggaagagacttcagccaaggaagggctgctcctgtggtgtcagagaaagacagccccttacaaaaatgtcaacatccagaacttccacataagctggaaggatggcctcggcttctgtgctttgatccaccgacaccggcccgagctgattgactacgggaagctgcggaaggatgatccactcacaaatctgaatacggcttttgacgtggcagagaagtacctggacatccccaagatgctggatgccgaagacatcgttggaactgcccgaccggatgagaaagccatcatgacttacgtgtctagcttctaccacgccttctctggagcccagaagcggagacacagcagcacccaatcgcccatcttgccaaggcgtaggccggcaacgcagcgacgaccgagcagccctggaagacacgagaagacggcccggaccgggccggcgccccgccacacccggggcgagaccgcgccgacacccccgcccccgcgaagaccgggccgccacggcaacggcacagcgcaggcca

SEQ ID NO: 432602 - DNA, 461 bp, Homo sapiens
agctaattcttgaagtttgaaaaactgttgtctcaaaatttacacgtgtaacacgactagctctgaacagcttcccagcttgctttttctgtttctcaaataacttctcaaactctgtcaagggaatagacttgatggccagggctcctccttcagtagctgcagggttggcatcaaagggtcacagtggggcctcctgtgagccggcatccctccctccaccgagtcagccctctgacctcgctgcccatccccttccccatagagagacttcagccaaggaagggctgctcctgtggtgtcagagaaagacagccccttacaaaaatgtcaacatccagaacttccacataaggtgagtgctggggtctgaggggctctcacagaaccaggctgcctcccccgggagctcccagacccccttggctgggtcagtctcagctttagaacaaagtggagac

SEQ ID NO: 432603 - DNA, 169 bp, Homo sapiens
atgactcacccagtgtcaacgcccgttgccaaaagatctgtgaccagtgggacaatctgggggccctaactcagaagcgaagggaagctctggaggtgagaggtcccagagggagatctaggcccatatccggcagccctgtggtgccccttcctgcttcttgactctc

SEQ ID NO: 432604 - DNA, 389 bp, Homo sapiens
gtaggtatttcatccaatgataacagtgcttgttatatacctctgtggtgctgtttccatacctaagagcacccatgctaaaagtgtcttactaattaccagtgatggcctccttagggctgggatgggaactgagaatcatttgagggcttaataagtgattttggaggccccagtccccaccctatgggagcagagtgaggtggtctgacaaggtgcttccttcccggtgagcaggagatcgggaggatctccattgagatgcatgggaccctggaggaccagctcagccacctgcggcagtatgagaagagcatcgtcaactacaagccaaagattgatcagctggagggcgaccaccagctcatccaggaggcgctcatcttcga

SEQ ID NO: 432605 - DNA, 2941 bp, Homo sapiens
cgcaccacccccttggcgccgcgtctctcccgcgcccgcgcttccggccccgcgcgcgcccgcgcggaggactgtgggagcggcttccttggattccgcgcttggcaacggctcggcgtcgcgctttggccaaccgctgcgtcgtccctgggcccgaataactgtcgcccgcttccctcagcgtgaggtacaaatgatgcaaaatgtgcacctggctccagagacagatgaagatgatctttattccggctataatgactacaatccaatctatgatatcgaggaattggagaatgatgcagcttttcagcaagctgtgaggactagtcatggcagaagacctccaataactgctaaaatatcaagcacggcagttactagacctatagctactggatatgggtccaagacatctctggcatcatcaataggaagaccaatgacaggggctattcaggatggagttactagacccatgacagcagtgagagcagctggttttaccaaagcagctttgagaggctctgcatttgacccccttagtcagtcaaggggccctgcttcccctttggaagccaagaaaaaagatagcccagaggaaaaaataaagcaattagagaaggaagtaaatgagttggtagaagaaagctgtattgccaatagttgtggagacttaaaattggccttagaaaaggcaaaagatgcaggaagaaaagagagagtcctggtgagacagcgagaacaagttacaactccagaaaatatcaatttggatttaacttactcagttcttttcaatttggccagtcagtattcagttaatgaaatgtatgccgaagcacttaacacttatcaagttatagtcaaaaataagatgtttagcaatgcaggaatattgaaaatgaatatgggaaatatctatttaaagcaaagaaattattccaaagccattaaattctaccgaatggcattagaccaagttccaagtgtcaataagcaaatgaggattaaaataatgcagaatattggagttacatttattcaggctggtcagtattcagatgctattaattcatatgagcacataatgagcatggcaccaaatctgaaggcaggctacaacctaactatctgttattttgctattggagaccgagaaaaaatgaagaaggcattccaaaaattgattactgttccattagaaattgatgaagataaatatatttcaccaagtgatgatcctcatactaacttagtaactgaagctataaaaaatgatcacctcaggcaaatggaacgtgaaaggaaagccatggcagaaaaatatattatgacatctgcaaaactcattgctcctgtaattgaaacatcttttgctgcaggttatgattggtgcgtggaagtggtgaaagcttctcaatatgtagagctagccaatgatctggaaataaacaaagcagttacatacttgagacaaaaagactataaccaagctgtagagatcttaaaagtgttggaaaaaaaggacaatagagtgaaaagtgcagctgcaaccaatctctcagccctgtattatatgggaaaggattttgcacaagccagcagctatgcagatatagctgtgaactctgatagatataatccagcagctcttactaataaagggaatacagtttttgcaaatggtgattatgagaaggccgctgaattctataaagaggctctaagaaatgattcttcttgtactgaagcactttataatattggccttacctatgagaaactaaatcggctagatgaggctttggactgtttcctgaaacttcacgcaatcctacgaaacagtgccgaagttctttaccagatagcaaatatatatgaattaatggaaaatcccagtcaagctattgaatggctaatgcaggtggtcagtgttattccaaccgatcctcaagttttatctaagctaggagaattatatgatcgtgaaggagataaatctcaagcatttcaatattactatgagtcatataggtattttccttgtaatattgaagtcattgagtggcttggagcctattacattgacacccaattttgggaaaaagctattcagtactttgaaagagcttctcttatacagcctacacaagtgaaatggcagctgatggtagctagttgtttcagaagaagtggtaactaccaaaaagcattagatacttacaaagatactcacagaaaatttccagaaaatgtcgaatgtctgcgtttcttagttcgtctctgcacagatcttggattaaaagatgctcaagaatatgccagaaaactgaagaggttggaaaaaatgaaagaaataagggaacagcgcataaagtcaggcagagatggcagtgggggctcccgtggcaaaagagaaggaagtgctagcggtgatagtggccagaactatagtgccagtagtaaaggtgaacgactaagtgccagactcagagctttacctgggacaaatgaaccttatgaaagtagcagtaacaaagaaatagatgcctcctatgtggacccacttggccctcaaatagaacgaccaaaaactgcagccaagaaaaggatcgatgaggatgattttgctgatgaagaattaggagatgatttgcttccagaataatattcactttaatatttattaaaggaaagaaattgccttatgagatcatcctcatgttaaaccttggattaaatatctaacctgtaattattttttttcactgtcaaaacttaagtaagtgtattctattctgtatgtatgcatttaagttgtttttttcttttaaggaataaaaacaggtaaaactaatactttaggccagtgacttccttagctttttgaaaacattgacacacaggaagaaataaatttcataacacaacctagtacata

SEQ ID NO: 432606 - DNA, 551 bp, Homo sapiens
tgttccttgtggttctggcagcgtgaggacaggacacatggagagagaccctttaaacctccttccaaggaagtcagttctccctggtccagagattgcaaagtgtaattatttttcaggagaaaaatactatttgtctgcgtttcttagttcgtctctgcacagatcttggattaaaagatgctcaagaatatgccagaaaactgaagaggttggaaaaaatgaaagaaataagggaacagcgcataaagtcaggcagagatggcaggaggggatgacggaagtgcagtgtggaaaggtggccttccagttccagtgctcctcggacagcaccaacgggactggggtccagggtgggcagatccctgagctcattttctatgcctgaggtgcccggggaggctgcagcaggtcagcgagtgagtggaggggaagtcaagatgctaactgcttcttgacaccatgaaaggctgctcttaactttgtctctctttgacatgtagtcagctgaagcatgactgtgtagaacattttccacatcagacagtgtc

SEQ ID NO: 432607 - DNA, 3269 bp, Homo sapiens
cgcaccacccccttggcgccgcgtctctcccgcgcccgcgcttccggccccgcgcgcgcccgcgcggaggactgtgggagcggcttccttggattccgcgcttggcaacggctcggcgtcgcgctttggccaaccgctgcgtcgtccctgggcccgaataactgtcgcccgcttccctcagcgtgaggtgaagcacttcaaattgcctgatgaaagttgaatcaggaatgaagataaaagtacacaacaatgcagaaagcggtacttagcctcacaaagatggaaacattccaaaaacgtgaagtactgttgtcccaagattctttctaagcctaaaattacacttttactagtccgattttctggttgtgagttttttttgtttgttttttttttttcgagaaactgcagtaggcttcttggaagtagaccaagggtgtccaatctttggcttccctgggccacatcggaagaagaattgtcttgggccacacatgaaattcacaaacactaaggtacaaatgatgcaaaatgtgcacctggctccagagacagatgaagatgatctttattccggctataatgactacaatccaatctatgatatcgaggaattggagaatgatgcagcttttcagcaagctgtgaggactagtcatggcagaagacctccaataactgctaaaatatcaagcacggcagttactagacctatagctactggatatgggtccaagacatctctggcatcatcaataggaagaccaatgacaggggctattcaggatggagttactagacccatgacagcagtgagagcagctggttttaccaaagcagctttgagaggctctgcatttgacccccttagtcagtcaaggggccctgcttcccctttggaagccaagaaaaaagatagcccagaggaaaaaataaagcaattagagaaggaagtaaatgagttggtagaagaaagctgtattgccaatagttgtggagacttaaaattggccttagaaaaggcaaaagatgcaggaagaaaagagagagtcctggtgagacagcgagaacaagttacaactccagaaaatatcaatttggatttaacttactcagttcttttcaatttggccagtcagtattcagttaatgaaatgtatgccgaagcacttaacacttatcaagttatagtcaaaaataagatgtttagcaatgcaggaatattgaaaatgaatatgggaaatatctatttaaagcaaagaaattattccaaagccattaaattctaccgaatggcattagaccaagttccaagtgtcaataagcaaatgaggattaaaataatgcagaatattggagttacatttattcaggctggtcagtattcagatgctattaattcatatgagcacataatgagcatggcaccaaatctgaaggcaggctacaacctaactatctgttattttgctattggagaccgagaaaaaatgaagaaggcattccaaaaattgattactgttccattagaaattgatgaagataaatatatttcaccaagtgatgatcctcatactaacttagtaactgaagctataaaaaatgatcacctcaggcaaatggaacgtgaaaggaaagccatggcagaaaaatatattatgacatctgcaaaactcattgctcctgtaattgaaacatcttttgctgcaggttatgattggtgcgtggaagtggtgaaagcttctcaatatgtagagctagccaatgatctggaaataaacaaagcagttacatacttgagacaaaaagactataaccaagctgtagagatcttaaaagtgttggaaaaaaaggacaatagagtgaaaagtgcagctgcaaccaatctctcagccctgtattatatgggaaaggattttgcacaagccagcagctatgcagatatagctgtgaactctgatagatataatccagcagctcttactaataaagggaatacagtttttgcaaatggtgattatgagaaggccgctgaattctataaagaggctctaagaaatgattcttcttgtactgaagcactttataatattggccttacctatgagaaactaaatcggctagatgaggctttggactgtttcctgaaacttcacgcaatcctacgaaacagtgccgaagttctttaccagatagcaaatatatatgaattaatggaaaatcccagtcaagctattgaatggctaatgcaggtggtcagtgttattccaaccgatcctcaagttttatctaagctaggagaattatatgatcgtgaaggagataaatctcaagcatttcaatattactatgagtcatataggtattttccttgtaatattgaagtcattgagtggcttggagcctattacattgacacccaattttgggaaaaagctattcagtactttgaaagagcttctcttatacagcctacacaagtgaaatggcagctgatggtagctagttgtttcagaagaagtggtaactaccaaaaagcattagatacttacaaagatactcacagaaaatttccagaaaatgtcgaatgtctgcgtttcttagttcgtctctgcacagatcttggattaaaagatgctcaagaatatgccagaaaactgaagaggttggaaaaaatgaaagaaataagggaacagcgcataaagtcaggcagagatggcagtgggggctcccgtggcaaaagagaaggaagtgctagcggtgatagtggccagaactatagtgccagtagtaaaggtgaacgactaagtgccagactcagagctttacctgggacaaatgaaccttatgaaagtagcagtaacaaagaaatagatgcctcctatgtggacccacttggccctcaaatagaacgaccaaaaactgcagccaagaaaaggatcgatgaggatgattttgctgatgaagaattaggagatgatttgcttccagaataatattcactttaatatttattaaaggaaagaaattgccttatgagatcatcctcatgttaaaccttggattaaatatctaacctgtaattattttttttcactgtcaaaacttaagtaagtgtattctattctgtatgtatgcatttaagttgtttttttcttttaaggaataaaaacaggtaaaactaatactttaggccagtgacttccttagctttttgaaaacattgacacacaggaagaaataaatttcataacacaacctagtacata

SEQ ID NO: 432608 - DNA, 3170 bp, Homo sapiens
cgcaccacccccttggcgccgcgtctctcccgcgcccgcgcttccggccccgcgcgcgcccgcgcggaggactgtgggagcggcttccttggattccgcgcttggcaacggctcggcgtcgcgctttggccaaccgctgcgtcgtccctgggcccgaataactgtcgcccgcttccctcagcgtgaggtgaagcacttcaaattgcctgatgaaagttgaatcaggaatgaagataaaagtacacaacaatgcagaaagcggtacttagcctcacaaagatggaaacattccaaaaacgtgaaaaactgcagtaggcttcttggaagtagaccaagggtgtccaatctttggcttccctgggccacatcggaagaagaattgtcttgggccacacatgaaattcacaaacactaaggtacaaatgatgcaaaatgtgcacctggctccagagacagatgaagatgatctttattccggctataatgactacaatccaatctatgatatcgaggaattggagaatgatgcagcttttcagcaagctgtgaggactagtcatggcagaagacctccaataactgctaaaatatcaagcacggcagttactagacctatagctactggatatgggtccaagacatctctggcatcatcaataggaagaccaatgacaggggctattcaggatggagttactagacccatgacagcagtgagagcagctggttttaccaaagcagctttgagaggctctgcatttgacccccttagtcagtcaaggggccctgcttcccctttggaagccaagaaaaaagatagcccagaggaaaaaataaagcaattagagaaggaagtaaatgagttggtagaagaaagctgtattgccaatagttgtggagacttaaaattggccttagaaaaggcaaaagatgcaggaagaaaagagagagtcctggtgagacagcgagaacaagttacaactccagaaaatatcaatttggatttaacttactcagttcttttcaatttggccagtcagtattcagttaatgaaatgtatgccgaagcacttaacacttatcaagttatagtcaaaaataagatgtttagcaatgcaggaatattgaaaatgaatatgggaaatatctatttaaagcaaagaaattattccaaagccattaaattctaccgaatggcattagaccaagttccaagtgtcaataagcaaatgaggattaaaataatgcagaatattggagttacatttattcaggctggtcagtattcagatgctattaattcatatgagcacataatgagcatggcaccaaatctgaaggcaggctacaacctaactatctgttattttgctattggagaccgagaaaaaatgaagaaggcattccaaaaattgattactgttccattagaaattgatgaagataaatatatttcaccaagtgatgatcctcatactaacttagtaactgaagctataaaaaatgatcacctcaggcaaatggaacgtgaaaggaaagccatggcagaaaaatatattatgacatctgcaaaactcattgctcctgtaattgaaacatcttttgctgcaggttatgattggtgcgtggaagtggtgaaagcttctcaatatgtagagctagccaatgatctggaaataaacaaagcagttacatacttgagacaaaaagactataaccaagctgtagagatcttaaaagtgttggaaaaaaaggacaatagagtgaaaagtgcagctgcaaccaatctctcagccctgtattatatgggaaaggattttgcacaagccagcagctatgcagatatagctgtgaactctgatagatataatccagcagctcttactaataaagggaatacagtttttgcaaatggtgattatgagaaggccgctgaattctataaagaggctctaagaaatgattcttcttgtactgaagcactttataatattggccttacctatgagaaactaaatcggctagatgaggctttggactgtttcctgaaacttcacgcaatcctacgaaacagtgccgaagttctttaccagatagcaaatatatatgaattaatggaaaatcccagtcaagctattgaatggctaatgcaggtggtcagtgttattccaaccgatcctcaagttttatctaagctaggagaattatatgatcgtgaaggagataaatctcaagcatttcaatattactatgagtcatataggtattttccttgtaatattgaagtcattgagtggcttggagcctattacattgacacccaattttgggaaaaagctattcagtactttgaaagagcttctcttatacagcctacacaagtgaaatggcagctgatggtagctagttgtttcagaagaagtggtaactaccaaaaagcattagatacttacaaagatactcacagaaaatttccagaaaatgtcgaatgtctgcgtttcttagttcgtctctgcacagatcttggattaaaagatgctcaagaatatgccagaaaactgaagaggttggaaaaaatgaaagaaataagggaacagcgcataaagtcaggcagagatggcagtgggggctcccgtggcaaaagagaaggaagtgctagcggtgatagtggccagaactatagtgccagtagtaaaggtgaacgactaagtgccagactcagagctttacctgggacaaatgaaccttatgaaagtagcagtaacaaagaaatagatgcctcctatgtggacccacttggccctcaaatagaacgaccaaaaactgcagccaagaaaaggatcgatgaggatgattttgctgatgaagaattaggagatgatttgcttccagaataatattcactttaatatttattaaaggaaagaaattgccttatgagatcatcctcatgttaaaccttggattaaatatctaacctgtaattattttttttcactgtcaaaacttaagtaagtgtattctattctgtatgtatgcatttaagttgtttttttcttttaaggaataaaaacaggtaaaactaatactttaggccagtgacttccttagctttttgaaaacattgacacacaggaagaaataaatttcataacacaacctagtacata

SEQ ID NO: 432609 - DNA, 3167 bp, Homo sapiens
cgcaccacccccttggcgccgcgtctctcccgcgcccgcgcttccggccccgcgcgcgcccgcgcggaggactgtgggagcggcttccttggattccgcgcttggcaacggctcggcgtcgcgctttggccaaccgctgcgtcgtccctgggcccgaataactgtcgcccgcttccctcagcgtgaggtgaagcacttcaaattgcctgatgaaagttgaatcaggaatgaagataaaagtacacaacaatgcagaaagcggtacttagcctcacaaagatggaaacattccaaaaacgtgaagtactgttgtcccaagattctttctaagcctaaaattacacttttactagtccgattttctggttgtgagttttttttgtttgttttttttttttcgagaaactgcagtaggcttcttggaagtagaccaagggtgtccaatctttggcttccctgggccacatcggaagaagaattgtcttgggccacacatgaaattcacaaacactaaggtacaaatgatgcaaaatgtgcacctggctccagagacagatgaagatgatctttattccggctataatgactacaatccaatctatgatatcgaggaattggagaatgatgcagcttttcagcaagctgtgaggactagtcatggcagaagacctccaataactgctaaaatatcaagcacggcagttactagacctatagctactggatatgggtccaagacatctctggcatcatcaataggaagaccaatgacaggggctattcaggatggagttactagacccatgacagcagtgagagcagctggttttaccaaagcagctttgagaggctctgcatttgacccccttagtcagtcaaggggccctgcttcccctttggaagccaagaaaaaagatagcccagaggaaaaaataaagcaattagagaaggaagtaaatgagttggtagaagaaagctgtattgccaatagttgtggagacttaaaattggccttagaaaaggcaaaagatgcaggaagaaaagagagagtcctggtgagacagcgagaacaagttacaactccagaaaatatcaatttggatttaacttactcagttcttttcaatttggccagtcagtattcagttaatgaaatgtatgccgaagcacttaacacttatcaagttatagtcaaaaataagatgtttagcaatgcaggaatattgaaaatgaatatgggaaatatctatttaaagcaaagaaattattccaaagccattaaattctaccgaatggcattagaccaagttccaagtgtcaataagcaaatgaggattaaaataatgcagaatattggagttacatttattcaggctgaccgagaaaaaatgaagaaggcattccaaaaattgattactgttccattagaaattgatgaagataaatatatttcaccaagtgatgatcctcatactaacttagtaactgaagctataaaaaatgatcacctcaggcaaatggaacgtgaaaggaaagccatggcagaaaaatatattatgacatctgcaaaactcattgctcctgtaattgaaacatcttttgctgcaggttatgattggtgcgtggaagtggtgaaagcttctcaatatgtagagctagccaatgatctggaaataaacaaagcagttacatacttgagacaaaaagactataaccaagctgtagagatcttaaaagtgttggaaaaaaaggacaatagagtgaaaagtgcagctgcaaccaatctctcagccctgtattatatgggaaaggattttgcacaagccagcagctatgcagatatagctgtgaactctgatagatataatccagcagctcttactaataaagggaatacagtttttgcaaatggtgattatgagaaggccgctgaattctataaagaggctctaagaaatgattcttcttgtactgaagcactttataatattggccttacctatgagaaactaaatcggctagatgaggctttggactgtttcctgaaacttcacgcaatcctacgaaacagtgccgaagttctttaccagatagcaaatatatatgaattaatggaaaatcccagtcaagctattgaatggctaatgcaggtggtcagtgttattccaaccgatcctcaagttttatctaagctaggagaattatatgatcgtgaaggagataaatctcaagcatttcaatattactatgagtcatataggtattttccttgtaatattgaagtcattgagtggcttggagcctattacattgacacccaattttgggaaaaagctattcagtactttgaaagagcttctcttatacagcctacacaagtgaaatggcagctgatggtagctagttgtttcagaagaagtggtaactaccaaaaagcattagatacttacaaagatactcacagaaaatttccagaaaatgtcgaatgtctgcgtttcttagttcgtctctgcacagatcttggattaaaagatgctcaagaatatgccagaaaactgaagaggttggaaaaaatgaaagaaataagggaacagcgcataaagtcaggcagagatggcagtgggggctcccgtggcaaaagagaaggaagtgctagcggtgatagtggccagaactatagtgccagtagtaaaggtgaacgactaagtgccagactcagagctttacctgggacaaatgaaccttatgaaagtagcagtaacaaagaaatagatgcctcctatgtggacccacttggccctcaaatagaacgaccaaaaactgcagccaagaaaaggatcgatgaggatgattttgctgatgaagaattaggagatgatttgcttccagaataatattcactttaatatttattaaaggaaagaaattgccttatgagatcatcctcatgttaaaccttggattaaatatctaacctgtaattattttttttcactgtcaaaacttaagtaagtgtattctattctgtatgtatgcatttaagttgtttttttcttttaaggaataaaaacaggtaaaactaatactttaggccagtgacttccttagctttttgaaaacattgacacacaggaagaaataaatttcataacacaacctagtacata

SEQ ID NO: 432610 - DNA, 1991 bp, Homo sapiens
cctagtttagaagtttcaatagcacctagctttagaagtgtcaatagcaaatgaggattaaaataatgcagaatattggagttacatttattcaggctggtcagtattcagatgctattaattcatatgagcacataatgagcatggcaccaaatctgaaggcaggctacaacctaactatctgttattttgctattggagaccgagaaaaaatgaagaaggcattccaaaaattgattactgttccattagaaattgatgaagataaatatatttcaccaagtgatgatcctcatactaacttagtaactgaagctataaaaaatgatcacctcaggcaaatggaacgtgaaaggaaagccatggcagaaaaatatattatgacatctgcaaaactcattgctcctgtaattgaaacatcttttgctgcaggttatgattggtgcgtggaagtggtgaaagcttctcaatatgtagagctagccaatgatctggaaataaacaaagcagttacatacttgagacaaaaagactataaccaagctgtagagatcttaaaagtgttggaaaaaaaggacaatagagtgaaaagtgcagctgcaaccaatctctcagccctgtattatatgggaaaggattttgcacaagccagcagctatgcagatatagctgtgaactctgatagatataatccagcagctcttactaataaagggaatacagtttttgcaaatggtgattatgagaaggccgctgaattctataaagaggctctaagaaatgattcttcttgtactgaagcactttataatattggccttacctatgagaaactaaatcggctagatgaggctttggactgtttcctgaaacttcacgcaatcctacgaaacagtgccgaagttctttaccagatagcaaatatatatgaattaatggaaaatcccagtcaagctattgaatggctaatgcaggtggtcagtgttattccaaccgatcctcaagttttatctaagctaggagaattatatgatcgtgaaggagataaatctcaagcatttcaatattactatgagtcatataggtattttccttgtaatattgaagtcattgagtggcttggagcctattacattgacacccaattttgggaaaaagctattcagtactttgaaagagcttctcttatacagcctacacaagtgaaatggcagctgatggtagctagttgtttcagaagaagtggtaactaccaaaaagcattagatacttacaaagatactcacagaaaatttccagaaaatgtcgaatgtctgcgtttcttagttcgtctctgcacagatcttggattaaaagatgctcaagaatatgccagaaaactgaagaggttggaaaaaatgaaagaaataagggaacagcgcataaagtcaggcagagatggcagtgggggctcccgtggcaaaagagaaggaagtgctagcggtgatagtggccagaactatagtgccagtagtaaaggtgaacgactaagtgccagactcagagctttacctgggacaaatgaaccttatgaaagtagcagtaacaaagaaatagatgcctcctatgtggacccacttggccctcaaatagaacgaccaaaaactgcagccaagaaaaggatcgatgaggatgattttgctgatgaagaattaggagatgatttgcttccagaataatattcactttaatatttattaaaggaaagaaattgccttatgagatcatcctcatgttaaaccttggattaaatatctaacctgtaattattttttttcactgtcaaaacttaagtaagtgtattctattctgtatgtatgcatttaagttgtttttttcttttaaggaataaaaacaggtaaaactaatactttaggccagtgacttccttagctttttgaaaacattgacacacaggaagaaataaatttcataacacaacctagtacata

SEQ ID NO: 432611 - DNA, 3216 bp, Homo sapiens
cgcaccacccccttggcgccgcgtctctcccgcgcccgcgcttccggccccgcgcgcgcccgcgcggaggactgtgggagcggcttccttggattccgcgcttggcaacggctcggcgtcgcgctttggccaaccgctgcgtcgtccctgggcccgaataactgtcgcccgcttccctcagcgtgaggtgaagcacttcaaattgcctgatgaaagttgaatcaggaatgaagataaaagtacacaacaatgcagaaagcggtacttagcctcacaaagatggaaacattccaaaaacgtgaagtactgttgtcccaagattctttctaagcctaaaattacacttttactagtccgattttctggttgtgagttttttttgtttgttttttttttttcgagaaactgcagtaggcttcttggaagtagaccaagggtgtccaatctttggcttccctgggccacatcggaagaagaattgtcttgggccacacatgaaattcacaaacactaaggtacaaatgatgcaaaatgtgcacctggctccagagacagatgaagatgatctttattccggctataatgactacaatccaatctatgatatcgaggaattggagaatgatgcagcttttcagcaagctgtgaggactagtcatggcagaagacctccaataactgctaaaatatcaagcacggcagttactagacctatagctactggatatgggtccaagacatctctggcatcatcaataggaagaccaatgacaggggctattcaggatggagttactagacccatgacagcagtgagagcagctggttttaccaaagcagctttgagaggctctgcatttgacccccttagtcagtcaaggggccctgcttcccctttggaagccaagaaaaaagatagcccagaggaaaaaataaagcaattagagaaggaagtaaatgagttggtagaagaaagctgtattgccaatagttgtggagacttaaaattggccttagaaaaggcaaaagatgcaggaagaaaagagagagtcctggtgagacagcgagaacaagttacaactccagaaaatatcaatttggatttaacttactcagttcttttcaatttggccagtcagtattcagttaatgaaatgtatgccgaagcacttaacacttatcaagttatagtcaaaaataagatgtttagcaatgcaggaatattgaaaatgaatatgggaaatatctatttaaagcaaagaaattattccaaagccattaaattctaccgaatggcattagaccaagttccaagtgtcaataagcaaatgaggattaaaataatgcagaatattggagttacatttattcaggctggtcagtattcagatgctattaattcatatgagcacataatgagcatggcaccaaatctgaaggcaggctacaacctaactatctgttattttgctattggagaccgagaaaaaatgaagaaggcattccaaaaattgattactgttccattagaaattgatgaagataaatatatttcaccaagtgatgatcctcatactaacttagtaactgaagctataaaaaatgatcacctcaggcaaatggaacgtgaaaggaaagccatggcagaaaaatatattatgacatctgcaaaactcattgctcctgtaattgaaacatcttttgctgcaggttatgattggtgcgtggaagtggtgaaagcttctcaatatgtagagctagccaatgatctggaaataaacaaagcagttacatacttgagacaaaaagactataaccaagctgtagagatcttaaaagtgttggaaaaaaaggacaatagagtgaaaagtgcagctgcaaccaatctctcagccctgtattatatgggaaaggattttgcacaagccagcagctatgcagatatagctgtgaactctgatagatataatccagcagctcttactaataaagggaatacagtttttgcaaatggtgattatgagaaggccgctgaattctataaagaggctctaagaaatgattcttcttgtactgaagcactttataatattggccttacctatgagaaactaaatcggctagatgaggctttggactgtttcctgaaacttcacgcaatcctacgaaacagtgccgaagttctttaccagatagcaaatatatatgaattaatggaaaatcccagtcaagctattgaatggctaatgcaggtggtcagtgttattccaaccgatcctcaagttttatctaagctaggagaattatatgatcgtgaaggagataaatctcaagcatttcaatattactatgagtcatataggtattttccttgtaatattgaagtcattgagtggcttggagcctattacattgacacccaattttgggaaaaagctattcagtactttgaaagagcttctcttatacagcctacacaagtgaaatggcagctgatggtagctagttgtttcagaagaagtggtaactaccaaaaagcattagatacttacaaagatactcacagatcttggattaaaagatgctcaagaatatgccagaaaactgaagaggttggaaaaaatgaaagaaataagggaacagcgcataaagtcaggcagagatggcagtgggggctcccgtggcaaaagagaaggaagtgctagcggtgatagtggccagaactatagtgccagtagtaaaggtgaacgactaagtgccagactcagagctttacctgggacaaatgaaccttatgaaagtagcagtaacaaagaaatagatgcctcctatgtggacccacttggccctcaaatagaacgaccaaaaactgcagccaagaaaaggatcgatgaggatgattttgctgatgaagaattaggagatgatttgcttccagaataatattcactttaatatttattaaaggaaagaaattgccttatgagatcatcctcatgttaaaccttggattaaatatctaacctgtaattattttttttcactgtcaaaacttaagtaagtgtattctattctgtatgtatgcatttaagttgtttttttcttttaaggaataaaaacaggtaaaactaatactttaggccagtgacttccttagctttttgaaaacattgacacacaggaagaaataaatttcataacacaacctagtacata

SEQ ID NO: 432612 - DNA, 926 bp, Homo sapiens
tgttccttgtggttctggcagcgtgaggacaggacacatggagagagaccctttaaacctccttccaaggaagtcagttctccctggtccagagattgcaaagtgtaattatttttcaggagaaaaatactatttgtaagcatcattcctacctgtatcccaaaagactgagttcactgatttattgagcttttaacaaatatactgtgcctatattctttcctaaatgtatattttacaatttaggtctgcgtttcttagttcgtctctgcacagatcttggattaaaagatgctcaagaatatgccagaaaactgaagaggttggaaaaaatgaaagaaataagggaacagcgcataaagtcaggcagagatggcagtgggggctcccgtggcaaaagagaaggaagtgctagcggtgatagtggccagaactatagtgccagtagtaaaggtgaacgactaagtgccagactcagagctttacctgggacaaatgaaccttatgaaagtagcagtaacaaagaaatagatgcctcctatgtggacccacttggccctcaaatagaacgaccaaaaactgcagccaagaaaaggatcgatgaggatgattttgctgatgaagaattaggagatgatttgcttccagaataatattcactttaatatttattaaaggaaagaaattgccttatgagatcatcctcatgttaaaccttggattaaatatctaacctgtaattattttttttcactgtcaaaacttaagtaagtgtattctattctgtatgtatgcatttaagttgtttttttcttttaaggaataaaaacaggtaaaactaatactttaggccagtgacttccttagctttttgaaaacattgacacacaggaagaaataaatttcataacacaacctagtacata

SEQ ID NO: 432613 - DNA, 892 bp, Homo sapiens
gcatcagctggacgtcgttttaaattaattacaaggtatgacgatgtttctggaggagatattgcaaagtgtaattatttttcaggagaaaaatactatttgtaagcatcattcctacctgtatcccaaaagactgagttcactgatttattgagcttttaacaaatatactgtgcctatattctttcctaaatgtatattttacaatttaggtctgcgtttcttagttcgtctctgcacagatcttggattaaaagatgctcaagaatatgccagaaaactgaagaggttggaaaaaatgaaagaaataagggaacagcgcataaagtcaggcagagatggcagtgggggctcccgtggcaaaagagaaggaagtgctagcggtgatagtggccagaactatagtgccagtagtaaaggtgaacgactaagtgccagactcagagctttacctgggacaaatgaaccttatgaaagtagcagtaacaaagaaatagatgcctcctatgtggacccacttggccctcaaatagaacgaccaaaaactgcagccaagaaaaggatcgatgaggatgattttgctgatgaagaattaggagatgatttgcttccagaataatattcactttaatatttattaaaggaaagaaattgccttatgagatcatcctcatgttaaaccttggattaaatatctaacctgtaattattttttttcactgtcaaaacttaagtaagtgtattctattctgtatgtatgcatttaagttgtttttttcttttaaggaataaaaacaggtaaaactaatactttaggccagtgacttccttagctttttgaaaacattgacacacaggaagaaataaatttcataacacaacctagtacata

SEQ ID NO: 432614 - DNA, 3158 bp, Homo sapiens
cgcaccacccccttggcgccgcgtctctcccgcgcccgcgcttccggccccgcgcgcgcccgcgcggaggactgtgggagcggcttccttggattccgcgcttggcaacggctcggcgtcgcgctttggccaaccgctgcgtcgtccctgggcccgaataactgtcgcccgcttccctcagcgtgaggtgaagcacttcaaattgcctgatgaaagttgaatcaggaatgaagataaaagtacacaacaatgcagaaagcggtacttagcctcacaaagatggaaacattccaaaaacgtgaagtactgttgtcccaagattctttctaagcctaaaattacacttttactagtccgattttctggttgtgagttttttttgtttgttttttttttttcgagaaactgcagtaggcttcttggaagtagaccaagggtgtccaatctttggcttccctgggccacatcggaagaagaattgtcttgggccacacatgaaattcacaaacactaaggtacaaatgatgcaaaatgtgcacctggctccagagacagatgaagatgatctttattccggctataatgactacaatccaatctatgatatcgaggaattggagaatgatgcagcttttcagcaagctgtgaggactagtcatggcagaagacctccaataactgctaaaatatcaagcacggcagttactagacctatagctactggatatgggtccaagacatctctggcatcatcaataggaagaccaatgacaggggctattcaggatggagttactagacccatgacagcagtgagagcagctggttttaccaaagcagctttgagaggctctgcatttgacccccttagtcagtcaaggggccctgcttcccctttggaagccaagaaaaaagatagcccagaggaaaaaataaagcaattagagaaggaagtaaatgagttggtagaagaaagctgtattgccaatagttgtggagacttaaaattggccttagaaaaggcaaaagatgcaggaagaaaagagagagtcctggtgagacagcgagaacaagttacaactccagaaaatatcaatttggatttaacttactcagttcttttcaatttggccagtcagtattcagttaatgaaatgtatgccgaagcacttaacacttatcaagttatagtcaaaaataagatgtttagcaatgcaggaatattgaaaatgaatatgggaaatatctatttaaagcaaagaaattattccaaagccattaaattctaccgaatggcattagaccaagttccaagtgtcaataagcaaatgaggattaaaataatgcagaatattggagttacatttattcaggctggtcagtattcagatgctattaattcatatgagcacataatgagcatggcaccaaatctgaaggcaggctacaacctaactatctgttattttgctattggagaccgagaaaaaatgaagaaggcattccaaaaattgattactgttccattagaaattgatgaagataaatatatttcaccaagtgatgatcctcatactaacttagtaactgaagctataaaaaatgatcacctcaggcaaatggaacgtgaaaggaaagccatggcagaaaaatatattatgacatctgcaaaactcattgctcctgtaattgaaacatcttttgctgcaggttatgattggtgcgtggaagtggtgaaagcttctcaatatgtagagctagccaatgatctggaaataaacaaagcagttacatacttgagacaaaaagactataaccaagctgtagagatcttaaaagtgttggaaaaaaaggacaatagagtgaaaagtgcagctgcaaccaatctctcagccctgtattatatgggaaaggattttgcacaagccagcagctatgcagatatagctgtgaactctgatagatataatccagcagctcttactaataaagggaatacagtttttgcaaatggtgattatgagaaggccgctgaattctataaagaggctctaagaaatgattcttcttgtactgaagcactttataatattggccttacctatgagaaactaaatcggctagatgaggctttggactgtttcctgaaacttcacgcaatcctacgaaacagtgccgaagttctttaccagatagcaaatatatatgaattaatggaaaatcccagtcaagctattgaatggctaatgcaggtggtcagtgttattccaaccgatcctcaagttttatctaagctaggagaattatatgatcgtgaaggagataaatctcaagcatttcaatattactatgagtcatataggtattttccttgtaatattgaagtcattgagtggcttggagcctattacattgacacccaattttgggaaaaagctattcagtactttgaaagagcttctcttatacagcctacacaagtgaaatggcagctgatggtagctagttgtttcagaagaagtggtaactaccaaaaagcattagatacttacaaagatactcacagaaaatttccagaaaatgtcgaatgtctgcgtttcttagttcgtctctgcacagatcttggattaaaagatgctcaagaatatgccagaaaactgaagaggttggaaaaaatgaaagaaataagggaacagcgcataaagtcaggcagagatggcagtgggggctcccgtggcaaaagagaaggaagtgctagcggtgatgcctcctatgtggacccacttggccctcaaatagaacgaccaaaaactgcagccaagaaaaggatcgatgaggatgattttgctgatgaagaattaggagatgatttgcttccagaataatattcactttaatatttattaaaggaaagaaattgccttatgagatcatcctcatgttaaaccttggattaaatatctaacctgtaattattttttttcactgtcaaaacttaagtaagtgtattctattctgtatgtatgcatttaagttgtttttttcttttaaggaataaaaacaggtaaaactaatactttaggccagtgacttccttagctttttgaaaacattgacacacaggaagaaataaatttcataacacaacctagtacata

SEQ ID NO: 432615 - DNA, 634 bp, Homo sapiens
aggttatgtgattaggagtagggttaggatgagtgggaagaagaaagaaataagggaacagcgcataaagtcaggcagagatggcagtgggggctcccgtggcaaaagagaaggaagtgctagcggtgatagtggccagaactatagtgccagtagtaaaggtgaacgactaagtgccagactcagagctttacctgggacaaatgaaccttatgaaagtagcagtaacaaagaaatagatgcctcctatgtggacccacttggccctcaaatagaacgaccaaaaactgcagccaagaaaaggatcgatgaggatgattttgctgatgaagaattaggagatgatttgcttccagaataatattcactttaatatttattaaaggaaagaaattgccttatgagatcatcctcatgttaaaccttggattaaatatctaacctgtaattattttttttcactgtcaaaacttaagtaagtgtattctattctgtatgtatgcatttaagttgtttttttcttttaaggaataaaaacaggtaaaactaatactttaggccagtgacttccttagctttttgaaaacattgacacacaggaagaaataaatttcataacacaacctagtacata

SEQ ID NO: 432616 - DNA, 2587 bp, Homo sapiens
cgcaccacccccttggcgccgcgtctctcccgcgcccgcgcttccggccccgcgcgcgcccgcgcggaggactgtgggagcggcttccttggattccgcgcttggcaacggctcggcgtcgcgctttggccaaccgctgcgtcgtccctgggcccgaataactgtcgcccgcttccctcagcgtgaggtgaagcacttcaaattgcctgatgaaagttgaatcaggaatgaagataaaagtacacaacaatgcagaaagcggtacttagcctcacaaagatggaaacattccaaaaacgtgaagtactgttgtcccaagattctttctaagcctaaaattacacttttactagtccgattttctggttgtgagttttttttgtttgttttttttttttcgagaaactgcagtaggcttcttggaagtagaccaagggtgtccaatctttggcttccctgggccacatcggaagaagaattgtcttgggccacacatgaaattcacaaacactaaggtacaaatgatgcaaaatgtgcacctggctccagagacagatgaagatgatctttattccggctataatgactacaatccaatctatgatatcgaggaattggagaatgatgcagcttttcagcaagctgtgaggactagtcatggcagaagacctccaataactgctaaaatatcaagcacggcagttactagacctatagctactggatatgggtccaagacatctctggcatcatcaataggaagaccaatgacaggggctattcaggatggagttactagacccatgacagcagtgagagcagctggttttaccaaagcagctttgagaggctctgcatttgacccccttagtcagtcaaggggccctgcttcccctttggaagccaagaaaaaagatagcccagaggaaaaaataaagcaattagagaaggaagtaaatgagttggtagaagaaagctgtattgccaatagttgtggagacttaaaattggccttagaaaaggcaaaagatgcaggaagaaaagagagagtcctggtgagacagcgagaacaagttacaactccagaaaatatcaatttggatttaacttactcagttcttttcaatttggccagtcagtattcagttaatgaaatgtatgccgaagcacttaacacttatcaagttatagtcaaaaataagatgtttagcaatgcaggaatattgaaaatgaatatgggaaatatctatttaaagcaaagaaattattccaaagccattaaattctaccgaatggcattagaccaagttccaagtgtcaataagcaaatgaggattaaaataatgcagaatattggagttacatttattcaggctggtcagtattcagatgctattaattcatatgagcacataatgagcatggcaccaaatctgaaggcaggctacaacctaactatctgttattttgctattggagaccgagaaaaaatgaagaaggcattccaaaaattgattactgttccattagaaattgatgaagataaatatatttcaccaagtgatgatcctcatactaacttagtaactgaagctataaaaaatgatcacctcaggcaaatggaacgtgaaaggaaagccatggcagaaaaatatattatgacatctgcaaaactcattgctcctgtaattgaaacatcttttgctgcaggttatgattggtgcgtggaagtggtgaaagcttctcaatatgtagagctagccaatgatctggaaataaacaaagcagttacatacttgagacaaaaagactataaccaagctgtagagatcttaaaagtgttggaaaaaaaggacaatagagtgaaaagtgcagctgcaaccaatctctcagccctgtattatatgggaaaggattttgcacaagccagcagctatgcagatatagctgtgaactctgatagatataatccagcagctcttactaataaagggaatacagtttttgcaaatggtgattatgagaaggccgctgaattctataaagaggctctaagaaatgattcttcttgtactgaagcactttataatattggccttacctatgagaaactaaatcggctagatgaggctttggactgtttcctgaaacttcacgcaatcctacgaaacagtgccgaagttctttaccagatagcaaatatgtatcttatttgaaaaccttagggacagttattaattctctcaattggtgattgaagatcaattattaaataagtttaactaatgaagtaattgatgaggataatatttgaagtaagtgatgaggataatctggcagattattgtgtgataaatatcatttgagtaatcctattttaagatgtagtttgcatcgaaagaggaattaatggttaaaactattatttattaaattttgaaaataactgaagtaattaggacattttcggtacatataagccattcattgaaagtcaatttggtgctttagaacgttgtattaattctgaagcttgtagggtatcattgaagcactaacttactaaataaaatactgtttattactg

SEQ ID NO: 432617 - DNA, 473 bp, Homo sapiens
ctgtcggccccggggcggtctgaggcggggccccagatggactcggcctgcccctgcttttcttcctcaggctcccgagttgtctactcagaaacgcgggcgttgtttctcacatcggtgtccccagctcacaggcttttcttgctcctctgaactgggacgggcgtcgctgaccgcttggcgatgtcccaagtcccagtcacgcctgacggggaaacttaaaacccagttagattactgcgccagctctggaatcgcacagcagagatggtgcacatcgctctttaattttcttgttaggtgaagcacttcaaattgcctgatgaaagttgaatcaggaatgaagataaaagtacacaacaatgcagaaagcggtacttagcctcacaaagatggaaacattccaaaaacgtgaagtactgttgtcccaagattctttctaagcctaaaattacacttttactagtccgatt

SEQ ID NO: 432618 - DNA, 429 bp, Homo sapiens
gtactctccacccagttcctccaggcatagcaggtctgaagaagaatggtgagatggccaaaaggtgttgctgggaattcttaagaatttgatatttacagataaaatttaaaatgacttgggagaccatttctgttcactctgagttattcattttgactatgagcctgattggtttcacatttgttttgtttgtttacataactctaacgtgacaatctcttcgaaacctagatgcctcctatgtggacccacttggccctcaaatagaacgaccaaaaactgcagccaagaaaaggatcgatgaggatgattttgctgatgaagaattaggagatgatttgcttccagaataatattcactttaatatttattaaaggaaagaaattgccttatgagatcatcctcatgttaaaccttggattaaa

SEQ ID NO: 432619 - DNA, 975 bp, Homo sapiens
gaggttagcccatgactctgagaggaactccgggcttttcttttctgtttaagtgggtgaaagttcacctctccagggcatatggtaactgcatccctttgtgtgaattcccggaccttcaccaccagcatgtttgctgggggtgcagtgacaggggaaattttaagaaatgcatgaaatcttccaagaaggttgttgagtttttagacactaccttttatttcagaattttaaagtacacattttttttttctttccaatctccatgccctcactgccctctcacccatctcattcctcccccagtcccaaagggtaaaggaggcaacaaatgcacagaagagttgccatggtctgggccaccaggaaggggatcagcttgaagacttggattgacttctgaatatattgcttatcagtcagggtgttgaatgcctggcactgttcccccagtggaacttcataccggtgtgtctaagggcaaaatggaaccgtagtgttctgactttagaacctgatgtcagaaatgaagaccggaggggcttttagagagaatgtaacatgcactccagtcatgatcagtgaagccctgtgcatgcggtttgatttggttttacttctctacacgtctgtgctcttcctgttttcagagaacagtggcaatattctgtgaaattgccccttccttgtttgattaagagtttgtcattcttacctatacctttggatcctctaaaaagaaaaaaaacaaacaaaccctgttcaattatttgttgcacaaacgttaaaactgttaaaacaacaacaacaacaacttcatttaggatgctaccctctcagcttattgaactgactttttaattatttttgctggacactgatctctccattccttattagcacagttgtaatgtgatttttgcgctattattcacttaaaaactaaaaatacaggtattttcttttggtgtggca

SEQ ID NO: 432620 - DNA, 2731 bp, Homo sapiens
agccgggctccggggcggggcgcaggagccccggggcggaggagccggggaggcgggaggcgggaggcgggaggtgttggggccgttgaagcggcctccctcccgcccccagccgcccggtctggccccagccctgtcccgacccgcggcctggcccactccgaccctacccggccgaagggttccgctggacacgcaggcggcctccggagcagcccaagcccatgagggccgcgcgcccggccgccggtgctgacgagacggagctcctggcccccgaggaggagcagaggatcaatgcggttcaagaatcgattccagcggttcatgaaccatcgagctccagccaatggccgctacaagccaacttgctatgaacatgctgctaactgttacacacacgcattcctcattgttccggccatcgtgggcagtgccctcctccatcggctgtctgatgactgctgggaaaagataacagcatggatttatggaatgggactctgtgccctcttcatcgtttctacagtatttcacattgtatcatggaaaaagagccacttaaggacagtggagcattgttttcacatgtgtgatagaatggttatctatttcttcattgctgcttcttatgctccatggttaaatcttcgtgaacttggacccctggcatctcatatgcgttggtttatctggctcatggcagctggaggaaccatttatgtatttctctaccatgaaaaatataaggtggttgaactctttttctatctcacaatgggattctctccagccttggtggtgacatcaatgaacaacaccgatggacttcaggaacttgcctgtgggggcttaatttattgcttgggagttgtgttcttcaagagtgatggcatcattccatttgcccacgccatctggcacctgtttgtggccacggcagctgcagtgcattactacgccatttggaaatacctttaccgaagtcctacggactttatgcggcatttatgaccaatctgtactaattctccaaaccagtattatttcaattatggcacttgggagtggggtgagagctaaacattgcacagggaaagaaaaaaaataactgcactgactttatatcttttgaatataattactgtgaaagtataaaggctgtgttctggaattttctgcctcacagcaaataaataaggtagtgaattaattattcattccattccactatcatgaaggactctgaatagacttggccaactgatgtttacaaaccagacttttatattttaattttacagattttactacatgatttttctaaattactatgtcaggttgtaaaagtcagtgcaataacaaaccttcctttttaagaagaaaattgtttctattactttcccattcactaggtaaagaatcatggacagaacttacactactttttaccatgtttcatcttggcataacatggttcttttttaaatagaaactttagttttttgtaaatttttaaaaaaatatttcattgatatgcatctctgcaggtcctcattcatgttgtaaatttttgcagcaagcagtcaacattccacaaacgaacaaacattatacctcttctgatagttttattaagcatggagaaattgccaatttttaaaaactgcagttttccaaacttttctgccaacctcttactctgaattcagtgctgctttgggacatatacttgacctagcttggtttaccagtgatggaaaagtattttgatatcattaactttttcaaaagatccaactttttctctatgcctttgccacattctcttcagggtctctttccacagtggataaatgttttttctgtattatgacagtattgttgtgatggccatctgctggaaactcctgaagagcattatgtattacagtgagcagttgtattgcctgtttggtgcccaatggttaagtcattgtcacttagctttatattgtcagtttgatatttattttaaattgtggaactagatgcataaattcacatttctgcctttcctttgcatcttctcatatattgtgttttttttttttttcctagaaaaaatatttaaagcattgtttgacaggtagaaactcatgtatctgtagtccatgagttatatcctggctcagtggagtgatatttatgtattatttttacttttctctcagtgtcttatattaagattaacatgttgttaatagttgctttgttgattaatctctcttgttggtgttttaataaatgaaataggcttgcctttagatcgggtgctgatattgcctgtttcctagtaatgggctgatcaaatgatcagtggaattcttggtttgatgataaccttattaattgaaattttttactgatgtggctttaaaagaggtttattttgtatatgtttagaactctctgattttgatgaattatatgggaatgagaaacagaagaagtggtatttgctggcgagttaaataggcaaggtacccagtgataacaccaaccaaaccactcctatctgcatgattctgaacatctggatgcctgttgttttactgtgtatattttatttttaatatattaactttgtggattcatttaaggtctactcaaaagtaacactgtcaaaaccactaatatgtatgtaaaaattgtgctgtatactacaataaagttgttacttggatttgtt

SEQ ID NO: 432621 - DNA, 992 bp, Homo sapiens
agccgggctccggggcggggcgcaggagccccggggcggaggagccggggaggcgggaggcgggaggcgggaggtgttggggccgttgaagcggcctccctcccgcccccagccgcccggtctggccccagccctgtcccgacccgcggcctggcccactccgaccctacccggccgaagggttccgctggacacgcaggcggcctccggagcagcccaagcccatgagggccgcgcgcccggccgccggtgctgacgagacggagctcctggcccccgaggaggagcagaggatcaatgcggttcaagaatcgattccagcgtcccaaagggtaaaggaggcaacaaatgcacagaagagttgccatggtctgggccaccaggaaggggatcagcttgaagacttggattgacttctgaatatattgcttatcagtcagggtgttgaatgcctggcactgttcccccagtggaacttcataccggtgtgtctaagggcaaaatggaaccgtagtgttctgactttagaacctgatgtcagaaatgaagaccggaggggcttttagagagaatgtaacatgcactccagtcatgatcagtgaagccctgtgcatgcggtttgatttggttttacttctctacacgtctgtgctcttcctgttttcagagaacagtggcaatattctgtgaaattgccccttccttgtttgattaagagtttgtcattcttacctatacctttggatcctctaaaaagaaaaaaaacaaacaaaccctgttcaattatttgttgcacaaacgttaaaactgttaaaacaacaacaacaacaacttcatttaggatgctaccctctcagcttattgaactgactttttaattatttttgctggacactgatctctccattccttattagcacagttgtaatgtgatttttgcgctattattcacttaaaaactaaaaatacaggtattttcttttggtgtggca

SEQ ID NO: 432622 - DNA, 989 bp, Homo sapiens
agccgggctccggggcggggcgcaggagccccggggcggaggagccggggaggcgggaggcgggaggcgggaggtgttggggccgttgaagcggcctccctcccgcccccagccgcccggtctggccccagccctgtcccgacccgcggcctggcccactccgaccctacccggccgaagggttccgctggacacgcaggcggcctccggagcagcccaagcccatgagggccgcgcgcccggccgccggtgctgacgagacggagctcctggcccccgaggaggagcagaggatcaatgcggttcaagaatcgattccagcggtgagagggatggcgtcccggtcccgctgcccgtgtcagaagcgggttcccaaatcccgccgttaagcgcacggctcccggctcctcacctggattcatcctgggtggatcccgcaccttggccagggatcagttccctggggattccccaccctgctgtccctgggcgatccccttcctccaaggatgggagctcctgcctcacccgggtctcccctcgcgatctgcggacctcagatggattcccggccccgggactccaagcctgtcctccttcccggggatccctttgctcctggggctcaccctcccgacccccatacaggctgggctctggctctctctgggaacccgaaccccagccccgggcaccgcccccgagtcctccgacctggctttggcctccatccctttacctccagggtgggggtctcccggggcgcgcggaacggggtggcgccctgcggagagatttgtcgtaaagcggggtgctaggcattttgggtgctttgtgaacggccctagcaacagggaaactgaggcacgctccgccagcttagccctgcctggccgtgtaggggccttgctggttctccagctgaacgtcccagggcggtgctatttttgggctctgcgaaggggcatgttagctttcgggtggcgaga

SEQ ID NO: 432623 - DNA, 2677 bp, Homo sapiens
agccgggctccggggcggggcgcaggagccccggggcggaggagccggggaggcgggaggcgggaggcgggaggtgttggggccgttgaagcggcctccctcccgcccccagccgcccggtctggccccagccctgtcccgacccgcggcctggcccactccgaccctacccggccgaagggttccgctggacacgcaggcggcctccggagcagcccaagcccatgagggccgcgcgcccggccgccggtgctgacgagacggagctcctggcccccgaggaggagcagaggatcaatgcggttcaagaatcgattccagcggttcatgaaccatcgagctccagccaatggccgctacaagccaacttgctatgaacatgctgctaactgttacacacacgcattcctcattgttccggccatcgtgggcagtgccctcctccatcggctgtctgatgactgctgggaaaagataacagcatggatttatggaatgggactctgtgccctcttcatcgtttctacagtatttcacattgtatcatggaaaaagagccacttaaggacagtggagcattgttttcacatgtgtgatagaatggttatctatttcttcattgctgcttcttatgctccatggttaaatcttcgtgaacttggacccctggcatctcatatgcgttggtttatctggctcatggcagctggaggaaccatttatgtatttctctaccatgaaaaatataaggtggttgaactctttttctatctcacaatgggattctctccagccttggtggtgacatcaatgaacaacaccgatggacttcaggaacttgcctgtgggggcttaatttattgcttgggagttgtgttcttcaagagtgatggcatcattccatttgcccacgccatctggcacctgtttgtggccacggcagctgcagtgcattactacgccatttggaaatacctttaccgaagtcctacggactttatgcggcatttatgaccaatctgtactaattctccaaaccagtattatttcaattatggcacttgggagtggggtgagagctaaacattgcacagggaaagaaaaaaaataactgcactgactttatatcttttgaatataattactgtgaaagtataaaggctgtgttctggaattttctgcctcacagcaaataaataaggtagtgaattaattattcattccattccactatcatgaaggactctgaatagacttggccaactgatgtttacaaaccagacttttatattttaattttacagattttactacatgatttttctaaattactatgtcaggttgtaaaagtcagtgcaataacaaaccttcctttttaagaagaaaattgtttctattactttcccattcactaggtaaagaatcatggacagaacttacactactttttaccatgtttcatcttggcataacatggttcttttttaaatagaaactttagttttttgtaaatttttaaaaaaatatttcattgatatgcatctctgcaggtcctcattcatgttgtaaatttttgcagcaagcagtcaacattccacaaacgaacaaacattatacctcttctgatagttttattaagcatggagaaattgccaatttttaaaaactgcagttttccaaacttttctgccaacctcttactctgaattcagtgctgctttgggacatatacttgacctagcttggtttaccagtgatggaaaagtattttgatatcattaactttttcccacagtggataaatgttttttctgtattatgacagtattgttgtgatggccatctgctggaaactcctgaagagcattatgtattacagtgagcagttgtattgcctgtttggtgcccaatggttaagtcattgtcacttagctttatattgtcagtttgatatttattttaaattgtggaactagatgcataaattcacatttctgcctttcctttgcatcttctcatatattgtgttttttttttttttcctagaaaaaatatttaaagcattgtttgacaggtagaaactcatgtatctgtagtccatgagttatatcctggctcagtggagtgatatttatgtattatttttacttttctctcagtgtcttatattaagattaacatgttgttaatagttgctttgttgattaatctctcttgttggtgttttaataaatgaaataggcttgcctttagatcgggtgctgatattgcctgtttcctagtaatgggctgatcaaatgatcagtggaattcttggtttgatgataaccttattaattgaaattttttactgatgtggctttaaaagaggtttattttgtatatgtttagaactctctgattttgatgaattatatgggaatgagaaacagaagaagtggtatttgctggcgagttaaataggcaaggtacccagtgataacaccaaccaaaccactcctatctgcatgattctgaacatctggatgcctgttgttttactgtgtatattttatttttaatatattaactttgtggattcatttaaggtctactcaaaagtaacactgtcaaaaccactaatatgtatgtaaaaattgtgctgtatactacaataaagttgttacttggatttgtt

SEQ ID NO: 432624 - DNA, 2684 bp, Homo sapiens
agccgggctccggggcggggcgcaggagccccggggcggaggagccggggaggcgggaggcgggaggcgggaggtgttggggccgttgaagcggcctccctcccgcccccagccgcccggtctggccccagccctgtcccgacccgcggcctggcccactccgaccctacccggccgaagggttccgctggacacgcaggcggcctccggagcagcccaagcccatgagggccgcgcgcccggccgccggtgctgacgagacggagctcctggcccccgaggaggagcagaggatcaatgcggttcaagaatcgattccagcggttcatgaaccatcgagctccagccaatggccgctacaagccaacttgctatgaacatgctgctaactgttacacacacgcagtctgatgactgctgggaaaagataacagcatggatttatggaatgggactctgtgccctcttcatcgtttctacagtatttcacattgtatcatggaaaaagagccacttaaggacagtggagcattgttttcacatgtgtgatagaatggttatctatttcttcattgctgcttcttatgctccatggttaaatcttcgtgaacttggacccctggcatctcatatgcgttggtttatctggctcatggcagctggaggaaccatttatgtatttctctaccatgaaaaatataaggtggttgaactctttttctatctcacaatgggattctctccagccttggtggtgacatcaatgaacaacaccgatggacttcaggaacttgcctgtgggggcttaatttattgcttgggagttgtgttcttcaagagtgatggcatcattccatttgcccacgccatctggcacctgtttgtggccacggcagctgcagtgcattactacgccatttggaaatacctttaccgaagtcctacggactttatgcggcatttatgaccaatctgtactaattctccaaaccagtattatttcaattatggcacttgggagtggggtgagagctaaacattgcacagggaaagaaaaaaaataactgcactgactttatatcttttgaatataattactgtgaaagtataaaggctgtgttctggaattttctgcctcacagcaaataaataaggtagtgaattaattattcattccattccactatcatgaaggactctgaatagacttggccaactgatgtttacaaaccagacttttatattttaattttacagattttactacatgatttttctaaattactatgtcaggttgtaaaagtcagtgcaataacaaaccttcctttttaagaagaaaattgtttctattactttcccattcactaggtaaagaatcatggacagaacttacactactttttaccatgtttcatcttggcataacatggttcttttttaaatagaaactttagttttttgtaaatttttaaaaaaatatttcattgatatgcatctctgcaggtcctcattcatgttgtaaatttttgcagcaagcagtcaacattccacaaacgaacaaacattatacctcttctgatagttttattaagcatggagaaattgccaatttttaaaaactgcagttttccaaacttttctgccaacctcttactctgaattcagtgctgctttgggacatatacttgacctagcttggtttaccagtgatggaaaagtattttgatatcattaactttttcaaaagatccaactttttctctatgcctttgccacattctcttcagggtctctttccacagtggataaatgttttttctgtattatgacagtattgttgtgatggccatctgctggaaactcctgaagagcattatgtattacagtgagcagttgtattgcctgtttggtgcccaatggttaagtcattgtcacttagctttatattgtcagtttgatatttattttaaattgtggaactagatgcataaattcacatttctgcctttcctttgcatcttctcatatattgtgttttttttttttttcctagaaaaaatatttaaagcattgtttgacaggtagaaactcatgtatctgtagtccatgagttatatcctggctcagtggagtgatatttatgtattatttttacttttctctcagtgtcttatattaagattaacatgttgttaatagttgctttgttgattaatctctcttgttggtgttttaataaatgaaataggcttgcctttagatcgggtgctgatattgcctgtttcctagtaatgggctgatcaaatgatcagtggaattcttggtttgatgataaccttattaattgaaattttttactgatgtggctttaaaagaggtttattttgtatatgtttagaactctctgattttgatgaattatatgggaatgagaaacagaagaagtggtatttgctggcgagttaaataggcaaggtacccagtgataacaccaaccaaaccactcctatctgcatgattctgaacatctggatgcctgttgttttactgtgtatattttatttttaatatattaactttgtggattcatttaaggtctactcaaaagtaacactgtcaaaaccactaatatgtatgtaaaaattgtgctgtatactacaataaagttgttacttggatttgtt

SEQ ID NO: 432625 - DNA, 2171 bp, Homo sapiens
  misc_feature (2143)..(2143): n is a, c, g, or t
  misc_feature (2171)..(2171): n is a, c, g, or t
agccgggctccggggcggggcgcaggagccccggggcggaggagccggggaggcgggaggcgggaggcgggaggtgttggggccgttgaagcggcctccctcccgcccccagccgcccggtctggccccagccctgtcccgacccgcggcctggcccactccgaccctacccggccgaagggttccgctggacacgcaggcggcctccggagcagcccaagcccatgagggccgcgcgcccggccgccggtgctgacgagacggagctcctggcccccgaggaggagcagaggatcaatgcggttcaagaatcgattccagcggttcatgaaccatcgagctccagccaatggccgctacaagccaacttgctatgaacatgctgctaactgttacacacacgcattcctcattgttccggccatcgtgggcagtgccctcctccatcggctgtctgatgactgctgggaaaagataacagcatggatttatggaatgggactctgtgccctcttcatcgtttctacagtatttcacattgtatcatggaaaaagagccacttaaggacagtggagcattgttttcacatgtgtgatagaatggttatctatttcttcattgctgcttcttatgctccatggttaaatcttcgtgaacttggacccctggcatctcatatgcgttggtttatctggctcatggcagctggaggaaccatttatgtatttctctaccatgaaaaatataaggtggttgaactctttttctatctcacaatgggattctctccagccttggtggtgacatcaatgaacaacaccgatggacttcaggaacttgcctgtgggggcttaatttattgcttgggagttgtgttcttcaagagtgatggcatcattccatttgcccacgccatctggcacctgtttgtggccacggcagctgcagtgcattactacgccatttggaaatacctttaccgaagtcctacggactttatgcggcatttatgaccaatctgtactaattctccaaaccagtattatttcaattatggcacttgggagtggggtgagagctaaacattgcacagggaaagaaaaaaaataactgcactgactttatatcttttgaatataattactgtgaaagtataaaggctgtgttctggaattttctgcctcacagcaaataaataaggtagtgaattaattattcattccattccactatcatgaaggactctgaatagacttggccaactgatgtttacaaaccagacttttatattttaattttacagattttactacatgatttttctaaattactatgtcaggttgtaaaagtcagtgcaataacaaaccttcctttttaagaagaaaattgtttctattactttcccattcactaggtaaagaatcatggacagaacttacactactttttaccatgtttcatcttggcataacatggttcttttttaaatagaaactttagttttttgtaaatttttaaaaaaatatttcattgatatgcatctctgcaggtcctcattcatgttgtaaatttttgcagcaagcagtcaacattccacaaacgaacaaacattatacctcttctgatagttttattaagcatggagaaattgccaatttttaaaaactgcagttttccaaacttttctgccaacctcttactctgaattcagtgctgctttgggacatatacttgacctagcttggtttaccagtgatggaaaagtattttgatatcattaactttttcccacagtggataaatgttttttctgtattatgacagtattgttgtgatggccatctgctggaaactcctgaagagcattatgtattacagtgagcagttgtattgcctgtttggtgcccaatggttaagtcattgtcacttagctttatattgtcagtttgatatttattttaaattgtggaactagatgcataaattcacatttctgcctttcctttgcatcttctcatatattgtgttttttttttttttcctagaaaaaatatttaaagcattgtttgacaggtagaaactcatgtatctgtagtccatgagttatatcctggctcagtggacagatgtctacgactgatncatactaatcttgcatggttagtatagn

SEQ ID NO: 432626 - DNA, 5803 bp, Homo sapiens
cgcccggagcgctgagccgcgggagcggagccggggttagcggcgctgctggaagatggcgagcggccgggacgagcggccgccttggcggctagggcggctcctgttgctcatgtgcctgctgctgctggggagctcggcccgggcggctcacatcaagaaggcggaggcgactaccacaactacgagcgcgggcgccgaggcggccgagggccagttcgaccgctactaccacgaagaggagttggagtcggcgctgagggaggcggcggccgcgggcctccccggcctggcccgcctctttagcatcggccgctcggtggaaggccggccgctgtgggtgcttcgcctcaccgccggcctggggtcgctaatccctgagggcgacgcggggcctgacgctgccgggcccgacgctgcggggccgctgctgcccggccggccccaggtgaagctggtgggcaacatgcatggcgacgagaccgtgtcgcgccaggtgttgatctacttggcccgcgagctggcggccggctaccgccgcggggacccgcgcctggtccgcctgctcaacaccaccgacgtgtacctgctgcccagcctcaaccccgatggcttcgagcgtgcccgcgagggcgactgtggcttcggcgacggcggcccgtccggggccagcggccgcgacaatagtcgcggccgcgacctcaaccgaagctttcccgaccagtttagcaccggcgaaccccccgccctggacgaggtgcccgaggtgcgcgccctcatcgagtggatccgcaggaacaagtttgtgctttctggaaatctgcatggtggctcagtggtagcaagctatccttttgatgattctccagaacataaggccactggaatctatagcaaaacctcagatgatgaagtatttaaatacttggcaaaagcttatgcttcaaaccaccccataatgaaaactggtgagcctcattgtccaggagatgaagacgagactttcaaagatggaatcacaaacggcgcacattggtatgatgtggaaggtggtatgcaagattacaattatgtgtgggccaactgttttgagatcacattagaactgtcttgttgcaagtacccacctgcttcacagcttcgacaggaatgggagaacaatcgtgagtctttgatcacattgattgaaaaggttcacattggagtgaaaggatttgttaaagattccataacaggatctgggttagagaatgcaaccatctcagtggctggtattaatcataatatcacaacaggcagatttggtgatttctaccgattacttgttcctggaacttacaaccttacagtagttttaactgggtatatgccattgactgttactaatgtagtggtgaaagaaggaccagccacagaggtggatttttctcttaggccaactgtaacttcagtaatccctgacacgacagaggctgtatcaactgctagcacagttgctatacctaatattctttctggaacatcatcctcctaccagccaattcagccaaaggactttcaccaccaccatttccctgatatggaaatcttcttgagaaggtttgccaatgaatatcctaacattacccggctttattccttgggaaaatcagtagagtcaagagaactttatgtgatggagatatctgataatccgggtgtccatgaaccaggtgaaccagaatttaagtacattggaaatatgcatggaaatgaagtggttggaagagaactgctgttgaacctcatagaatacctttgtaagaactttggaacagaccctgaagtcacagatttggttcataacactagaattcaccttatgccatccatgaatcctgatgggtatgaaaagtcccaggaaggagattcaataagtgtaattggcagaaacaacagcaacaactttgacctgaaccgaaatttcccagaccagtttgttcagatcacagatcctacgcaaccagaaactattgctgtaatgagctggatgaagtcctatccatttgtactttcagcaaacctgcatggaggttctttggtggttaactacccttttgatgatgatgaacaaggacttgccacatatagtaaatcaccagatgatgctgtgttccaacaaatagcactttcttattccaaggaaaattcccagatgtttcaaggtagaccttgcaagaatatgtatcctaatgaatattttcctcatggaataacaaatggagctagttggtataatgtgccaggaggaatgcaggactggaactatttacaaacaaattgctttgaagtgactattgaactaggttgtgtgaaatatccacttgagaaagagctgccaaacttttgggaacagaatcgaagatcactaatccagtttatgaaacaggttcatcagggcgtcagaggatttgttctagatgccacagatggcaggggtatattaaatgccaccattagtgttgctgagattaatcacccagtgactacttacaaaactggagattactggcgtctcttggttccaggaacttataaaatcacagcatctgctcgagggtataatccagttaccaagaatgtgactgtcaagagtgaaggcgctattcaggtcaacttcacacttgttcgatcctcaacagattcaaacaatgaatcaaagaaaggaaaaggggctagcagcagcaccaatgatgccagtgatccaactactaaagagtttgaaactttaattaaagacctttcagcggagaatggtttggaaagcctcatgttacgctcctcctcaaatctggctctggctctttatcgataccattcctacaaagacttatcagagtttctgagaggacttgtaatgaactatccacatattacaaatcttaccaatttgggacagagcactgaatatcgtcacatttggtcccttgaaatctccaataagcccaatgtatctgagcctgaagaaccaaagattcgttttgttgctggtatccatggaaatgcgccagttggaactgaactgcttttggctctggcagaatttctctgcctgaactacaaaaagaacccagctgttacccaattggttgacaggactaggattgtgattgtcccttctctaaatccagatgggcgagagagagctcaagagaaagactgtacttcaaaaataggacaaacaaatgctcgtggcaaagatttggatacagacttcacaaataatgcctcccaacctgagaccaaagccatcattgaaaatttgattcaaaaacaggactttagtctttctgttgccttagatggtggttccatgctggtcacatatccttatgacaagccagtacagacagtggaaaataaagagactctgaagcatttggcatctctttatgcaaataatcatccatccatgcacatgggtcagcccagttgcccaaataaatcagatgagaatattccaggaggagtaatgcgtggagcagaatggcatagtcacctgggcagcatgaaggattatagtgtcacctatggccattgtccggaaatcacagtatacacaagctgctgttactttcctagtgctgcacgactcccttccttgtgggcagacaataagagatctcttcttagtatgttagtggaggttcacaagggagttcatggatttgttaaagataagactggaaagccaatctctaaagcagtcattgtacttaatgaaggaataaaggtacaaacaaaagagggaggttatttccatgtactcttagcgccaggtgtccataacattattgccatcgctgatgggtaccagcaacaacattcacaggtctttgtgcatcatgatgcagctagttctgtggtgatagtctttgacacagataaccggatatttggtttgccaagggagcttgtggtaactgtatcaggtgctactatgtcggcattgatcctaacagcttgcattatttggtgcatctgctcaatcaagtctaatagacacaaggatggctttcatcggctcaggcagcatcatgatgagtatgaagatgaaattcgcatgatgtctaccggctccaagaagtccctcctaagccatgagttccaggatgaaacagacactgaagaggaaacattatattctagcaaacattgaaaaacacattttgcatatctcccagcataagtaccaagcaaaattacagttcctcttgggagaacactgcattaagaagagagactctcttgcttcttcaaagagctttgggaaattaaattgctaaatttgtattctctgtgaatttcactggcagttttgaacttcccttccttaaagtactctaaacctttaaaaaaaaatctgatttatgcagcagagatgggacagccactttttctttttaatttaagatgagctatttggagcttatgtaataatggcataaagccaactagaggatgttgtattttgcacatcagatgtttactagtggctttagtatttttctttgttttaaatggccaaaagaatccagaaacattaaggcagggacagcagtcagaatcgacataaagctttaaaaactcaaggttttttcaacctactgaggagtacttttctctagttgttaaatagctggagtttttcttattcaggtttaatggaggttgaattgatttttaaacacatataacagtaggaaatgaataaatgggcttctgcatttggctttctacctgttccaaggctagatcggaactggtagactacgctgtaagcaggatttcactacctctcttaaggtttagcaaacttctaaatagcccattttaagggagaacttactaactttattgtgaaaggtctaaatgcccacttgaatgaagctgagagagagatctagcaaaagctaaaactcatgttgtctatctttgaacttggtaaaaacccacaggtgctgctgcttatatctgtgaagcactagcttattctaggaatgcctgattctttaatattgcctaaatcggaacctttttctatgttgcacacatggttttcagatgacccagccatctacaagatctgaattctactgaaaatatctagaaatgtggaagagacctacttgcacattcttaacctgtatttgaacacaaaatatctatacttcatgctccagcccaagcctataccctgtaatagcatactattattgaaatcgcttgaccggtcttgttcacataggcctctgggagtgatttggttctttgccctaatgtttcatttgacggtctctttttgatcaaccaatttttctaaaagttcagtcgaaagcttttaagtatagcttcctcccttgaaaaaaaatgtaaactatgactgctgagtgataaaacactgtggtgtgaaagtgtcatcttcactgccaatcaggcaaagaccggaaagatttgcattttattatgtctgtcttatcatgcaatggaaatgatgctttttgtaagtatgcatcttaccaatgatgtaacggtttaatacctttgaatgttttaataaccaagttgctgctgaacttatactaaatcaggggaccaaaaaacttgctcttatcttctcaaattgtattctatatccattaatgtatcagttatcccaaagccttcaggtggaggggtttaccaccttcctaggtcgttcaaccaggttttgtgaggaatgcattcaaagtggctttataaaagaagattttctttagcaaga

SEQ ID NO: 432627 - DNA, 1115 bp, Homo sapiens
cgcccggagcgctgagccgcgggagcggagccggggttagcggcgctgctggaagatggcgagcggccgggacgagcggccgccttggcggctagggcggctcctgttgctcatgtgcctgctgctgctggggagctcggcccgggcggctcacatcaagaaggcggaggcgactaccacaactacgagcgcgggcgccgaggcggccgagggccagttcgaccgctactaccacgaagaggagttggagtcggcgctgagggaggcggcggccgcgggcctccccggcctggcccgcctctttagcatcggccgctcggtggaaggccggccgctgtgggtgcttcgcctcaccgccggcctggggtcgctaatccctgagggcgacgcggggcctgacgctgccgggcccgacgctgcggggccgctgctgcccggccggccccaggtgaagctggtgggcaacatgcatggcgacgagaccgtgtcgcgccaggtgttgatctacttggcccgcgagctggcggccggctaccgccgcggggacccgcgcctggtccgcctgctcaacaccaccgacgtgtacctgctgcccagcctcaaccccgatggcttcgagcgtgcccgcgagggcgactgtggcttcggcgacggcggcccgtccggggccagcggccgcgacaatagtcgcggccgcgacctcaaccgaagctttcccgaccagtttagcaccggcgaaccccccgccctggacgaggtgcccgaggtgcgcgccctcatcgagtggatccgcaggaacaagtttgtgctttctggaaatctgcatggtggctcagtggtagcaagctatccttttgatgattctccagaacataaggccactggaatctatagcaaaacctcagatgatgaagtatttaaatacttggcaaaagcttatgcttcaaaccaccccataatgaaaactggtgagcctcattgtccaggagatgaagacgagactttcaaagatggaatcacaaacggcgcacattggtatgatgtggaaggtatgcaaagcattgagtttgctacattttcccccttgttcgttgaattttgttatgtgtattctg

SEQ ID NO: 432628 - DNA, 613 bp, Homo sapiens
gaatgtcatatattctgaaatcatcagaatgtgctaaagtttaaacagtgttatttatattcttcatgataaagagaaacaaagcctatgaaaaattagccttcagaaatattttaatgaacatttacattgaactttactctgaactcctaaattcctgtttgttccatttatttgtgttgacaatctgttattttgaatatgacctcccaagataattagatgatgatgtttattattgaaatctggtgtccttgtacttaatccaggttcatcagggcgtcagaggatttgttctagatgccacagatggcaggggtatattaaatgccaccattagtgttgctgagattaatcacccagtgactacttacaaaactggagattactggcgtctcttggttccaggaacttataaaatcacagcatctgctcgagggtgagtgactgaatgctttgaaatagagtgctcggaggacaaacatggctccattctggaggattattactagaacgttctagagagcctgttaagcaactttgaatggattgctgcgaagtttagggctggttatacctttgactctcctttagtggcagatagagtacacga

SEQ ID NO: 432629 - DNA, 8063 bp, Homo sapiens
cgcccggagcgctgagccgcgggagcggagccggggttagcggcgctgctggaagatggcgagcggccgggacgagcggccgccttggcggctagggcggctcctgttgctcatgtgcctgctgctgctggggagctcggcccgggcggctcacatcaagaaggcggaggcgactaccacaactacgagcgcgggcgccgaggcggccgagggccagttcgaccgctactaccacgaagaggagttggagtcggcgctgagggaggcggcggccgcgggcctccccggcctggcccgcctctttagcatcggccgctcggtggaaggccggccgctgtgggtgcttcgcctcaccgccggcctggggtcgctaatccctgagggcgacgcggggcctgacgctgccgggcccgacgctgcggggccgctgctgcccggccggccccaggtgaagctggtgggcaacatgcatggcgacgagaccgtgtcgcgccaggtgttgatctacttggcccgcgagctggcggccggctaccgccgcggggacccgcgcctggtccgcctgctcaacaccaccgacgtgtacctgctgcccagcctcaaccccgatggcttcgagcgtgcccgcgagggcgactgtggcttcggcgacggcggcccgtccggggccagcggccgcgacaatagtcgcggccgcgacctcaaccgaagctttcccgaccagtttagcaccggcgaaccccccgccctggacgaggtgcccgaggtgcgcgccctcatcgagtggatccgcaggaacaagtttgtgctttctggaaatctgcatggtggctcagtggtagcaagctatccttttgatgattctccagaacataaggccactggaatctatagcaaaacctcagatgatgaagtatttaaatacttggcaaaagcttatgcttcaaaccaccccataatgaaaactggtgagcctcattgtccaggagatgaagacgagactttcaaagatggaatcacaaacggcgcacattggtatgatgtggaaggtggtatgcaagattacaattatgtgtgggccaactgttttgagatcacattagaactgtcttgttgcaagtacccacctgcttcacagcttcgacaggaatgggagaacaatcgtgagtctttgatcacattgattgaaaaggttcacattggagtgaaaggatttgttaaagattccataacaggatctgggttagagaatgcaaccatctcagtggctggtattaatcataatatcacaacaggcagatttggtgatttctaccgattacttgttcctggaacttacaaccttacagtagttttaactgggtatatgccattgactgttactaatgtagtggtgaaagaaggaccagccacagaggtggatttttctcttaggccaactgtaacttcagtaatccctgacacgacagaggctgtatcaactgctagcacagttgctatacctaatattctttctggaacatcatcctcctaccagccaattcagccaaaggactttcaccaccaccatttccctgatatggaaatcttcttgagaaggtttgccaatgaatatcctaacattacccggctttattccttgggaaaatcagtagagtcaagagaactttatgtgatggagatatctgataatccgggtgtccatgaaccaggtgaaccagaatttaagtacattggaaatatgcatggaaatgaagtggttggaagagaactgctgttgaacctcatagaatacctttgtaagaactttggaacagaccctgaagtcacagatttggttcataacactagaattcaccttatgccatccatgaatcctgatgggtatgaaaagtcccaggaaggagattcaataagtgtaattggcagaaacaacagcaacaactttgacctgaaccgaaatttcccagaccagtttgttcagatcacagatcctacgcaaccagaaactattgctgtaatgagctggatgaagtcctatccatttgtactttcagcaaacctgcatggaggttctttggtggttaactacccttttgatgatgatgaacaaggacttgccacatatagtaaatcaccagatgatgctgtgttccaacaaatagcactttcttattccaaggaaaattcccagatgtttcaaggtagaccttgcaagaatatgtatcctaatgaatattttcctcatggaataacaaatggagctagttggtataatgtgccaggaggaatgcaggactggaactatttacaaacaaattgctttgaagtgactattgaactaggttgtgtgaaatatccacttgagaaagagctgccaaacttttgggaacagaatcgaagatcactaatccagtttatgaaacaggttcatcagggcgtcagaggatttgttctagatgccacagatggcaggggtatattaaatgccaccattagtgttgctgagattaatcacccagtgactacttacaaaactggagattactggcgtctcttggttccaggaacttataaaatcacagcatctgctcgagggtataatccagttaccaagaatgtgactgtcaagagtgaaggcgctattcaggtcaacttcacacttgttcgatcctcaacagattcaaacaatgaatcaaagaaaggaaaaggggctagcagcagcaccaatgatgccagtgatccaactactaaagagtttgaaactttaattaaagacctttcagcggagaatggtttggaaagcctcatgttacgctcctcctcaaatctggctctggctctttatcgataccattcctacaaagacttatcagagtttctgagaggacttgtaatgaactatccacatattacaaatcttaccaatttgggacagagcactgaatatcgtcacatttggtcccttgaaatctccaataagcccaatgtatctgagcctgaagaaccaaagattcgttttgttgctggtatccatggaaatgcgccagttggaactgaactgcttttggctctggcagaatttctctgcctgaactacaaaaagaacccagctgttacccaattggttgacaggactaggattgtgattgtcccttctctaaatccagatgggcgagagagagctcaagagaaagactgtacttcaaaaataggacaaacaaatgctcgtggcaaagatttggatacagacttcacaaataatgcctcccaacctgagaccaaagccatcattgaaaatttgattcaaaaacaggactttagtctttctgttgccttagatggtggttccatgctggtcacatatccttatgacaagccagtacagacagtggaaaataaagagactctgaagcatttggcatctctttatgcaaataatcatccatccatgcacatgggtcagcccagttgcccaaataaatcagatgagaatattccaggaggagtaatgcgtggagcagaatggcatagtcacctgggcagcatgaaggattatagtgtcacctatggccattgtccggaaatcacagtatacacaagctgctgttactttcctagtgctgcacgactcccttccttgtgggcagacaataagagatctcttcttagtatgttagtggaggttcacaagggagttcatggatttgttaaagataagactggaaagccaatctctaaagcagtcattgtacttaatgaaggaataaaggtacaaacaaaagagggaggttatttccatgtactcttagcgccaggtgtccataacattattgccatcgctgatgggtaccagcaacaacattcacaggtctttgtgcatcatgatgcagctagttctgtggtgatagtctttgacacagataaccggatatttggtttgccaagggagcttgtggtaactgtatcaggtgctactatgtcggcattgatcctaacagcttgcattatttggtgcatctgctcaatcaagtctaatagacacaaggatggctttcatcggctcaggcagcatcatgatgagtatgaagatgaaattcgcatgatgtctaccggctccaagaagtccctcctaagccatgagttccaggatgaaacagacactgaagaggaaacattatattctagcaaacattgaaaaacacattttgcatatctcccagcataagtaccaagcaaaattacagttcctcttgggagaacactgcattaagaagagagactctcttgcttcttcaaagagctttgggaaattaaattgctaaatttgtattctctgtgaatttcactggcagttttgaacttcccttccttaaagtactctaaacctttaaaaaaaaatctgatttatgcagcagagatgggacagccactttttctttttaatttaagatgagctatttggagcttatgtaataatggcataaagccaactagaggatgttgtattttgcacatcagatgtttactagtggctttagtatttttctttgttttaaatggccaaaagaatccagaaacattaaggcagggacagcagtcagaatcgacataaagctttaaaaactcaaggttttttcaacctactgaggagtacttttctctagttgttaaatagctggagtttttcttattcaggtttaatggaggttgaattgatttttaaacacatataacagtaggaaatgaataaatgggcttctgcatttggctttctacctgttccaaggctagatcggaactggtagactacgctgtaagcaggatttcactacctctcttaaggtttagcaaacttctaaatagcccattttaagggagaacttactaactttattgtgaaaggtctaaatgcccacttgaatgaagctgagagagagatctagcaaaagctaaaactcatgttgtctatctttgaacttggtaaaaacccacaggtgctgctgcttatatctgtgaagcactagcttattctaggaatgcctgattctttaatattgcctaaatcggaacctttttctatgttgcacacatggttttcagatgacccagccatctacaagatctgaattctactgaaaatatctagaaatgtggaagagacctacttgcacattcttaacctgtatttgaacacaaaatatctatacttcatgctccagcccaagcctataccctgtaatagcatactattattgaaatcgcttgaccggtcttgttcacataggcctctgggagtgatttggttctttgccctaatgtttcatttgacggtctctttttgatcaaccaatttttctaaaagttcagtcgaaagcttttaagtatagcttcctcccttgaaaaaaaatgtaaactatgactgctgagtgataaaacactgtggtgtgaaagtgtcatcttcactgccaatcaggcaaagaccggaaagatttgcattttattatgtctgtcttatcatgcaatggaaatgatgctttttgtaagtatgcatcttaccaatgatgtaacggtttaatacctttgaatgttttaataaccaagttgctgctgaacttatactaaatcaggggaccaaaaaacttgctcttatcttctcaaattgtattctatatccattaatgtatcagttatcccaaagccttcaggtggaggggtttaccaccttcctaggtcgttcaaccaggttttgtgaggaatgcattcaaagtggctttataaaagaagattttctttagcaagaataatgaggtcatgtcatttgttaataagtatctgtgataaatccgtggttcaaggttaagccattctggtattctggtattagcaactgtaaattctgccacctcatacatggaacagagcttgtgggatgctaatagttagtgaagtatacatgatttaatttctaataatctttatgttttctttaaggatggtggtgtattgctctttttcagctttatttttaagagtacagtcaggaaaccaacaaggggcctaagagtggctgcccctgcttgggacattacagcaagtgaaacaaagttaatgtgacaagctttgctttgttatcattggtcttcactagaggataccttttacatgtacttctctcttggatcaaatatgtctttaactgtacatctcagtggctggaggccatgccttttaagcatgtgtaaaatttttaaagaaatgaacatacacatagttattttagtaatatttcctgaaagaaaaaccaaattctgctataagtcttgatcttcaatgaacttttaaataatgcatttagctggaaaacaagactttcccagcttgtgttacctagaagcgtgaatgtataggatacctgactactaagactatattctcagccctgccctgtcttttatttgcgggtctaatctaatattagaatatattaaccgcttaaggcattgaagccatatgggatggggaatgcatttcttcagtgtttctccgagagactttccatttccttggagttatggcggcaagtaagtatcatagtattaagaaatttgcctaaatctgagttgtgcctttctttactcacaaggcatgggctttgtcctggtgatcagtttgtaagccttcttccttcccagctccttaataaaagcaaagtgattgagtaggtaatgttcaaagtgtctgcctgtgtacatgtacttgtattgattatgtagttcagtaagatgtgcccaagtcatttcagaaagaaagacccttcagttttgatgcattttgctgaacacttgggtagtgagtgggatcctatccagttgaggaatgcttgcaatgctcattgaagggatttgctttgggactttgtcatcttccagaaaggaaacatattgtatatttggcccagtgtgattgattgctttatctttggtaacttttacttgaatgggatttgctgaattaatgactattgaatttaaaactaattatgagttgacaaataaataaaaggtagtgtttatgtctgagcttattgtgtttgagctaacaccaggttactcagtaaccatgacctgctcctccatttccatttattctcaacattaaatagttttatcttgttgttgccagaaatgcacttgtgccaggtattgtccctgctgtatgaaaagcttcttggcaatgaattctgtaatagtgccctacattatggttttctggtggaattgttttaacagtgacaacccaggatttccaatatatttttgttttattgttattaccaaaaattccactatgattgatgttcagtgattttctatagcaacttttttggtaactctttgggtttctgatttgttttagctaaaattttggggatatgatttgggtctttgattaatgtcagctgaacttggatttctagttcatgaagaaatctctcccaatacccatttatcctatttttagcaataattcgttaatgattccacttgattttcagaatattgtcctggttgattttgatttgacagcatacattatgaaatttgaaagtaggttaccattttgaggcagttggatataaattatgtaaatatgtatgattatgatttttataaatggcataacatgagtgtactaactaccttctatgctggccatgctacagattttctggaggtatgacaatagtatttttttatgctcagattaaaaatcagcttttcacctctccagtttttccaagtgatactcccagttctagagcaatctacagctgtttatgtgaggtgcccaacacccattcatctcaagtgcttcagtctttggtttatttcatgcactgtgccttcaaaatgaaatttttaaaagggactttaaatgaagttgaatagtagtttttaaaagtcaatttgtaatttatgtgaaatctaactgtaatgaggtcctttctgttttttatatgtaaacagatctactaatcctgtataaaagttattttacga

SEQ ID NO: 432630 - DNA, 7082 bp, Homo sapiens
cgcccggagcgctgagccgcgggagcggagccggggttagcggcgctgctggaagatggcgagcggccgggacgagcggccgccttggcggctagggcggctcctgttgctcatgtgcctgctgctgctggggagctcggcccgggcggctcacatcaagaaggcggaggcgactaccacaactacgagcgcgggcgccgaggcggccgagggccagttcgaccgctactaccacgaagaggagttggagtcggcgctgagggaggcggcggccgcgggcctccccggcctggcccgcctctttagcatcggccgctcggtggaaggccggccgctgtgggtgcttcgcctcaccgccggcctggggtcgctaatccctgagggcgacgcggggcctgacgctgccgggcccgacgctgcggggccgctgctgcccggccggccccaggtgaagctggtgggcaacatgcatggcgacgagaccgtgtcgcgccaggtgttgatctacttggcccgcgagctggcggccggctaccgccgcggggacccgcgcctggtccgcctgctcaacaccaccgacgtgtacctgctgcccagcctcaaccccgatggcttcgagcgtgcccgcgagggcgactgtggcttcggcgacggcggcccgtccggggccagcggccgcgacaatagtcgcggccgcgacctcaaccgaagctttcccgaccagtttagcaccggcgaaccccccgccctggacgaggtgcccgaggtgcgcgccctcatcgagtggatccgcaggaacaagtttgtgctttctggaaatctgcatggtggctcagtggtagcaagctatccttttgatgattctccagaacataaggccactggaatctatagcaaaacctcagatgatgaagtatttaaatacttggcaaaagcttatgcttcaaaccaccccataatgaaaactggtgagcctcattgtccaggagatgaagacgagactttcaaagatggaatcacaaacggcgcacattggtatgatgtggaaggtggtatgcaagattacaattatgtgtgggccaactgttttgagatcacattagaactgtcttgttgcaagtacccacctgcttcacagcttcgacaggaatgggagaacaatcgtgagtctttgatcacattgattgaaaaggttcacattggagtgaaaggatttgttaaagattccataacaggatctgggttagagaatgcaaccatctcagtggctggtattaatcataatatcacaacaggcagatttggtgatttctaccgattacttgttcctggaacttacaaccttacagtagttttaactgggtatatgccattgactgttactaatgtagtggtgaaagaaggaccagccacagaggtggatttttctcttaggccaactgtaacttcagtaatccctgacacgacagaggctgtatcaactgctagcacagttgctatacctaatattctttctggaacatcatcctcctaccagccaattcagccaaaggactttcaccaccaccatttccctgatatggaaatcttcttgagaaggtttgccaatgaatatcctaacattacccggctttattccttgggaaaatcagtagagtcaagagaactttatgtgatggagatatctgataatccgggtgtccatgaaccaggtgaaccagaatttaagtacattggaaatatgcatggaaatgaagtggttggaagagaactgctgttgaacctcatagaatacctttgtaagaactttggaacagaccctgaagtcacagatttggttcataacactagaattcaccttatgccatccatgaatcctgatgggtatgaaaagtcccaggaaggagattcaataagtgtaattggcagaaacaacagcaacaactttgacctgaaccgaaatttcccagaccagtttgttcagatcacagatcctacgcaaccagaaactattgctgtaatgagctggatgaagtcctatccatttgtactttcagcaaacctgcatggaggttctttggtggttaactacccttttgatgatgatgaacaaggacttgccacatatagtaaatcaccagatgatgctgtgttccaacaaatagcactttcttattccaaggaaaattcccagatgtttcaaggtagaccttgcaagaatatgtatcctaatgaatattttcctcatggaataacaaatggagctagttggtataatgtgccaggaggaatgcaggactggaactatttacaaacaaattgctttgaagtgactattgaactaggttgtgtgaaatatccacttgagaaagagctgccaaacttttgggaacagaatcgaagatcactaatccagtttatgaaacaggttcatcagggcgtcagaggatttgttctagatgccacagatggcaggggtatattaaatgccaccattagtgttgctgagattaatcacccagtgactacttacaaaactggagattactggcgtctcttggttccaggaacttataaaatcacagcatctgctcgagggtataatccagttaccaagaatgtgactgtcaagagtgaaggcgctattcaggtcaacttcacacttgttcgatcctcaacagattcaaacaatgaatcaaagaaaggaaaaggggctagcagcagcaccaatgatgccagtgatccaactactaaagagtttgaaactttaattaaagacctttcagcggagaatggtttggaaagcctcatgttacgctcctcctcaaatctggctctggctctttatcgataccattcctacaaagacttatcagagtttctgagaggacttgtaatgaactatccacatattacaaatcttaccaatttgggacagagcactgaatatcgtcacatttggtcccttgaaatctccaataagcccaatgtatctgagcctgaagaaccaaagattcgttttgttgctggtatccatggaaatgcgccagttggaactgaactgcttttggctctggcagaatttctctgcctgaactacaaaaagaacccagctgttacccaattggttgacaggactaggattgtgattgtcccttctctaaatccagatgggcgagagagagctcaagagaaagactgtacttcaaaaataggacaaacaaatgctcgtggcaaagatttggatacagacttcacaaataatgcctcccaacctgagaccaaagccatcattgaaaatttgattcaaaaacaggactttagtctttctgttgccttagatggtggttccatgctggtcacatatccttatgacaagccagtacagacagtggaaaataaagagactctgaagcatttggcatctctttatgcaaataatcatccatccatgcacatgggtcagcccagttgcccaaataaatcagatgagaatattccaggaggagtaatgcgtggagcagaatggcatagtcacctgggcagcatgaaggattatagtgtcacctatggccattgtccggaaatcacagtatacacaagctgctgttactttcctagtgctgcacgactcccttccttgtgggcagacaataagagatctcttcttagtatgttagtggaggttcacaagggagttcatggatttgttaaagataagactggaaagccaatctctaaagcagtcattgtacttaatgaaggaataaaggtacaaacaaaagagggaggttatttccatgtactcttagcgccaggtgtccataacattattgccatcgctgatgggtaccagcaacaacattcacaggtctttgtgcatcatgatgcagctagttctgtggtgatagtctttgacacagataaccggatatttggtttgccaagggagcttgtggtaactgtatcaggtgctactatgtcggcattgatcctaacagcttgcattatttggtgcatctgctcaatcaagtctaatagacacaaggatggctttcatcggctcaggcagcatcatgatgagtatgaagatgaaattcgcatgatgtctaccggctccaagaagtccctcctaagccatgagttccaggatgaaacagacactgaagaggaaacattatattctagcaaacattgaaaaacacattttgcatatctcccagcataagtaccaagcaaaattacagttcctcttgggagaacactgcattaagaagagagactctcttgcttcttcaaagagctttgggaaattaaattgctaaatttgtattctctgtgaatttcactggcagttttgaacttcccttccttaaagtactctaaacctttaaaaaaaaatctgatttatgcagcagagatgggacagccactttttctttttaatttaagatgagctatttggagcttatgtaataatggcataaagccaactagaggatgttgtattttgcacatcagatgtttactagtggctttagtatttttctttgttttaaatggccaaaagaatccagaaacattaaggcagggacagcagtcagaatcgacataaagctttaaaaactcaaggttttttcaacctactgaggagtacttttctctagttgttaaatagctggagtttttcttattcaggtttaatggaggttgaattgatttttaaacacatataacagtaggaaatgaataaatgggcttctgcatttggctttctacctgttccaaggctagatcggaactggtagactacgctgtaagcaggatttcactacctctcttaaggtttagcaaacttctaaatagcccattttaagggagaacttactaactttattgtgaaaggtctaaatgcccacttgaatgaagctgagagagagatctagcaaaagctaaaactcatgttgtctatctttgaacttggtaaaaacccacaggtgctgctgcttatatctgtgaagcactagcttattctaggaatgcctgattctttaatattgcctaaatcggaacctttttctatgttgcacacatggttttcagatgacccagccatctacaagatctgaattctactgaaaatatctagaaatgtggaagagacctacttgcacattcttaacctgtatttgaacacaaaatatctatacttcatgctccagcccaagcctataccctgtaatagcatactattattgaaatcgcttgaccggtcttgttcacataggcctctgggagtgatttggttctttgccctaatgtttcatttgacggtctctttttgatcaaccaatttttctaaaagttcagtcgaaagcttttaagtatagcttcctcccttgaaaaaaaatgtaaactatgactgctgagtgataaaacactgtggtgtgaaagtgtcatcttcactgccaatcaggcaaagaccggaaagatttgcattttattatgtctgtcttatcatgcaatggaaatgatgctttttgtaagtatgcatcttaccaatgatgtaacggtttaatacctttgaatgttttaataaccaagttgctgctgaacttatactaaatcaggggaccaaaaaacttgctcttatcttctcaaattgtattctatatccattaatgtatcagttatcccaaagccttcaggtggaggggtttaccaccttcctaggtcgttcaaccaggttttgtgaggaatgcattcaaagtggctttataaaagaagattttctttagcaagaataatgaggtcatgtcatttgttaataagtatctgtgataaatccgtggttcaaggttaagccattctggtattctggtattagcaactgtaaattctgccacctcatacatggaacagagcttgtgggatgctaatagttagtgaagtatacatgatttaatttctaataatctttatgttttctttaaggatggtggtgtattgctctttttcagctttatttttaagagtacagtcaggaaaccaacaaggggcctaagagtggctgcccctgcttgggacattacagcaagtgaaacaaagttaatgtgacaagctttgctttgttatcattggtcttcactagaggataccttttacatgtacttctctcttggatcaaatatgtctttaactgtacatctcagtggctggaggccatgccttttaagcatgtgtaaaatttttaaagaaatgaacatacacatagttattttagtaatatttcctgaaagaaaaaccaaattctgctataagtcttgatcttcaatgaacttttaaataatgcatttagctggaaaacaagactttcccagcttgtgttacctagaagcgtgaatgtataggatacctgactactaagactatattctcagccctgccctgtcttttatttgcgggtctaatctaatattagaatatattaaccgcttaaggcattgaagccatatgggatggggaatgcatttcttcagtgtttctccgagagactttccatttccttggagttatggcggcaagtaagtatcatagtattaagaaatttgcctaaatctgagttgtgcctttctttactcacaaggcatgggctttgtcctggtgatcagtttgtaagccttcttccttcccagctccttaataaaagcaaagtgattgagtaggtaatgttcaaagtgtctgcctgtgtacatgtacttgtattgattatgtagttcagtaagatgtgcccaagtcatttcagaaagaaagacccttcagttttgatgcattttgctgaacacttgggtagtgagtgggatcctatccagttgaggaatgcttgcaatgctcattgaagggatttgctttgggactttgtcatcttccagaaaggaaacatattgtatatttggcccagtgtgattgattgctttatctttggtaacttttacttgaatgggatttgctgaattaatgactattgaatttaaaactaattatgagttgacaaataaataaaaggtagtgtttatgtctga

SEQ ID NO: 432631 - DNA, 8009 bp, Homo sapiens
cgcccggagcgctgagccgcgggagcggagccggggttagcggcgctgctggaagatggcgagcggccgggacgagcggccgccttggcggctagggcggctcctgttgctcatgtgcctgctgctgctggggagctcggcccgggcggctcacatcaagaaggcggaggcgactaccacaactacgagcgcgggcgccgaggcggccgagggccagttcgaccgctactaccacgaagaggagttggagtcggcgctgagggaggcggcggccgcgggcctccccggcctggcccgcctctttagcatcggccgctcggtggaaggccggccgctgtgggtgcttcgcctcaccgccggcctggggtcgctaatccctgagggcgacgcggggcctgacgctgccgggcccgacgctgcggggccgctgctgcccggccggccccaggtgaagctggtgggcaacatgcatggcgacgagaccgtgtcgcgccaggtgttgatctacttggcccgcgagctggcggccggctaccgccgcggggacccgcgcctggtccgcctgctcaacaccaccgacgtgtacctgctgcccagcctcaaccccgatggcttcgagcgtgcccgcgagggcgactgtggcttcggcgacggcggcccgtccggggccagcggccgcgacaatagtcgcggccgcgacctcaaccgaagctttcccgaccagtttagcaccggcgaaccccccgccctggacgaggtgcccgaggtgcgcgccctcatcgagtggatccgcaggaacaagtttgtgctttctggaaatctgcatggtggctcagtggtagcaagctatccttttgatgattctccagaacataaggccactggaatctatagcaaaacctcagatgatgaagtatttaaatacttggcaaaagcttatgcttcaaaccaccccataatgaaaactggtgagcctcattgtccaggagatgaagacgagactttcaaagatggaatcacaaacggcgcacattggtatgatgtggaaggtggtatgcaagattacaattatgtgtgggccaactgttttgagatcacattagaactgtcttgttgcaagtacccacctgcttcacagcttcgacaggaatgggagaacaatcgtgagtctttgatcacattgattgaaaaggttcacattggagtgaaaggatttgttaaagattccataacaggatctgggttagagaatgcaaccatctcagtggctggtattaatcataatatcacaacaggcagatttggtgatttctaccgattacttgttcctggaacttacaaccttacagtagttttaactgggtatatgccattgactgttactaatgtagtggtgaaagaaggaccagccacagaggtggatttttctcttaggccaactgtaacttcagtaatccctgacacgacagaggctgtatcaactgctagcacagttgctatacctaatattctttctggaacatcatcctcctaccagccaattcagccaaaggactttcaccaccaccatttccctgatatggaaatcttcttgagaaggtttgccaatgaatatcctaacattacccggctttattccttgggaaaatcagtagagtcaagagaactttatgtgatggagatatctgataatccgggtgtccatgaaccaggtgaaccagaatttaagtacattggaaatatgcatggaaatgaagtggttggaagagaactgctgttgaacctcatagaatacctttgtaagaactttggaacagaccctgaagtcacagatttggttcataacactagaattcaccttatgccatccatgaatcctgatgggtatgaaaagtcccaggaaggagattcaataagtgtaattggcagaaacaacagcaacaactttgacctgaaccgaaatttcccagaccagtttgttcagatcacagatcctacgcaaccagaaactattgctgtaatgagctggatgaagtcctatccatttgtactttcagcaaacctgcatggaggttctttggtggttaactacccttttgatgatgatgaacaaggacttgccacatatagtaaatcaccagatgatgctgtgttccaacaaatagcactttcttattccaaggaaaattcccagatgtttcaaggtagaccttgcaagaatatgtatcctaatgaatattttcctcatggaataacaaatggagctagttggtataatgtgccaggaggaatgcaggactggaactatttacaaacaaattgctttgaagtgactattgaactaggttgtgtgaaatatccacttgagaaagagctgccaaacttttgggaacagaatcgaagatcactaatccagtttatgaaacaggttcatcagggcgtcagaggatttgttctagatgccacagatggcaggggtatattaaatgccaccattagtgttgctgagattaatcacccagtgactacttacaaaactggagattactggcgtctcttggttccaggaacttataaaatcacagcatctgctcgagggtataatccagttaccaagaatgtgactgtcaagagtgaaggcgctattcaggtcaacttcacacttgttcgatcctcaacagattcaaacaatgaatcaaagaaaggaaaaggggctagcagcagcaccaatgatgccagtgatccaactactaaagagtttgaaactttaattaaagacctttcagcggagaatggtttggaaagcctcatgttacgctcctcctcaaatctggctctggctctttatcgataccattcctacaaagacttatcagagtttctgagaggacttgtaatgaactatccacatattacaaatcttaccaatttgggacagagcactgaatatcgtcacatttggtcccttgaaatctccaataagcccaatgtatctgagcctgaagaaccaaagattcgttttgttgctggtatccatggaaatgcgccagttggaactgaactgcttttggctctggcagaatttctctgcctgaactacaaaaagaacccagctgttacccaattggttgacaggactaggattgtgattgtcccttctctaaatccagatgggcgagagagagctcaagagaaagactgtacttcaaaaataggacaaacaaatgctcgtggcaaagatttggatacagacttcacaaataatgcctcccaacctgagaccaaagccatcattgaaaatttgattcaaaaacaggactttagtctttctgttgccttagatggtggttccatgctggtcacatatccttatgacaagccagtacagacagtggaaaataaagagactctgaagcatttggcatctctttatgcaaataatcatccatccatgcacatgggtcagcccagttgcccaaataaatcagatgagaatattccaggaggagtaatgcgtggagcagaatggcatagtcacctgggcagcatgaaggattatagtgtcacctatggccattgtccggaaatcacagtatacacaagctgctgttactttcctagtgctgcacgactcccttccttgtgggcagacaataagagatctcttcttagtatgttagtggaggttcacaagggagttcatggatttgttaaagataagactggaaagccaatctctaaagcagtcattgtacttaatgaaggaataaaggtacaaacaaaagagggaggttatttccatgtactcttagcgccaggtgtccataacattattgccatcgctgatgggtaccagcaacaacattcacaggtctttgtgcatcatgatgcagctagttctgtggtgatagtctttgacacagataaccggatatttggtttgccaagggagcttgtggtaactgtatcaggtgctactatgtcggcattgatcctaacagcttgcattatttggtgcatctgctcaatcaagtctaatagacacaaggatggctttcatcggctcaggcagcatcatgatgagtatgaagatgaaattcgcatgatgtctaccggctccaagaagtccctcctaagccatgagttccaggatgaaacagacactgaagaggaaacattatattctagcaaacattgaaaaacacattttgcatatctcccagcataagtaccaagcaaaattacagttcctcttgggagaacactgcattaagaagagagactctcttgcttcttcaaagagctttgggaaattaaattgctaaatttgtattctctgtgaatttcactggcagttttgaacttcccttccttaaagtactctaaacctttaaaaaaaaatctgatttatgcagcagagatgggacagccactttttctttttaatttaagatgagctatttggagcttatgtaataatggcataaagccaactagaggatgttgtattttgcacatcagatgtttactagtggctttagtatttttctttgttttaaatggccaaaagaatccagaaacattaaggcagggacagcagtcagaatcgacataaagctttaaaaactcaaggttttttcaacctactgaggagtacttttctctagttgttaaatagctggagtttttcttattcaggtttaatggaggttgaattgatttttaaacacatataacagtaggaaatgaataaatgggcttctgcatttggctttctacctgttccaaggctagatcggaactggtagactacgctgtaagcaggatttcactacctctcttaaggtttagcaaacttctaaatagcccattttaagggagaacttactaactttattgtgaaaggtctaaatgcccacttgaatgaagctgagagagagatctagcaaaagctaaaactcatgttgtctatctttgaacttggtaaaaacccacaggtgctgctgcttatatctgtgaagcactagcttattctaggaatgcctgattctttaatattgcctaaatcggaacctttttctatgttgcacacatggttttcagatgacccagccatctacaagatctgaattctactgaaaatatctagaaatgtggaagagacctacttgcacattcttaacctgtatttgaacacaaaatatctatacttcatgctccagcccaagcctataccctgtaatagcatactattattgaaatcgcttgaccggtcttgttcacataggcctctgggagtgatttggttctttgccctaatgtttcatttgacggtctctttttgatcaaccaatttttctaaaagttcagtcgaaagcttttaagtatagcttcctcccttgaaaaaaaatgtaaactatgactgctgagtgataaaacactgtggtgtgaaagtgtcatcttcactgccaatcaggcaaagaccggaaagatttgcattttattatgtctgtcttatcatgcaatggaaatgatgctttttgtaagtatgcatcttaccaatgatgtaacggtttaatacctttgaatgttttaataaccaagttgctgctgaacttatactaaatcaggggaccaaaaaacttgctcttatcttctcaaattgtattctatatccattaatgtatcagttatcccaaagccttcaggtggaggggtttaccaccttcctaggtcgttcaaccaggttttgtgaggaatgcattcaaagtggctttataaaagaagattttctttagcaagaataatgaggtcatgtcatttgttaataagtatctgtgataaatccgtggttcaaggttaagccattctggtattctggtattagcaactgtaaattctgccacctcatacatggaacagagcttgtgggatgctaatagttagtgaagtatacatgatttaatttctaataatctttatgttttctttaaggatggtggtgtattgctctttttcagctttatttttaagagtacagtcaggaaaccaacaaggggcctaagagtggctgcccctgcttgggacattacagcaagtgaaacaaagttaatgtgacaagctttgctttgttatcattggtcttcactagaggataccttttacatgtacttctctcttggatcaaatatgtctttaactgtacatctcagtggctggaggccatgccttttaagcatgtgtaaaatttttaaagaaatgaacatacacatagttattttagtaatatttcctgaaagaaaaaccaaattctgctataagtcttgatcttcaatgaacttttaaataatgcatttagctggaaaacaagactttcccagcttgtgttacctagaagcgtgaatgtataggatacctgactactaagactatattctcagccctgccctgtcttttatttgcgggtctaatctaatattagaatatattaaccgcttaaggcattgaagccatatgggatggggaatgcatttcttcagtgtttctccgagagactttccatttccttggagttatggcggcaagtaagtatcatagtattaagaaatttgcctaaatctgagttgtgcctttctttactcacaaggcatgggctttgtcctggtgatcagtttgtaagccttcttccttcccagctccttaatattgtattgattatgtagttcagtaagatgtgcccaagtcatttcagaaagaaagacccttcagttttgatgcattttgctgaacacttgggtagtgagtgggatcctatccagttgaggaatgcttgcaatgctcattgaagggatttgctttgggactttgtcatcttccagaaaggaaacatattgtatatttggcccagtgtgattgattgctttatctttggtaacttttacttgaatgggatttgctgaattaatgactattgaatttaaaactaattatgagttgacaaataaataaaaggtagtgtttatgtctgagcttattgtgtttgagctaacaccaggttactcagtaaccatgacctgctcctccatttccatttattctcaacattaaatagttttatcttgttgttgccagaaatgcacttgtgccaggtattgtccctgctgtatgaaaagcttcttggcaatgaattctgtaatagtgccctacattatggttttctggtggaattgttttaacagtgacaacccaggatttccaatatatttttgttttattgttattaccaaaaattccactatgattgatgttcagtgattttctatagcaacttttttggtaactctttgggtttctgatttgttttagctaaaattttggggatatgatttgggtctttgattaatgtcagctgaacttggatttctagttcatgaagaaatctctcccaatacccatttatcctatttttagcaataattcgttaatgattccacttgattttcagaatattgtcctggttgattttgatttgacagcatacattatgaaatttgaaagtaggttaccattttgaggcagttggatataaattatgtaaatatgtatgattatgatttttataaatggcataacatgagtgtactaactaccttctatgctggccatgctacagattttctggaggtatgacaatagtatttttttatgctcagattaaaaatcagcttttcacctctccagtttttccaagtgatactcccagttctagagcaatctacagctgtttatgtgaggtgcccaacacccattcatctcaagtgcttcagtctttggtttatttcatgcactgtgccttcaaaatgaaatttttaaaagggactttaaatgaagttgaatagtagtttttaaaagtcaatttgtaatttatgtgaaatctaactgtaatgaggtcctttctgttttttatatgtaaacagatctactaatcctgtataaaagttattttacga

SEQ ID NO: 432632 - DNA, 9095 bp, Homo sapiens
cgcccggagcgctgagccgcgggagcggagccggggttagcggcgctgctggaagatggcgagcggccgggacgagcggccgccttggcggctagggcggctcctgttgctcatgtgcctgctgctgctggggagctcggcccgggcggctcacatcaagaaggcggaggcgactaccacaactacgagcgcgggcgccgaggcggccgagggccagttcgaccgctactaccacgaagaggagttggagtcggcgctgagggaggcggcggccgcgggcctccccggcctggcccgcctctttagcatcggccgctcggtggaaggccggccgctgtgggtgcttcgcctcaccgccggcctggggtcgctaatccctgagggcgacgcggggcctgacgctgccgggcccgacgctgcggggccgctgctgcccggccggccccaggtgaagctggtgggcaacatgcatggcgacgagaccgtgtcgcgccaggtgttgatctacttggcccgcgagctggcggccggctaccgccgcggggacccgcgcctggtccgcctgctcaacaccaccgacgtgtacctgctgcccagcctcaaccccgatggcttcgagcgtgcccgcgagggcgactgtggcttcggcgacggcggcccgtccggggccagcggccgcgacaatagtcgcggccgcgacctcaaccgaagctttcccgaccagtttagcaccggcgaaccccccgccctggacgaggtgcccgaggtgcgcgccctcatcgagtggatccgcaggaacaagtttgtgctttctggaaatctgcatggtggctcagtggtagcaagctatccttttgatgattctccagaacataaggccactggaatctatagcaaaacctcagatgatgaagtatttaaatacttggcaaaagcttatgcttcaaaccaccccataatgaaaactggtgagcctcattgtccaggagatgaagacgagactttcaaagatggaatcacaaacggcgcacattggtatgatgtggaaggtggtatgcaagattacaattatgtgtgggccaactgttttgagatcacattagaactgtcttgttgcaagtacccacctgcttcacagcttcgacaggaatgggagaacaatcgtgagtctttgatcacattgattgaaaaggttcacattggagtgaaaggatttgttaaagattccataacaggatctgggttagagaatgcaaccatctcagtggctggtattaatcataatatcacaacaggcagatttggtgatttctaccgattacttgttcctggaacttacaaccttacagtagttttaactgggtatatgccattgactgttactaatgtagtggtgaaagaaggaccagccacagaggtggatttttctcttaggccaactgtaacttcagtaatccctgacacgacagaggctgtatcaactgctagcacagttgctatacctaatattctttctggaacatcatcctcctaccagccaattcagccaaaggactttcaccaccaccatttccctgatatggaaatcttcttgagaaggtttgccaatgaatatcctaacattacccggctttattccttgggaaaatcagtagagtcaagagaactttatgtgatggagatatctgataatccgggtgtccatgaaccaggtgaaccagaatttaagtacattggaaatatgcatggaaatgaagtggttggaagagaactgctgttgaacctcatagaatacctttgtaagaactttggaacagaccctgaagtcacagatttggttcataacactagaattcaccttatgccatccatgaatcctgatgggtatgaaaagtcccaggaaggagattcaataagtgtaattggcagaaacaacagcaacaactttgacctgaaccgaaatttcccagaccagtttgttcagatcacagatcctacgcaaccagaaactattgctgtaatgagctggatgaagtcctatccatttgtactttcagcaaacctgcatggaggttctttggtggttaactacccttttgatgatgatgaacaaggacttgccacatatagtaaatcaccagatgatgctgtgttccaacaaatagcactttcttattccaaggaaaattcccagatgtttcaaggtagaccttgcaagaatatgtatcctaatgaatattttcctcatggaataacaaatggagctagttggtataatgtgccaggaggaatgcaggactggaactatttacaaacaaattgctttgaagtgactattgaactaggttgtgtgaaatatccacttgagaaagagctgccaaacttttgggaacagaatcgaagatcactaatccagtttatgaaacaggttcatcagggcgtcagaggatttgttctagatgccacagatggcaggggtatattaaatgccaccattagtgttgctgagattaatcacccagtgactacttacaaaactggagattactggcgtctcttggttccaggaacttataaaatcacagcatctgctcgagggtataatccagttaccaagaatgtgactgtcaagagtgaaggcgctattcaggtcaacttcacacttgttcgatcctcaacagattcaaacaatgaatcaaagaaaggaaaaggggctagcagcagcaccaatgatgccagtgatccaactactaaagagtttgaaactttaattaaagacctttcagcggagaatggtttggaaagcctcatgttacgctcctcctcaaatctggctctggctctttatcgataccattcctacaaagacttatcagagtttctgagaggacttgtaatgaactatccacatattacaaatcttaccaatttgggacagagcactgaatatcgtcacatttggtcccttgaaatctccaataagcccaatgtatctgagcctgaagaaccaaagattcgttttgttgctggtatccatggaaatgcgccagttggaactgaactgcttttggctctggcagaatttctctgcctgaactacaaaaagaacccagctgttacccaattggttgacaggactaggattgtgattgtcccttctctaaatccagatgggcgagagagagctcaagagaaagactgtacttcaaaaataggacaaacaaatgctcgtggcaaagatttggatacagacttcacaaataatgcctcccaacctgagaccaaagccatcattgaaaatttgattcaaaaacaggactttagtctttctgttgccttagatggtggttccatgctggtcacatatccttatgacaagccagtacagacagtggaaaataaagagactctgaagcatttggcatctctttatgcaaataatcatccatccatgcacatgggtcagcccagttgcccaaataaatcagatgagaatattccaggaggagtaatgcgtggagcagaatggcatagtcacctgggcagcatgaaggattatagtgtcacctatggccattgtccggaaatcacagtatacacaagctgctgttactttcctagtgctgcacgactcccttccttgtgggcagacaataagagatctcttcttagtatgttagtggaggttcacaagggagttcatggatttgttaaagataagactggaaagccaatctctaaagcagtcattgtacttaatgaaggaataaaggtacaaacaaaagagggaggttatttccatgtactcttagcgccaggtgtccataacattattgccatcgctgatgggtaccagcaacaacattcacaggtctttgtgcatcatgatgcagctagttctgtggtgatagtctttgacacagataaccggatatttggtttgccaagggagcttgtggtaactgtatcaggtgctactatgtcggcattgatcctaacagcttgcattatttggtgcatctgctcaatcaagtctaatagacacaaggatggctttcatcggctcaggcagcatcatgatgagtatgaagatgaaattcgcatgatgtctaccggctccaagaagtccctcctaagccatgagttccaggatgaaacagacactgaagaggaaacattatattctagcaaacattgaaaaacacattttgcatatctcccagcataagtaccaagcaaaattacagttcctcttgggagaacactgcattaagaagagagactctcttgcttcttcaaagagctttgggaaattaaattgctaaatttgtattctctgtgaatttcactggcagttttgaacttcccttccttaaagtactctaaacctttaaaaaaaaatctgatttatgcagcagagatgggacagccactttttctttttaatttaagatgagctatttggagcttatgtaataatggcataaagccaactagaggatgttgtattttgcacatcagatgtttactagtggctttagtatttttctttgttttaaatggccaaaagaatccagaaacattaaggcagggacagcagtcagaatcgacataaagctttaaaaactcaaggttttttcaacctactgaggagtacttttctctagttgttaaatagctggagtttttcttattcaggtttaatggaggttgaattgatttttaaacacatataacagtaggaaatgaataaatgggcttctgcatttggctttctacctgttccaaggctagatcggaactggtagactacgctgtaagcaggatttcactacctctcttaaggtttagcaaacttctaaatagcccattttaagggagaacttactaactttattgtgaaaggtctaaatgcccacttgaatgaagctgagagagagatctagcaaaagctaaaactcatgttgtctatctttgaacttggtaaaaacccacaggtgctgctgcttatatctgtgaagcactagcttattctaggaatgcctgattctttaatattgcctaaatcggaacctttttctatgttgcacacatggttttcagatgacccagccatctacaagatctgaattctactgaaaatatctagaaatgtggaagagacctacttgcacattcttaacctgtatttgaacacaaaatatctatacttcatgctccagcccaagcctataccctgtaatagcatactattattgaaatcgcttgaccggtcttgttcacataggcctctgggagtgatttggttctttgccctaatgtttcatttgacggtctctttttgatcaaccaatttttctaaaagttcagtcgaaagcttttaagtatagcttcctcccttgaaaaaaaatgtaaactatgactgctgagtgataaaacactgtggtgtgaaagtgtcatcttcactgccaatcaggcaaagaccggaaagatttgcattttattatgtctgtcttatcatgcaatggaaatgatgctttttgtaagtatgcatcttaccaatgatgtaacggtttaatacctttgaatgttttaataaccaagttgctgctgaacttatactaaatcaggggaccaaaaaacttgctcttatcttctcaaattgtattctatatccattaatgtatcagttatcccaaagccttcaggtggaggggtttaccaccttcctaggtcgttcaaccaggttttgtgaggaatgcattcaaagtggctttataaaagaagattttctttagcaagaataatgaggtcatgtcatttgttaataagtatctgtgataaatccgtggttcaaggttaagccattctggtattctggtattagcaactgtaaattctgccacctcatacatggaacagagcttgtgggatgctaatagttagtgaagtatacatgatttaatttctaataatctttatgttttctttaaggatggtggtgtattgctctttttcagctttatttttaagagtacagtcaggaaaccaacaaggggcctaagagtggctgcccctgcttgggacattacagcaagtgaaacaaagttaatgtgacaagctttgctttgttatcattggtcttcactagaggataccttttacatgtacttctctcttggatcaaatatgtctttaactgtacatctcagtggctggaggccatgccttttaagcatgtgtaaaatttttaaagaaatgaacatacacatagttattttagtaatatttcctgaaagaaaaaccaaattctgctataagtcttgatcttcaatgaacttttaaataatgcatttagctggaaaacaagactttcccagcttgtgttacctagaagcgtgaatgtataggatacctgactactaagactatattctcagccctgccctgtcttttatttgcgggtctaatctaatattagaatatattaaccgcttaaggcattgaagccatatgggatggggaatgcatttcttcagtgtttctccgagagactttccatttccttggagttatggcggcaagtaagtatcatagtattaagaaatttgcctaaatctgagttgtgcctttctttactcacaaggcatgggctttgtcctggtgatcagtttgtaagccttcttccttcccagctccttaataaaagcaaagtgattgagtaggtaatgttcaaagtgtctgcctgtgtacatgtacttgtattgattatgtagttcagtaagatgtgcccaagtcatttcagaaagaaagacccttcagttttgatgcattttgctgaacacttgggtagtgagtgggatcctatccagttgaggaatgcttgcaatgctcattgaagggatttgctttgggactttgtcatcttccagaaaggaaacatattgtatatttggcccagtgtgattgattgctttatctttggtaacttttacttgaatgggatttgctgaattaatgactattgaatttaaaactaattatgagttgacaaataaataaaaggtagtgtttatgtctgagcttattgtgtttgagctaacaccaggttactcagtaaccatgacctgctcctccatttccatttattctcaacattaaatagttttatcttgttgttgccagaaatgcacttgtgccaggtattgtccctgctgtatgaaaagcttcttggcaatgaattctgtaatagtgccctacattatggttttctggtggaattgttttaacagtgacaacccaggatttccaatatatttttgttttattgttattaccaaaaattccactatgattgatgttcagtgattttctatagcaacttttttggtaactctttgggtttctgatttgttttagctaaaattttggggatatgatttgggtctttgattaatgtcagctgaacttggatttctagttcatgaagaaatctctcccaatacccatttatcctatttttagcaataattcgttaatgattccacttgattttcagaatattgtcctggttgattttgatttgacagcatacattatgaaatttgaaagtaggttaccattttgaggcagttggatataaattatgtaaatatgtatgattatgatttttataaatggcataacatgagtgtactaactaccttctatgctggccatgctacagattttctggaggtatgacaatagtatttttttatgctcagattaaaaatcagcttttcacctctccagtttttccaagtgatactcccagttctagagcaatctacagctgtttatgtgaggtgcccaacacccattcatctcaagtgcttcagtctttggtttatttcatgcactgtgccttcaaaatgaaatttttaaaagggactttaaatgaagttgaatagtagtttttaaaagtcaatttgtaatttatgtgaaatctaactgtaatgaggtcctttctgttttttatatgtaaacagatctactaatcctgtataaaagttattttacgatgtttgtctttctttgtgttttgtctcataatcttttttcagatgcaatatgccggaaaaagttataggtccagtttgaaaattatttagtttttctgcctatgctagtggaaaaatagtaccaggatcagaatacagggtatcacctatggaatgtttctgtatttatgaattgactcaaaagaaagctttgtttctgaaatcgcattatgtagtagccacagttttctgtttgtagctcagctagattgttatatatgttcaatcatttcacaataacaacacaaaactggtcattgaaaggtttttatgtacgcattttaaacttgttcgttaaaaatttggtcctttttccaggtgaggcccagttagaataatgtgtcccggcacttttaggcacagcaaggatgaattcaatatccccttttcacttagcaacaatgtgttacttctaccctaataggaattgggaaagcaaagttgtatgagaaacagactctgctgataaagtactcatagtccagaccagagaaatataaatggaaataggttatatttcaatagtgattggttcatctaaaagtctctgctgtaaaggaaataaagcatagaggtttgagcatggactttggagttggaccaatctgtgactgattcttcgttctgctacttgcttccaatgtgaccttgtacaagtttcttgacattctctgagcctcagtttctctactggttgaataatccttgataggattgcagtggaaaattaaatgaaataatgttagcaaaggtcccaacataatatttgacttggaattgaatgcccatggtaaccagcatcattttccttcatgtgatgtcttcttatgcctttgaaagaaagttactttatcaaatgtataaataaagatctgtttataggtgatctttttaatttagaagaaattctgagacacaaataaaaaaagaaattttttattatgtggttcaatagattgtctaaagcatggcagtaaagttttaattatgcca

SEQ ID NO: 432633 - DNA, 8689 bp, Homo sapiens
cgcccggagcgctgagccgcgggagcggagccggggttagcggcgctgctggaagatggcgagcggccgggacgagcggccgccttggcggctagggcggctcctgttgctcatgtgcctgctgctgctggggagctcggcccgggcggctcacatcaagaaggcggaggcgactaccacaactacgagcgcgggcgccgaggcggccgagggccagttcgaccgctactaccacgaagaggagttggagtcggcgctgagggaggcggcggccgcgggcctccccggcctggcccgcctctttagcatcggccgctcggtggaaggccggccgctgtgggtgcttcgcctcaccgccggcctggggtcgctaatccctgagggcgacgcggggcctgacgctgccgggcccgacgctgcggggccgctgctgcccggccggccccaggtgaagctggtgggcaacatgcatggcgacgagaccgtgtcgcgccaggtgttgatctacttggcccgcgagctggcggccggctaccgccgcggggacccgcgcctggtccgcctgctcaacaccaccgacgtgtacctgctgcccagcctcaaccccgatggcttcgagcgtgcccgcgagggcgactgtggcttcggcgacggcggcccgtccggggccagcggccgcgacaatagtcgcggccgcgacctcaaccgaagctttcccgaccagtttagcaccggcgaaccccccgccctggacgaggtgcccgaggtgcgcgccctcatcgagtggatccgcaggaacaagtttgtgctttctggaaatctgcatggtggctcagtggtagcaagctatccttttgatgattctccagaacataaggccactggaatctatagcaaaacctcagatgatgaagtatttaaatacttggcaaaagcttatgcttcaaaccaccccataatgaaaactggtgagcctcattgtccaggagatgaagacgagactttcaaagatggaatcacaaacggcgcacattggtatgatgtggaaggtggtatgcaagattacaattatgtgtgggccaactgttttgagatcacattagaactgtcttgttgcaagtacccacctgcttcacagcttcgacaggaatgggagaacaatcgtgagtctttgatcacattgattgaaaaggttcacattggagtgaaaggatttgttaaagattccataacaggatctgggttagagaatgcaaccatctcagtggctggtattaatcataatatcacaacaggcagatttggtgatttctaccgattacttgttcctggaacttacaaccttacagtagttttaactgggtatatgccattgactgttactaatgtagtggtgaaagaaggaccagccacagaggtggatttttctcttaggccaactgtaacttcagtaatccctgacacgacagaggctgtatcaactgctagcacagttgctatacctaatattctttctggaacatcatcctcctaccagccaattcagccaaaggactttcaccaccaccatttccctgatatggaaatcttcttgagaaggtttgccaatgaatatcctaacattacccggctttattccttgggaaaatcagtagagtcaagagaactttatgtgatggagatatctgataatccgggtgtccatgaaccaggtgaaccagaatttaagtacattggaaatatgcatggaaatgaagtggttggaagagaactgctgttgaacctcatagaatacctttgtaagaactttggaacagaccctgaagtcacagatttggttcataacactagaattcaccttatgccatccatgaatcctgatgggtatgaaaagtcccaggaaggagattcaataagtgtaattggcagaaacaacagcaacaactttgacctgaaccgaaatttcccagaccagtttgttcagatcacagatcctacgcaaccagaaactattgctgtaatgagctggatgaagtcctatccatttgtactttcagcaaacctgcatggaggttctttggtggttaactacccttttgatgatgatgaacaaggacttgccacatatagtaaatcaccagatgatgctgtgttccaacaaatagcactttcttattccaaggaaaattcccagatgtttcaaggtagaccttgcaagaatatgtatcctaatgaatattttcctcatggaataacaaatggagctagttggtataatgtgccaggaggaatgcaggactggaactatttacaaacaaattgctttgaagtgactattgaactaggttgtgtgaaatatccacttgagaaagagctgccaaacttttgggaacagaatcgaagatcactaatccagtttatgaaacaggttcatcagggcgtcagaggatttgttctagatgccacagatggcaggggtatattaaatgccaccattagtgttgctgagattaatcacccagtgactacttacaaaactggagattactggcgtctcttggttccaggaacttataaaatcacagcatctgctcgagggtataatccagttaccaagaatgtgactgtcaagagtgaaggcgctattcaggtcaacttcacacttgttcgatcctcaacagattcaaacaatgaatcaaagaaaggaaaaggggctagcagcagcaccaatgatgccagtgatccaactactaaagagtttgaaactttaattaaagacctttcagcggagaatggtttggaaagcctcatgttacgctcctcctcaaatctggctctggctctttatcgataccattcctacaaagacttatcagagtttctgagaggacttgtaatgaactatccacatattacaaatcttaccaatttgggacagagcactgaatatcgtcacatttggtcccttgaaatctccaataagcccaatgtatctgagcctgaagaaccaaagattcgttttgttgctggtatccatggaaatgcgccagttggaactgaactgcttttggctctggcagaatttctctgcctgaactacaaaaagaacccagctgttacccaattggttgacaggactaggattgtgattgtcccttctctaaatccagatgggcgagagagagctcaagagaaagactgtacttcaaaaataggacaaacaaatgctcgtggcaaagatttggatacagacttcacaaataatgcctcccaacctgagaccaaagccatcattgaaaatttgattcaaaaacaggactttagtctttctgttgccttagatggtggttccatgctggtcacatatccttatgacaagccagtacagacagtggaaaataaagagactctgaagcatttggcatctctttatgcaaataatcatccatccatgcacatgggtcagcccagttgcccaaataaatcagatgagaatattccaggaggagtaatgcgtggagcagaatggcatagtcacctgggcagcatgaaggattatagtgtcacctatggccattgtccggaaatcacagtatacacaagctgctgttactttcctagtgctgcacgactcccttccttgtgggcagacaataagagatctcttcttagtatgttagtggaggttcacaagggagttcatggatttgttaaagataagactggaaagccaatctctaaagcagtcattgtacttaatgaaggaataaaggtacaaacaaaagagggaggttatttccatgtactcttagcgccaggtgtccataacattattgccatcgctgatgggtaccagcaacaacattcacaggtctttgtgcatcatgatgcagctagttctgtggtgatagtctttgacacagataaccggatatttggtttgccaagggagcttgtggtaactgtatcaggtgctactatgtcggcattgatcctaacagcttgcattatttggtgcatctgctcaatcaagtctaatagacacaaggatggctttcatcggctcaggcagcatcatgatgagtatgaagatgaaattcgcatgatgtctaccggctccaagaagtccctcctaagccatgagttccaggatgaaacagacactgaagaggaaacattatattctagcaaacattgaaaaacacattttgcatatctcccagcataagtaccaagcaaaattacagttcctcttgggagaacactgcattaagaagagagactctcttgcttcttcaaagagctttgggaaattaaattgctaaatttgtattctctgtgaatttcactggcagttttgaacttcccttccttaaagtactctaaacctttaaaaaaaaatctgatttatgcagcagagatgggacagccactttttctttttaatttaagatgagctatttggagcttatgtaataatggcataaagccaactagaggatgttgtattttgcacatcagatgtttactagtggctttagtatttttctttgttttaaatggccaaaagaatccagaaacattaaggcagggacagcagtcagaatcgacataaagctttaaaaactcaaggttttttcaacctactgaggagtacttttctctagttgttaaatagctggagtttttcttattcaggtttaatggaggttgaattgatttttaaacacatataacagtaggaaatgaataaatgggcttctgcatttggctttctacctgttccaaggctagatcggaactggtagactacgctgtaagcaggatttcactacctctcttaaggtttagcaaacttctaaatagcccattttaagggagaacttactaactttattgtgaaaggtctaaatgcccacttgaatgaagctgagagagagatctagcaaaagctaaaactcatgttgtctatctttgaacttggtaaaaacccacaggtgctgctgcttatatctgtgaagcactagcttattctaggaatgcctgattctttaatattgcctaaatcggaacctttttctatgttgcacacatggttttcagatgacccagccatctacaagatctgaattctactgaaaatatctagaaatgtggaagagacctacttgcacattcttaacctgtatttgaacacaaaatatctatacttcatgctccagcccaagcctataccctgtaatagcatactattattgaaatcgcttgaccggtcttgttcacataggcctctgggagtgatttggttctttgccctaatgtttcatttgacggtctctttttgatcaaccaatttttctaaaagttcagtcgaaagcttttaagtatagcttcctcccttgaaaaaaaatgtaaactatgactgctgagtgataaaacactgtggtgtgaaagtgtcatcttcactgccaatcaggcaaagaccggaaagatttgcattttattatgtctgtcttatcatgcaatggaaatgatgctttttgtaagtatgcatcttaccaatgatgtaacggtttaatacctttgaatgttttaataaccaagttgctgctgaacttatactaaatcaggggaccaaaaaacttgctcttatcttctcaaattgtattctatatccattaatgtatcagttatcccaaagccttcaggtggaggggtttaccaccttcctaggtcgttcaaccaggttttgtgaggaatgcattcaaagtggctttataaaagaagattttctttagcaagaataatgaggtcatgtcatttgttaataagtatctgtgataaatccgtggttcaaggttaagccattctggtattctggtattagcaactgtaaattctgccacctcatacatggaacagagcttgtgggatgctaatagttagtgaagtatacatgatttaatttctaataatctttatgttttctttaaggatggtggtgtattgctctttttcagctttatttttaagagtacagtcaggaaaccaacaaggggcctaagagtggctgcccctgcttgggacattacagcaagtgaaacaaagttaatgtgacaagctttgctttgttatcattggtcttcactagaggataccttttacatgtacttctctcttggatcaaatatgtctttaactgtacatctcagtggctggaggccatgccttttaagcatgtgtaaaatttttaaagaaatgaacatacacatagttattttagtaatatttcctgaaagaaaaaccaaattctgctataagtcttgatcttcaatgaacttttaaataatgcatttagctggaaaacaagactttcccagcttgtgttacctagaagcgtgaatgtataggatacctgactactaagactatattctcagccctgccctgtcttttatttgcgggtctaatctaatattagaatatattaaccgcttaaggcattgaagccatatgggatggggaatgcatttcttcagtgtttctccgagagactttccatttccttggagttatggcggcaagtaagtatcatagtattaagaaatttgcctaaatctgagttgtgcctttctttactcacaaggcatgggctttgtcctggtgatcagtttgtaagccttcttccttcccagctccttaataaaagcaaagtgattgagtaggtaatgttcaaagtgtctgcctgtgtacatgtacttgtattgattatgtagttcagtaagatgtgcccaagtcatttcagaaagaaagacccttcagttttgatgcattttgctgaacacttgggtagtgagtgggatcctatccagttgaggaatgcttgcaatgctcattgaagggatttgctttgggactttgtcatcttccagaaaggaaacatattgtatatttggcccagtgtgattgattgctttatctttggtaacttttacttgaatgggatttgctgaattaatgactattgaatttaaaactaattatgagttgacaaataaataaaaggtagtgtttatgtctgagcttattgtgtttgagctaacaccaggttactcagtaaccatgacctgctcctccatttccatttattctcaacattaaatagttttatcttgttgttgccagaaatgcacttgtgccaggtattgtccctgctgtatgaaaagcttcttggcaatgaattctgtaatagtgccctacattatggttttctggtggaattgttttaacagtgacaacccaggatttccaatatatttttgttttattgttattaccaaaaattccactatgattgatgttcagtgattttctatagcaacttttttggtaactctttgggtttctgatttgttttagctaaaattttggggatatgatttgggtctttgattaatgtcagctgaacttggatttctagttcatgaagaaatctctcccaatacccatttatcctatttttagcaataattcgttaatgattccacttgattttcagaatattgtcctggttgattttgatttgacagcatacattatgaaatttgaaagtaggttaccattttgaggcagttggatataaattatgtaaatatgtatgattatgatttttataaatggcataacatgagtgtactaactaccttctatgctggccatgctacagattttctggaggtatgacaatagtatttttttatgctcagattaaaaatcagcttttcacctctccagtttttccaagtgatactcccagttctagagcaatctacagctgtttatgtgaggtgcccaacacccattcatctcaagtgcttcagtctttggtttatttcatgcactgtgccttcaaaatgaaatttttaaaagggactttaaatgaagttgaatagtagtttttaaaagtcaatttgtaatttatgtgaaatctaactgtaatgaggtcctttctgttttttatatgtaaacagatctactaatcctgtataaaagttattttacgatgtttgtctttctttgtgttttgtctcataatcttttttcagatgcaatatgccggaaaaagttataggtccagtttgaaaattatttagtttttctgcctatgctagtggaaaaatagtaccaggatcagaatacagggtatcacctatggaatgtttctgtatttatgaattgactcaaaagaaagctttgtttctgaaatcgcattatgtagtagccacagttttctgtttgtagctcagctagattgttatatatgttcaatcatttcacaataacaacacaaaactggtcattgaaaggtttttatgtacgcattttaaacttgttcgttaaaaatttggtcctttttccaggtgaggcccagttagaataatgtgtcccggcacttttaggcacagcaaggatgaattcaatatccccttttcacttagcaacaatgtgttacttctaccctaataggaattgggaaagcaaagttgtatgagaaacagactctgctgataaagtactcatagtccagaccagagaaatataaatggaaataggttatatttcaatagtgattggttcatctaaaagtctctgctgtaaaggaaataaagcatagaggtttgagcatgga

SEQ ID NO: 432634 - DNA, 7635 bp, Homo sapiens
cgcccggagcgctgagccgcgggagcggagccggggttagcggcgctgctggaagatggcgagcggccgggacgagcggccgccttggcggctagggcggctcctgttgctcatgtgcctgctgctgctggggagctcggcccgggcggctcacatcaagaaggcggaggcgactaccacaactacgagcgcgggcgccgaggcggccgagggccagttcgaccgctactaccacgaagaggagttggagtcggcgctgagggaggcggcggccgcgggcctccccggcctggcccgcctctttagcatcggccgctcggtggaaggccggccgctgtgggtgcttcgcctcaccgccggcctggggtcgctaatccctgagggcgacgcggggcctgacgctgccgggcccgacgctgcggggccgctgctgcccggccggccccaggtgaagctggtgggcaacatgcatggcgacgagaccgtgtcgcgccaggtgttgatctacttggcccgcgagctggcggccggctaccgccgcggggacccgcgcctggtccgcctgctcaacaccaccgacgtgtacctgctgcccagcctcaaccccgatggcttcgagcgtgcccgcgagggcgactgtggcttcggcgacggcggcccgtccggggccagcggccgcgacaatagtcgcggccgcgacctcaaccgaagctttcccgaccagtttagcaccggcgaaccccccgccctggacgaggtgcccgaggtgcgcgccctcatcgagtggatccgcaggaacaagtttgtgctttctggaaatctgcatggtggctcagtggtagcaagctatccttttgatgattctccagaacataaggccactggaatctatagcaaaacctcagatgatgaagtatttaaatacttggcaaaagcttatgcttcaaaccaccccataatgaaaactggtgagcctcattgtccaggagatgaagacgagactttcaaagatggaatcacaaacggcgcacattggtatgatgtggaaggtggtatgcaagattacaattatgtgtgggccaactgttttgagatcacattagaactgtcttgttgcaagtacccacctgcttcacagcttcgacaggaatgggagaacaatcgtgagtctttgatcacattgattgaaaaggttcacattggagtgaaaggatttgttaaagattccataacaggatctgggttagagaatgcaaccatctcagtggctggtattaatcataatatcacaacaggcagatttggtgatttctaccgattacttgttcctggaacttacaaccttacagtagttttaactgggtatatgccattgactgttactaatgtagtggtgaaagaaggaccagccacagaggtggatttttctcttaggccaactgtaacttcagtaatccctgacacgacagaggctgtatcaactgctagcacagttgctatacctaatattctttctggaacatcatcctcctaccagccaattcagccaaaggactttcaccaccaccatttccctgatatggaaatcttcttgagaaggtttgccaatgaatatcctaacattacccggctttattccttgggaaaatcagtagagtcaagagaactttatgtgatggagatatctgataatccgggtgtccatgaaccaggtgaaccagaatttaagtacattggaaatatgcatggaaatgaagtggttggaagagaactgctgttgaacctcatagaatacctttgtaagaactttggaacagaccctgaagtcacagatttggttcataacactagaattcaccttatgccatccatgaatcctgatgggtatgaaaagtcccaggaaggagattcaataagtgtaattggcagaaacaacagcaacaactttgacctgaaccgaaatttcccagaccagtttgttcagatcacagatcctacgcaaccagaaactattgctgtaatgagctggatgaagtcctatccatttgtactttcagcaaacctgcatggaggttctttggtggttaactacccttttgatgatgatgaacaaggacttgccacatatagtaaatcaccagatgatgctgtgttccaacaaatagcactttcttattccaaggaaaattcccagatgtttcaaggtagaccttgcaagaatatgtatcctaatgaatattttcctcatggaataacaaatggagctagttggtataatgtgccaggaggaatgcaggactggaactatttacaaacaaattgctttgaagtgactattgaactaggttgtgtgaaatatccacttgagaaagagctgccaaacttttgggaacagaatcgaagatcactaatccagtttatgaaacaggttcatcagggcgtcagaggatttgttctagatgccacagatggcaggggtatattaaatgccaccattagtgttgctgagattaatcacccagtgactacttacaaaactggagattactggcgtctcttggttccaggaacttataaaatcacagcatctgctcgagggtataatccagttaccaagaatgtgactgtcaagagtgaaggcgctattcaggtcaacttcacacttgttcgatcctcaacagattcaaacaatgaatcaaagaaaggaaaaggggctagcagcagcaccaatgatgccagtgatccaactactaaagagtttgaaactttaattaaagacctttcagcggagaatggtttggaaagcctcatgttacgctcctcctcaaatctggctctggctctttatcgataccattcctacaaagacttatcagagtttctgagaggacttgtaatgaactatccacatattacaaatcttaccaatttgggacagagcactgaatatcgtcacatttggtcccttgaaatctccaataagcccaatgtatctgagcctgaagaaccaaagattcgttttgttgctggtatccatggaaatgcgccagttggaactgaactgcttttggctctggcagaatttctctgcctgaactacaaaaagaacccagctgttacccaattggttgacaggactaggattgtgattgtcccttctctaaatccagatgggcgagagagagctcaagagaaagactgtacttcaaaaataggacaaacaaatgctcgtggcaaagatttggatacagacttcacaaataatgcctcccaacctgagaccaaagccatcattgaaaatttgattcaaaaacaggactttagtctttctgttgccttagatggtggttccatgctggtcacatatccttatgacaagccagtacagacagtggaaaataaagagactctgaagcatttggcatctctttatgcaaataatcgtctttgtgcatcatgatgcagctagttctgtggtgatagtctttgacacagataaccggatatttggtttgccaagggagcttgtggtaactgtatcaggtgctactatgtcggcattgatcctaacagcttgcattatttggtgcatctgctcaatcaagtctaatagacacaaggatggctttcatcggctcaggcagcatcatgatgagtatgaagatgaaattcgcatgatgtctaccggctccaagaagtccctcctaagccatgagttccaggatgaaacagacactgaagaggaaacattatattctagcaaacattgaaaaacacattttgcatatctcccagcataagtaccaagcaaaattacagttcctcttgggagaacactgcattaagaagagagactctcttgcttcttcaaagagctttgggaaattaaattgctaaatttgtattctctgtgaatttcactggcagttttgaacttcccttccttaaagtactctaaacctttaaaaaaaaatctgatttatgcagcagagatgggacagccactttttctttttaatttaagatgagctatttggagcttatgtaataatggcataaagccaactagaggatgttgtattttgcacatcagatgtttactagtggctttagtatttttctttgttttaaatggccaaaagaatccagaaacattaaggcagggacagcagtcagaatcgacataaagctttaaaaactcaaggttttttcaacctactgaggagtacttttctctagttgttaaatagctggagtttttcttattcaggtttaatggaggttgaattgatttttaaacacatataacagtaggaaatgaataaatgggcttctgcatttggctttctacctgttccaaggctagatcggaactggtagactacgctgtaagcaggatttcactacctctcttaaggtttagcaaacttctaaatagcccattttaagggagaacttactaactttattgtgaaaggtctaaatgcccacttgaatgaagctgagagagagatctagcaaaagctaaaactcatgttgtctatctttgaacttggtaaaaacccacaggtgctgctgcttatatctgtgaagcactagcttattctaggaatgcctgattctttaatattgcctaaatcggaacctttttctatgttgcacacatggttttcagatgacccagccatctacaagatctgaattctactgaaaatatctagaaatgtggaagagacctacttgcacattcttaacctgtatttgaacacaaaatatctatacttcatgctccagcccaagcctataccctgtaatagcatactattattgaaatcgcttgaccggtcttgttcacataggcctctgggagtgatttggttctttgccctaatgtttcatttgacggtctctttttgatcaaccaatttttctaaaagttcagtcgaaagcttttaagtatagcttcctcccttgaaaaaaaatgtaaactatgactgctgagtgataaaacactgtggtgtgaaagtgtcatcttcactgccaatcaggcaaagaccggaaagatttgcattttattatgtctgtcttatcatgcaatggaaatgatgctttttgtaagtatgcatcttaccaatgatgtaacggtttaatacctttgaatgttttaataaccaagttgctgctgaacttatactaaatcaggggaccaaaaaacttgctcttatcttctcaaattgtattctatatccattaatgtatcagttatcccaaagccttcaggtggaggggtttaccaccttcctaggtcgttcaaccaggttttgtgaggaatgcattcaaagtggctttataaaagaagattttctttagcaagaataatgaggtcatgtcatttgttaataagtatctgtgataaatccgtggttcaaggttaagccattctggtattctggtattagcaactgtaaattctgccacctcatacatggaacagagcttgtgggatgctaatagttagtgaagtatacatgatttaatttctaataatctttatgttttctttaaggatggtggtgtattgctctttttcagctttatttttaagagtacagtcaggaaaccaacaaggggcctaagagtggctgcccctgcttgggacattacagcaagtgaaacaaagttaatgtgacaagctttgctttgttatcattggtcttcactagaggataccttttacatgtacttctctcttggatcaaatatgtctttaactgtacatctcagtggctggaggccatgccttttaagcatgtgtaaaatttttaaagaaatgaacatacacatagttattttagtaatatttcctgaaagaaaaaccaaattctgctataagtcttgatcttcaatgaacttttaaataatgcatttagctggaaaacaagactttcccagcttgtgttacctagaagcgtgaatgtataggatacctgactactaagactatattctcagccctgccctgtcttttatttgcgggtctaatctaatattagaatatattaaccgcttaaggcattgaagccatatgggatggggaatgcatttcttcagtgtttctccgagagactttccatttccttggagttatggcggcaagtaagtatcatagtattaagaaatttgcctaaatctgagttgtgcctttctttactcacaaggcatgggctttgtcctggtgatcagtttgtaagccttcttccttcccagctccttaataaaagcaaagtgattgagtaggtaatgttcaaagtgtctgcctgtgtacatgtacttgtattgattatgtagttcagtaagatgtgcccaagtcatttcagaaagaaagacccttcagttttgatgcattttgctgaacacttgggtagtgagtgggatcctatccagttgaggaatgcttgcaatgctcattgaagggatttgctttgggactttgtcatcttccagaaaggaaacatattgtatatttggcccagtgtgattgattgctttatctttggtaacttttacttgaatgggatttgctgaattaatgactattgaatttaaaactaattatgagttgacaaataaataaaaggtagtgtttatgtctgagcttattgtgtttgagctaacaccaggttactcagtaaccatgacctgctcctccatttccatttattctcaacattaaatagttttatcttgttgttgccagaaatgcacttgtgccaggtattgtccctgctgtatgaaaagcttcttggcaatgaattctgtaatagtgccctacattatggttttctggtggaattgttttaacagtgacaacccaggatttccaatatatttttgttttattgttattaccaaaaattccactatgattgatgttcagtgattttctatagcaacttttttggtaactctttgggtttctgatttgttttagctaaaattttggggatatgatttgggtctttgattaatgtcagctgaacttggatttctagttcatgaagaaatctctcccaatacccatttatcctatttttagcaataattcgttaatgattccacttgattttcagaatattgtcctggttgattttgatttgacagcatacattatgaaatttgaaagtaggttaccattttgaggcagttggatataaattatgtaaatatgtatgattatgatttttataaatggcataacatgagtgtactaactaccttctatgctggccatgctacagattttctggaggtatgacaatagtatttttttatgctcagattaaaaatcagcttttcacctctccagtttttccaagtgatactcccagttctagagcaatctacagctgtttatgtgaggtgcccaacacccattcatctcaagtgcttcagtctttggtttatttcatgcactgtgccttcaaaatgaaatttttaaaagggactttaaatgaagttgaatagtagtttttaaaagtcaatttgtaatttatgtgaaatctaactgtaatgaggtcctttctgttttttatatgtaaacagatctactaatcctgtataaaagttattttacga

SEQ ID NO: 432635 - DNA, 7464 bp, Homo sapiens
cgcccggagcgctgagccgcgggagcggagccggggttagcggcgctgctggaagatggcgagcggccgggacgagcggccgccttggcggctagggcggctcctgttgctcatgtgcctgctgctgctggggagctcggcccgggcggctcacatcaagaaggcggaggcgactaccacaactacgagcgcgggcgccgaggcggccgagggccagttcgaccgctactaccacgaagaggagttggagtcggcgctgagggaggcggcggccgcgggcctccccggcctggcccgcctctttagcatcggccgctcggtggaaggccggccgctgtgggtgcttcgcctcaccgccggcctggggtcgctaatccctgagggcgacgcggggcctgacgctgccgggcccgacgctgcggggccgctgctgcccggccggccccaggtgaagctggtgggcaacatgcatggcgacgagaccgtgtcgcgccaggtgttgatctacttggcccgcgagctggcggccggctaccgccgcggggacccgcgcctggtccgcctgctcaacaccaccgacgtgtacctgctgcccagcctcaaccccgatggcttcgagcgtgcccgcgagggcgactgtggcttcggcgacggcggcccgtccggggccagcggccgcgacaatagtcgcggccgcgacctcaaccgaagctttcccgaccagtttagcaccggcgaaccccccgccctggacgaggtgcccgaggtgcgcgccctcatcgagtggatccgcaggaacaagtttgtgctttctggaaatctgcatggtggctcagtggtagcaagctatccttttgatgattctccagaacataaggccactggaatctatagcaaaacctcagatgatgaagtatttaaatacttggcaaaagcttatgcttcaaaccaccccataatgaaaactggtgagcctcattgtccaggagatgaagacgagactttcaaagatggaatcacaaacggcgcacattggtatgatgtggaaggtggtatgcaagattacaattatgtgtgggccaactgttttgagatcacattagaactgtcttgttgcaagtacccacctgcttcacagcttcgacaggaatgggagaacaatcgtgagtctttgatcacattgattgaaaaggttcacattggagtgaaaggatttgttaaagattccataacaggatctgggttagagaatgcaaccatctcagtggctggtattaatcataatatcacaacaggcagatttggtgatttctaccgattacttgttcctggaacttacaaccttacagtagttttaactgggtatatgccattgactgttactaatgtagtggtgaaagaaggaccagccacagaggtggatttttctcttaggccaactgtaacttcagtaatccctgacacgacagaggctgtatcaactgctagcacagttgctatacctaatattctttctggaacatcatcctcctaccagccaattcagccaaaggactttcaccaccaccatttccctgatatggaaatcttcttgagaaggtttgccaatgaatatcctaacattacccggctttattccttgggaaaatcagtagagtcaagagaactttatgtgatggagatatctgataatccgggtgtccatgaaccaggtgaaccagaatttaagtacattggaaatatgcatggaaatgaagtggttggaagagaactgctgttgaacctcatagaatacctttgtaagaactttggaacagaccctgaagtcacagatttggttcataacactagaattcaccttatgccatccatgaatcctgatgggtatgaaaagtcccaggaaggagattcaataagtgtaattggcagaaacaacagcaacaactttgacctgaaccgaaatttcccagaccagtttgttcagatcacagatcctacgcaaccagaaactattgctgtaatgagctggatgaagtcctatccatttgtactttcagcaaacctgcatggaggttctttggtggttaactacccttttgatgatgatgaacaaggacttgccacatatagtaaatcaccagatgatgctgtgttccaacaaatagcactttcttattccaaggaaaattcccagatgtttcaaggtagaccttgcaagaatatgtatcctaatgaatattttcctcatggaataacaaatggagctagttggtataatgtgccaggaggaatgcaggactggaactatttacaaacaaattgctttgaagtgactattgaactaggttgtgtgaaatatccacttgagaaagagctgccaaacttttgggaacagaatcgaagatcactaatccagtttatgaaacaggttcatcagggcgtcagaggatttgttctagatgccacagatggcaggggtatattaaatgccaccattagtgttgctgagattaatcacccagtgactacttacaaaactggagattactggcgtctcttggttccaggaacttataaaatcacagcatctgctcgagggtataatccagttaccaagaatgtgactgtcaagagtgaaggcgctattcaggtcaacttcacacttgttcgatcctcaacagattcaaacaatgaatcaaagaaaggaaaaggggctagcagcagcaccaatgatgccagtgatccaactactaaagagtttgaaactttaattaaagacctttcagcggagaatggtttggaaagcctcatgttacgctcctcctcaaatctggctctggctctttatcgataccattcctacaaagacttatcagagtttctgagaggacttgtaatgaactatccacatattacaaatcttaccaatttgggacagagcactgaatatcgtcacatttggtcccttgaaatctccaataagcccaatgtatctgagcctgaagaaccaaagattcgttttgttgctggtatccatggaaatgcgccagttggaactgaactgcttttggctctggcagaatttctctgcctgaactacaaaaagaacccagctgttacccaattggttgacaggactaggattgtgattgtcccttctctaaatccagatgggcgagagagagctcaagagaaagactgtacttcaaaaataggacaaacaaatgctcgtggcaaagatttggatacagacttcacaaataatgcctcccaacctgagaccaaagccatcattgaaaatttgattcaaaaacaggactttagtctttctgttgccttagatggtggttccatgctggtcacatatccttatgacaagccagtacagacagtggaaaataaagagactctgaagcatttggcatctctttatgcaaataatcatccatccatgcacatgggtcagcccagttgcccaaataaatcagatgagaatattccaggaggagtaatgcgtggagcagaatggcatagtcacctgggcagcatgaaggattatagtgtcacctatggccattgtccggaaatcacagtatacacaagctgctgttactttcctagtgctgcacgactcccttccttgtgggcagacaataagagatctcttcttagtatgttagtggaggttcacaagggagttcatggatttgttaaagataagactggaaagccaatctctaaagcagtcattgtacttaatgaaggaataaaggtacaaacaaaagagggaggttatttccatgtactcttagcgccaggtgtccataacattattgccatcgctgatgggtaccagcaacaacattcacaggtctttgtgcatcatgatgcagctagttctgtggtgatagtctttgacacagataaccggatatttggtttgccaagggagcttgtggtaactgtatcaggtgctactatgtcggcattgatcctaacagcttgcattatttggtgcatctgctcaatcaagtctaatagacacaaggatggctttcatcggctcaggcagcatcatgatgagtatgaagatgaaattcgcatgatgtctaccggctccaagaagtccctcctaagccatgagttccaggatgaaacagacactgaagaggaaacattatattctagcaaacattgaaaaacacattttgcatatctcccagcataagtaccaagcaaaattacagttcctcttgggagaacactgcattaagaagagagactctcttgcttcttcaaagagctttgggaaattaaattgctaaatttgtattctctgtgaatttcactggcagttttgaacttcccttccttaaagtactctaaacctttaaaaaaaaatctgatttatgcagcagagatgggacagccactttttctttttaatttaagatgagctatttggagcttatgtaataatggcataaagccaactagaggatgttgtattttgcacatcagatgtttactagtggctttagtatttttctttgttttaaatggccaaaagaatccagaaacattaaggcagggacagcagtcagaatcgacataaagctttaaaaactcaaggttttttcaacctactgaggagtacttttctctagttgttaaatagctggagtttttcttattcaggtttaatggaggttgaattgatttttaaacacatataacagtaggaaatgaataaatgggcttctgcatttggctttctacctgttccaaggctagatcggaactggtagactacgctgtaagcaggatttcactacctctcttaaggtttagcaaacttctaaatagcccattttaagggagaacttactaactttattgtgaaaggtctaaatgcccacttgaatgaagctgagagagagatctagcaaaagctaaaactcatgttgtctatctttgaacttggtaaaaacccacaggtgctgctgcttatatctgtgaagcactagcttattctaggaatgcctgattctttaatattgcctaaatcggaacctttttctatgttgcacacatggttttcagatgacccagccatctacaagatctgaattctactgaaaatatctagaaatgtggaagagacctacttgcacattcttaacctgtatttgaacacaaaatatctatacttcatgctccagcccaagcctataccctgtaatagcatactattattgaaatcgcttgaccggtcttgttcacataggcctctgggagtgatttggttctttgccctaatgtttcatttgacggtctctttttgatcaaccaatttttctaaaagttcagtcgaaagcttttaagtatagcttcctcccttgaaaaaaaatgtaaactatgactgctgagtgataaaacactgtggtgtgaaagtgtcatcttcactgccaatcaggcaaagaccggaaagatttgcattttattatgtctgtcttatcatgcaatggaaatgatgctttttgtaagtatgcatcttaccaatgatgtaacggtttaatacctttgaatgttttaataaccaagttgctgctgaacttatactaaatcaggggaccaaaaaacttgctcttatcttctcaaattgtattctatatccattaatgtatcagttatcccaaagccttcaggtggaggggtttaccaccttcctaggtcgttcaaccaggttttgtgaggaatgcattcaaagtggctttataaaagaagattttctttagcaagaataatgaggtcatgtcatttgttaataagtatctgtgataaatccgtggttcaaggttaagccattctggtattctggtattagcaactgtaaattctgccacctcatacatggaacagagcttgtgggatgctaatagttagtgaagtatacatgatttaatttctaataatctttatgttttctttaaggatggtggtgtattgctctttttcagctttatttttaagagtacagtcaggaaaccaacaaggggcctaagagtggctgcccctgcttgggacattacagcaagtgaaacaaagttaatgtgacaagctttgctttgttatcattggtcttcactagaggataccttttacatgtacttctctcttggatcaaatatgtctttaactgtacatctcagtggctggaggccatgccttttaagcatgtgtaaaatttttaaagaaatgaacatacacatagttattttagtaatatttcctgaaagaaaaaccaaattctgctataagtcttgatcttcaatgaacttttaaataatgcatttagctggaaaacaagactttcccagcttgtgttacctagaagcgtgaatgtataggatacctgactactaagactatattctcagccctgccctgtcttttatttgcgggtctaatctaatattagaatatattaaccgcttaaggcattgaagccatatgggatggggaatgcatttcttcagtgtttctccgagagactttccatttccttggagttatggcggcaagtaagtatcatagtattaagaaatttgcctaaatctgagttgtgcctttctttactcacaaggcatgggctttgtcctggtgatcagtttgtaagccttcttccttcccagctccttaataaaagcaaagtgattgagtaggtaatgttcaaagtgtctgcctgtgtacatgtacttgtattgattatgtagttcagtaagatgtgcccaagtcatttcagaaagaaagacccttcagttttgatgcattttgctgaacacttgggtagtgagtgggatcctatccagttgaggaatgcttgcaatgctcattgaagggatttgctttgggactttgtcatcttccagaaaggaaacatattgtatatttggcccagtgtgattgattgctttatctttggtaacttttacttgaatgggatttgctgaattaatgactattgaatttaaaactaattatgagttgacaaataaataaaaggtagtgtttatgtctgaaaaaaaaaaaaaaaaagaaaaaaaaaaaaaaaaaaaaaaaaaacgaaaaaaaaaaaaaaaaaaaaaaaaaaaaaaaaagaaaaaaaacaaaaaaagggggggggggggcataaattcccgggggggggccaatagaatgcgcccacacggtttatgggaagaggagccgcccccatacagcgggagcgtgtaaaacagcccgagccacgcgcggctaaaaacacacgacggcgaagcgaaccaccaccgacgccgaacacactgggagagccacccatgtggggggagacgacacggggacacacaccccaacgaaatacggcccagcgacaatacaatacgaggcgaaaggataaacccccaactgctgggagacaaaacg

SEQ ID NO: 432636 - DNA, 5904 bp, Homo sapiens
gaatgtcatatattctgaaatcatcagaatgtgctaaagtttaaacagtgttatttatattcttcatgataaagagaaacaaagcctatgaaaaattagccttcagaaatattttaatgaacatttacattgaactttactctgaactcctaaattcctgtttgttccatttatttgtgttgacaatctgttattttgaatatgacctcccaagataattagatgatgatgtttattattgaaatctggtgtccttgtacttaatccaggttcatcagggcgtcagaggatttgttctagatgccacagatggcaggggtatattaaatgccaccattagtgttgctgagattaatcacccagtgactacttacaaaactggagattactggcgtctcttggttccaggaacttataaaatcacagcatctgctcgagggtataatccagttaccaagaatgtgactgtcaagagtgaaggcgctattcaggtcaacttcacacttgttcgatcctcaacagattcaaacaatgaatcaaagaaaggaaaaggggctagcagcagcaccaatgatgccagtgatccaactactaaagagtttgaaactttaattaaagacctttcagcggagaatggtttggaaagcctcatgttacgctcctcctcaaatctggctctggctctttatcgataccattcctacaaagacttatcagagtttctgagaggacttgtaatgaactatccacatattacaaatcttaccaatttgggacagagcactgaatatcgtcacatttggtcccttgaaatctccaataagcccaatgtatctgagcctgaagaaccaaagattcgttttgttgctggtatccatggaaatgcgccagttggaactgaactgcttttggctctggcagaatttctctgcctgaactacaaaaagaacccagctgttacccaattggttgacaggactaggattgtgattgtcccttctctaaatccagatgggcgagagagagctcaagagaaagactgtacttcaaaaataggacaaacaaatgctcgtggcaaagatttggatacagacttcacaaataatgcctcccaacctgagaccaaagccatcattgaaaatttgattcaaaaacaggactttagtctttctgttgccttagatggtggttccatgctggtcacatatccttatgacaagccagtacagacagtggaaaataaagagactctgaagcatttggcatctctttatgcaaataatcatccatccatgcacatgggtcagcccagttgcccaaataaatcagatgagaatattccaggaggagtaatgcgtggagcagaatggcatagtcacctgggcagcatgaaggattatagtgtcacctatggccattgtccggaaatcacagtatacacaagctgctgttactttcctagtgctgcacgactcccttccttgtgggcagacaataagagatctcttcttagtatgttagtggaggttcacaagggagttcatggatttgttaaagataagactggaaagccaatctctaaagcagtcattgtacttaatgaaggaataaaggtacaaacaaaagagggaggttatttccatgtactcttagcgccaggtgtccataacattattgccatcgctgatgggtaccagcaacaacattcacaggtctttgtgcatcatgatgcagctagttctgtggtgatagtctttgacacagataaccggatatttggtttgccaagggagcttgtggtaactgtatcaggtgctactatgtcggcattgatcctaacagcttgcattatttggtgcatctgctcaatcaagtctaatagacacaaggatggctttcatcggctcaggcagcatcatgatgagtatgaagatgaaattcgcatgatgtctaccggctccaagaagtccctcctaagccatgagttccaggatgaaacagacactgaagaggaaacattatattctagcaaacattgaaaaacacattttgcatatctcccagcataagtaccaagcaaaattacagttcctcttgggagaacactgcattaagaagagagactctcttgcttcttcaaagagctttgggaaattaaattgctaaatttgtattctctgtgaatttcactggcagttttgaacttcccttccttaaagtactctaaacctttaaaaaaaaatctgatttatgcagcagagatgggacagccactttttctttttaatttaagatgagctatttggagcttatgtaataatggcataaagccaactagaggatgttgtattttgcacatcagatgtttactagtggctttagtatttttctttgttttaaatggccaaaagaatccagaaacattaaggcagggacagcagtcagaatcgacataaagctttaaaaactcaaggttttttcaacctactgaggagtacttttctctagttgttaaatagctggagtttttcttattcaggtttaatggaggttgaattgatttttaaacacatataacagtaggaaatgaataaatgggcttctgcatttggctttctacctgttccaaggctagatcggaactggtagactacgctgtaagcaggatttcactacctctcttaaggtttagcaaacttctaaatagcccattttaagggagaacttactaactttattgtgaaaggtctaaatgcccacttgaatgaagctgagagagagatctagcaaaagctaaaactcatgttgtctatctttgaacttggtaaaaacccacaggtgctgctgcttatatctgtgaagcactagcttattctaggaatgcctgattctttaatattgcctaaatcggaacctttttctatgttgcacacatggttttcagatgacccagccatctacaagatctgaattctactgaaaatatctagaaatgtggaagagacctacttgcacattcttaacctgtatttgaacacaaaatatctatacttcatgctccagcccaagcctataccctgtaatagcatactattattgaaatcgcttgaccggtcttgttcacataggcctctgggagtgatttggttctttgccctaatgtttcatttgacggtctctttttgatcaaccaatttttctaaaagttcagtcgaaagcttttaagtatagcttcctcccttgaaaaaaaatgtaaactatgactgctgagtgataaaacactgtggtgtgaaagtgtcatcttcactgccaatcaggcaaagaccggaaagatttgcattttattatgtctgtcttatcatgcaatggaaatgatgctttttgtaagtatgcatcttaccaatgatgtaacggtttaatacctttgaatgttttaataaccaagttgctgctgaacttatactaaatcaggggaccaaaaaacttgctcttatcttctcaaattgtattctatatccattaatgtatcagttatcccaaagccttcaggtggaggggtttaccaccttcctaggtcgttcaaccaggttttgtgaggaatgcattcaaagtggctttataaaagaagattttctttagcaagaataatgaggtcatgtcatttgttaataagtatctgtgataaatccgtggttcaaggttaagccattctggtattctggtattagcaactgtaaattctgccacctcatacatggaacagagcttgtgggatgctaatagttagtgaagtatacatgatttaatttctaataatctttatgttttctttaaggatggtggtgtattgctctttttcagctttatttttaagagtacagtcaggaaaccaacaaggggcctaagagtggctgcccctgcttgggacattacagcaagtgaaacaaagttaatgtgacaagctttgctttgttatcattggtcttcactagaggataccttttacatgtacttctctcttggatcaaatatgtctttaactgtacatctcagtggctggaggccatgccttttaagcatgtgtaaaatttttaaagaaatgaacatacacatagttattttagtaatatttcctgaaagaaaaaccaaattctgctataagtcttgatcttcaatgaacttttaaataatgcatttagctggaaaacaagactttcccagcttgtgttacctagaagcgtgaatgtataggatacctgactactaagactatattctcagccctgccctgtcttttatttgcgggtctaatctaatattagaatatattaaccgcttaaggcattgaagccatatgggatggggaatgcatttcttcagtgtttctccgagagactttccatttccttggagttatggcggcaagtaagtatcatagtattaagaaatttgcctaaatctgagttgtgcctttctttactcacaaggcatgggctttgtcctggtgatcagtttgtaagccttcttccttcccagctccttaataaaagcaaagtgattgagtaggtaatgttcaaagtgtctgcctgtgtacatgtacttgtattgattatgtagttcagtaagatgtgcccaagtcatttcagaaagaaagacccttcagttttgatgcattttgctgaacacttgggtagtgagtgggatcctatccagttgaggaatgcttgcaatgctcattgaagggatttgctttgggactttgtcatcttccagaaaggaaacatattgtatatttggcccagtgtgattgattgctttatctttggtaacttttacttgaatgggatttgctgaattaatgactattgaatttaaaactaattatgagttgacaaataaataaaaggtagtgtttatgtctgagcttattgtgtttgagctaacaccaggttactcagtaaccatgacctgctcctccatttccatttattctcaacattaaatagttttatcttgttgttgccagaaatgcacttgtgccaggtattgtccctgctgtatgaaaagcttcttggcaatgaattctgtaatagtgccctacattatggttttctggtggaattgttttaacagtgacaacccaggatttccaatatatttttgttttattgttattaccaaaaattccactatgattgatgttcagtgattttctatagcaacttttttggtaactctttgggtttctgatttgttttagctaaaattttggggatatgatttgggtctttgattaatgtcagctgaacttggatttctagttcatgaagaaatctctcccaatacccatttatcctatttttagcaataattcgttaatgattccacttgattttcagaatattgtcctggttgattttgatttgacagcatacattatgaaatttgaaagtaggttaccattttgaggcagttggatataaattatgtaaatatgtatgattatgatttttataaatggcataacatgagtgtactaactaccttctatgctggccatgctacagattttctggaggtatgacaatagtatttttttatgctcagattaaaaatcagcttttcacctctccagtttttccaagtgatactcccagttctagagcaatctacagctgtttatgtgaggtgcccaacacccattcatctcaagtgcttcagtctttggtttatttcatgcactgtgccttcaaaatgaaatttttaaaagggactttaaatgaagttgaatagtagtttttaaaagtcaatttgtaatttatgtgaaatctaactgtaatgaggtcctttctgttttttatatgtaaacagatctactaatcctgtataaaagttattttacga

SEQ ID NO: 432637 - DNA, 4977 bp, Homo sapiens
agttcgacggagactctctctcgccagctgttacccaattggttgacaggactaggattgtgattgtcccttctctaaatccagatgggcgagagagagctcaagagaaagactgtacttcaaaaataggacaaacaaatgctcgtggcaaagatttggatacagacttcacaaataatgcctcccaacctgagaccaaagccatcattgaaaatttgattcaaaaacaggactttagtctttctgttgccttagatggtggttccatgctggtcacatatccttatgacaagccagtacagacagtggaaaataaagagactctgaagcatttggcatctctttatgcaaataatcatccatccatgcacatgggtcagcccagttgcccaaataaatcagatgagaatattccaggaggagtaatgcgtggagcagaatggcatagtcacctgggcagcatgaaggattatagtgtcacctatggccattgtccggaaatcacagtatacacaagctgctgttactttcctagtgctgcacgactcccttccttgtgggcagacaataagagatctcttcttagtatgttagtggaggttcacaagggagttcatggatttgttaaagataagactggaaagccaatctctaaagcagtcattgtacttaatgaaggaataaaggtacaaacaaaagagggaggttatttccatgtactcttagcgccaggtgtccataacattattgccatcgctgatgggtaccagcaacaacattcacaggtctttgtgcatcatgatgcagctagttctgtggtgatagtctttgacacagataaccggatatttggtttgccaagggagcttgtggtaactgtatcaggtgctactatgtcggcattgatcctaacagcttgcattatttggtgcatctgctcaatcaagtctaatagacacaaggatggctttcatcggctcaggcagcatcatgatgagtatgaagatgaaattcgcatgatgtctaccggctccaagaagtccctcctaagccatgagttccaggatgaaacagacactgaagaggaaacattatattctagcaaacattgaaaaacacattttgcatatctcccagcataagtaccaagcaaaattacagttcctcttgggagaacactgcattaagaagagagactctcttgcttcttcaaagagctttgggaaattaaattgctaaatttgtattctctgtgaatttcactggcagttttgaacttcccttccttaaagtactctaaacctttaaaaaaaaatctgatttatgcagcagagatgggacagccactttttctttttaatttaagatgagctatttggagcttatgtaataatggcataaagccaactagaggatgttgtattttgcacatcagatgtttactagtggctttagtatttttctttgttttaaatggccaaaagaatccagaaacattaaggcagggacagcagtcagaatcgacataaagctttaaaaactcaaggttttttcaacctactgaggagtacttttctctagttgttaaatagctggagtttttcttattcaggtttaatggaggttgaattgatttttaaacacatataacagtaggaaatgaataaatgggcttctgcatttggctttctacctgttccaaggctagatcggaactggtagactacgctgtaagcaggatttcactacctctcttaaggtttagcaaacttctaaatagcccattttaagggagaacttactaactttattgtgaaaggtctaaatgcccacttgaatgaagctgagagagagatctagcaaaagctaaaactcatgttgtctatctttgaacttggtaaaaacccacaggtgctgctgcttatatctgtgaagcactagcttattctaggaatgcctgattctttaatattgcctaaatcggaacctttttctatgttgcacacatggttttcagatgacccagccatctacaagatctgaattctactgaaaatatctagaaatgtggaagagacctacttgcacattcttaacctgtatttgaacacaaaatatctatacttcatgctccagcccaagcctataccctgtaatagcatactattattgaaatcgcttgaccggtcttgttcacataggcctctgggagtgatttggttctttgccctaatgtttcatttgacggtctctttttgatcaaccaatttttctaaaagttcagtcgaaagcttttaagtatagcttcctcccttgaaaaaaaatgtaaactatgactgctgagtgataaaacactgtggtgtgaaagtgtcatcttcactgccaatcaggcaaagaccggaaagatttgcattttattatgtctgtcttatcatgcaatggaaatgatgctttttgtaagtatgcatcttaccaatgatgtaacggtttaatacctttgaatgttttaataaccaagttgctgctgaacttatactaaatcaggggaccaaaaaacttgctcttatcttctcaaattgtattctatatccattaatgtatcagttatcccaaagccttcaggtggaggggtttaccaccttcctaggtcgttcaaccaggttttgtgaggaatgcattcaaagtggctttataaaagaagattttctttagcaagaataatgaggtcatgtcatttgttaataagtatctgtgataaatccgtggttcaaggttaagccattctggtattctggtattagcaactgtaaattctgccacctcatacatggaacagagcttgtgggatgctaatagttagtgaagtatacatgatttaatttctaataatctttatgttttctttaaggatggtggtgtattgctctttttcagctttatttttaagagtacagtcaggaaaccaacaaggggcctaagagtggctgcccctgcttgggacattacagcaagtgaaacaaagttaatgtgacaagctttgctttgttatcattggtcttcactagaggataccttttacatgtacttctctcttggatcaaatatgtctttaactgtacatctcagtggctggaggccatgccttttaagcatgtgtaaaatttttaaagaaatgaacatacacatagttattttagtaatatttcctgaaagaaaaaccaaattctgctataagtcttgatcttcaatgaacttttaaataatgcatttagctggaaaacaagactttcccagcttgtgttacctagaagcgtgaatgtataggatacctgactactaagactatattctcagccctgccctgtcttttatttgcgggtctaatctaatattagaatatattaaccgcttaaggcattgaagccatatgggatggggaatgcatttcttcagtgtttctccgagagactttccatttccttggagttatggcggcaagtaagtatcatagtattaagaaatttgcctaaatctgagttgtgcctttctttactcacaaggcatgggctttgtcctggtgatcagtttgtaagccttcttccttcccagctccttaataaaagcaaagtgattgagtaggtaatgttcaaagtgtctgcctgtgtacatgtacttgtattgattatgtagttcagtaagatgtgcccaagtcatttcagaaagaaagacccttcagttttgatgcattttgctgaacacttgggtagtgagtgggatcctatccagttgaggaatgcttgcaatgctcattgaagggatttgctttgggactttgtcatcttccagaaaggaaacatattgtatatttggcccagtgtgattgattgctttatctttggtaacttttacttgaatgggatttgctgaattaatgactattgaatttaaaactaattatgagttgacaaataaataaaaggtagtgtttatgtctgagcttattgtgtttgagctaacaccaggttactcagtaaccatgacctgctcctccatttccatttattctcaacattaaatagttttatcttgttgttgccagaaatgcacttgtgccaggtattgtccctgctgtatgaaaagcttcttggcaatgaattctgtaatagtgccctacattatggttttctggtggaattgttttaacagtgacaacccaggatttccaatatatttttgttttattgttattaccaaaaattccactatgattgatgttcagtgattttctatagcaacttttttggtaactctttgggtttctgatttgttttagctaaaattttggggatatgatttgggtctttgattaatgtcagctgaacttggatttctagttcatgaagaaatctctcccaatacccatttatcctatttttagcaataattcgttaatgattccacttgattttcagaatattgtcctggttgattttgatttgacagcatacattatgaaatttgaaagtaggttaccattttgaggcagttggatataaattatgtaaatatgtatgattatgatttttataaatggcataacatgagtgtactaactaccttctatgctggccatgctacagattttctggaggtatgacaatagtatttttttatgctcagattaaaaatcagcttttcacctctccagtttttccaagtgatactcccagttctagagcaatctacagctgtttatgtgaggtgcccaacacccattcatctcaagtgcttcagtctttggtttatttcatgcactgtgccttcaaaatgaaatttttaaaagggactttaaatgaagttgaatagtagtttttaaaagtcaatttgtaatttatgtgaaatctaactgtaatgaggtcctttctgttttttatatgtaaacagatctactaatcctgtataaaagttattttacga

SEQ ID NO: 432638 - DNA, 5361 bp, Homo sapiens
cgcccggagcgctgagccgcgggagcggagccggggttagcggcgctgctggaagatggcgagcggccgggacgagcggccgccttggcggctagggcggctcctgttgctcatgtgcctgctgctgctggggagctcggcccgggcggctcacatcaagaaggcggaggcgactaccacaactacgagcgcgggcgccgaggcggccgagggccagttcgaccgctactaccacgaagaggagttggagtcggcgctgagggaggcggcggccgcgggcctccccggcctggcccgcctctttagcatcggccgctcggtggaaggccggccgctgtgggtgcttcgcctcaccgccggcctggggtcgctaatccctgagggcgacgcggggcctgacgctgccgggcccgacgctgcggggccgctgctgcccggccggccccaggtgaagctggtgggcaacatgcatggcgacgagaccgtgtcgcgccaggtgttgatctacttggcccgcgagctggcggccggctaccgccgcggggacccgcgcctggtccgcctgctcaacaccaccgacgtgtacctgctgcccagcctcaaccccgatggcttcgagcgtgcccgcgagggcgactgtggcttcggcgacggcggcccgtccggggccagcggccgcgacaatagtcgcggccgcgacctcaaccgaagctttcccgaccagtttagcaccggcgaaccccccgccctggacgaggtgcccgaggtgcgcgccctcatcgagtggatccgcaggaacaagtttgtgctttctggaaatctgcatggtggctcagtggtagcaagctatccttttgatgattctccagaacataaggccactggaatctatagcaaaacctcagatgatgaagtatttaaatacttggcaaaagcttatgcttcaaaccaccccataatgaaaactggtgagcctcattgtccaggagatgaagacgagactttcaaagatggaatcacaaacggcgcacattggtatgatgtggaaggtggtatgcaagattacaattatgtgtgggccaactgttttgagatcacattagaactgtcttgttgcaagtacccacctgcttcacagcttcgacaggaatgggagaacaatcgtgagtctttgatcacattgattgaaaaggttcacattggagtgaaaggatttgttaaagattccataacaggatctgggttagagaatgcaaccatctcagtggctggtattaatcataatatcacaacaggcagatttggtgatttctaccgattacttgttcctggaacttacaaccttacagtagttttaactgggtatatgccattgactgttactaatgtagtggtgaaagaaggaccagccacagaggtggatttttctcttaggccaactgtaacttcagtaatccctgacacgacagaggctgtatcaactgctagcacagttgctatacctaatattctttctggaacatcatcctcctaccagccaattcagccaaaggactttcaccaccaccatttccctgatatggaaatcttcttgagaaggtttgccaatgaatatcctaacattacccggctttattccttgggaaaatcagtagagtcaagagaactttatgtgatggagatatctgataatccgggtgtccatgaaccaggtgaaccagaatttaagtacattggaaatatgcatggaaatgaagtggttggaagagaactgctgttgaacctcatagaatacctttgtaagaactttggaacagaccctgaagtcacagatttggttcataacactagaattcaccttatgccatccatgaatcctgatgggtatgaaaagtcccaggaaggagattcaataagtgtaattggcagaaacaacagcaacaactttgacctgaaccgaaatttcccagaccagtttgttcagatcacagatcctacgcaaccagaaactattgctgtaatgagctggatgaagtcctatccatttgtactttcagcaaacctgcatggaggttctttggtggttaactacccttttgatgatgatgaacaaggacttgccacatatagtaaatcaccagatgatgctgtgttccaacaaatagcactttcttattccaaggaaaattcccagatgtttcaaggtagaccttgcaagaatatgtatcctaatgaatattttcctcatggaataacaaatggagctagttggtataatgtgccaggaggaatgcaggactggaactatttacaaacaaattgctttgaagtgactattgaactaggttgtgtgaaatatccacttgagaaagagctgccaaacttttgggaacagaatcgaagatcactaatccagtttatgaaacaggttcatcagggcgtcagaggatttgttctagatgccacagatggcaggggtatattaaatgccaccattagtgttgctgagattaatcacccagtgactacttacaaaactggagattactggcgtctcttggttccaggaacttataaaatcacagcatctgctcgagggtataatccagttaccaagaatgtgactgtcaagagtgaaggcgctattcaggtcaacttcacacttgttcgatcctcaacagattcaaacaatgaatcaaagaaaggaaaaggggctagcagcagcaccaatgatgccagtgatccaactactaaagagtttgaaactttaattaaagacctttcagcggagaatggtttggaaagcctcatgttacgctcctcctcaaatctggctctggctctttatcgataccattcctacaaagacttatcagagtttctgagaggacttgtaatgaactatccacatattacaaatcttaccaagggaccaaaaaacttgctcttatcttctcaaattgtattctatatccattaatgtatcagttatcccaaagccttcaggtggaggggtttaccaccttcctaggtcgttcaaccaggttttgtgaggaatgcattcaaagtggctttataaaagaagattttctttagcaagaataatgaggtcatgtcatttgttaataagtatctgtgataaatccgtggttcaaggttaagccattctggtattctggtattagcaactgtaaattctgccacctcatacatggaacagagcttgtgggatgctaatagttagtgaagtatacatgatttaatttctaataatctttatgttttctttaaggatggtggtgtattgctctttttcagctttatttttaagagtacagtcaggaaaccaacaaggggcctaagagtggctgcccctgcttgggacattacagcaagtgaaacaaagttaatgtgacaagctttgctttgttatcattggtcttcactagaggataccttttacatgtacttctctcttggatcaaatatgtctttaactgtacatctcagtggctggaggccatgccttttaagcatgtgtaaaatttttaaagaaatgaacatacacatagttattttagtaatatttcctgaaagaaaaaccaaattctgctataagtcttgatcttcaatgaacttttaaataatgcatttagctggaaaacaagactttcccagcttgtgttacctagaagcgtgaatgtataggatacctgactactaagactatattctcagccctgccctgtcttttatttgcgggtctaatctaatattagaatatattaaccgcttaaggcattgaagccatatgggatggggaatgcatttcttcagtgtttctccgagagactttccatttccttggagttatggcggcaagtaagtatcatagtattaagaaatttgcctaaatctgagttgtgcctttctttactcacaaggcatgggctttgtcctggtgatcagtttgtaagccttcttccttcccagctccttaataaaagcaaagtgattgagtaggtaatgttcaaagtgtctgcctgtgtacatgtacttgtattgattatgtagttcagtaagatgtgcccaagtcatttcagaaagaaagacccttcagttttgatgcattttgctgaacacttgggtagtgagtgggatcctatccagttgaggaatgcttgcaatgctcattgaagggatttgctttgggactttgtcatcttccagaaaggaaacatattgtatatttggcccagtgtgattgattgctttatctttggtaacttttacttgaatgggatttgctgaattaatgactattgaatttaaaactaattatgagttgacaaataaataaaaggtagtgtttatgtctgagcttattgtgtttgagctaacaccaggttactcagtaaccatgacctgctcctccatttccatttattctcaacattaaatagttttatcttgttgttgccagaaatgcacttgtgccaggtattgtccctgctgtatgaaaagcttcttggcaatgaattctgtaatagtgccctacattatggttttctggtggaattgttttaacagtgacaacccaggatttccaatatatttttgttttattgttattaccaaaaattccactatgattgatgttcagtgattttctatagcaacttttttggtaactctttgggtttctgatttgttttagctaaaattttggggatatgatttgggtctttgattaatgtcagctgaacttggatttctagttcatgaagaaatctctcccaatacccatttatcctatttttagcaataattcgttaatgattccacttgattttcagaatattgtcctggttgattttgatttgacagcatacattatgaaatttgaaagtaggttaccattttgaggcagttggatataaattatgtaaatatgtatgattatgatttttataaatggcataacatgagtgtactaactaccttctatgctggccatgctacagattttctggaggtatgacaatagtatttttttatgctcagattaaaaatcagcttttcacctctccagtttttccaagtgatactcccagttctagagcaatctacagctgtttatgtgaggtgcccaacacccattcatctcaagtgcttcagtctttggtttatttcatgcactgtgccttcaaaatgaaatttttaaaagggactttaaatgaagttgaatagtagtttttaaaagtcaatttgtaatttatgtgaaatctaactgtaatgaggtcctttctgttttttatatgtaaacagatctactaatcctgtataaaagttattttacga

SEQ ID NO: 432639 - DNA, 2517 bp, Homo sapiens
cgcccggagcgctgagccgcgggagcggagccggggttagcggcgctgctggaagatggcgagcggccgggacgagcggccgccttggcggctagggcggctcctgttgctcatgtgcctgctgctgctggggagctcggcccgggcggctcacatcaagaaggcggaggcgactaccacaactacgagcgcgggcgccgaggcggccgagggccagttcgaccgctactaccacgaagaggagttggagtcggcgctgagggaggcggcggccgcgggcctccccggcctggcccgcctctttagcatcggccgctcggtggaaggccggccgctgtgggtgcttcgcctcaccgccggcctggggtcgctaatccctgagggcgacgcggggcctgacgctgccgggcccgacgctgcggggccgctgctgcccggccggccccaggtgaagctggtgggcaacatgcatggcgacgagaccgtgtcgcgccaggtgttgatctacttggcccgcgagctggcggccggctaccgccgcggggacccgcgcctggtccgcctgctcaacaccaccgacgtgtacctgctgcccagcctcaaccccgatggcttcgagcgtgcccgcgagggcgactgtggcttcggcgacggcggcccgtccggggccagcggccgcgacaatagtcgcggccgcgacctcaaccgaagctttcccgaccagtttagcaccggcgaaccccccgccctggacgaggtgcccgaggtgcgcgccctcatcgagtggatccgcaggaacaagtttgtgctttctggaaatctgcatggtggctcagtggtagcaagctatccttttgatgattctccagaacataaggccactggaatctatagcaaaacctcagatgatgaagtatttaaatacttggcaaaagcttatgcttcaaaccaccccataatgaaaactggtgagcctcattgtccaggagatgaagacgagactttcaaagatggaatcacaaacggcgcacattggtatgatgtggaaggtggtatgcaagattacaattatgtgtgggccaactgttttgagatcacattagaactgtcttgttgcaagtacccacctgcttcacagcttcgacaggaatgggagaacaatcgtgagtctttgatcacattgattgaaaaggttcacattggagtgaaaggatttgttaaagattccataacaggatctgggttagagaatgcaaccatctcagtggctggtattaatcataatatcacaacaggcagatttggtgatttctaccgattacttgttcctggaacttacaaccttacagtagttttaactgggtatatgccattgactgttactaatgtagtggtgaaagaaggaccagccacagaggtggatttttctcttaggccaactgtaacttcagtaatccctgacacgacagaggctgtatcaactgctagcacagttgctatacctaatattctttctggaacatcatcctcctaccagccaattcagccaaaggactttcaccaccaccatttccctgatatggaaatcttcttgagaaggtttgccaatgaatatcctaacattacccggctttattccttgggaaaatcagtagagtcaagagaactttatgtgatggagatatctgataatccgggtgtccatgaaccaggtgaaccagaatttaagtacattggaaatatgcatggaaatgaagtggttggaagagaactgctgttgaacctcatagaatacctttgtaagaactttggaacagaccctgaagtcacagatttggttcataacactagaattcaccttatgccatccatgaatcctgatgggtatgaaaagtcccaggaaggagattcaataagtgtaattggcagaaacaacagcaacaactttgacctgaaccgaatgcatttcttcagtgtttctccgagagactttccatttccttggagttatggcggcaagtaagtatcatagtattaagaaatttgcctaaatctgagttgtgcctttctttactcacaaggcatgggctttgtcctggtgatcagtttgtaagccttcttccttcccagctccttaataaaagcaaagtgattgagtaggtaatgttcaaagtgtctgcctgtgtacatgtacttgtattgattatgtagttcagtaagatgtgcccaagtcatttcagaaagaaagacccttcagttttgatgcattttgctgaacacttgggtagtgagtgggatcctatccagttgaggaatgcttgcaatgctcattgaagggatttgctttgggactttgtcatcttccagaaaggaaacatattgtatatttggcccagtgtgattgattgctttatctttggtaacttttacttgaatgggatttgctgaattaatgactattgaatttaaaactaattatgagttgacaaataaataaaaggtagtgtttatgtctga

SEQ ID NO: 432640 - DNA, 1205 bp, Homo sapiens
  misc_feature (52)..(52): n is a, c, g, or t
agagagagagagagagagagagagagagagagagagagagagagagagaganacggcacgaggtcatcttccagaaaggaaacatattgtatatttggcccagtgtgattgattgctttatctttggtaacttttacttgaatgggatttgctgaattaatgactattgaatttaaaactaattatgagttgacaaataaataaaaggtagtgtttatgtctgagcttattgtgtttgagctaacaccaggttactcagtaaccatgacctgctcctccatttccatttattctcaacattaaatagttttatcttgttgttgccagaaatgcacttgtgccaggtattgtccctgctgtatgaaaagcttcttggcaatgaattctgtaatagtgccctacattatggttttctggtggaattgttttaacagtgacaacccaggatttccaatatatttttgttttattgttattaccaaaaattccactatgattgatgttcagtgattttctatagcaacttttttggtaactctttgggtttctgatttgttttagctaaaattttggggatatgatttgggtctttgattaatgtcagctgaacttggatttctagttcatgaagaaatctctcccaatacccatttatcctatttttagcaataattcgttaatgattccacttgattttcagaatattgtcctggttgattttgatttgacagcatacattatgaaatttgaaagtaggttaccattttgaggcagttggatataaattatgtaaatatgtatgattatgatttttataaatggcataacatgagtgtactaactaccttctatgctggccatgctacagattttctggaggtatgacaatagtatttttttatgctcagattaaaaatcagcttttcacctctccagtttttccaagtgatactcccagttctagagcaatctacagctgtttatgtgaggtgcccaacacccattcatctcaagtgcttcagtctttggtttatttcatgcactgtgccttcaaaatgaaatttttaaaagggactttaaatgaagttgaatagtagtttttaaaagtcaatttgtaatttatgtgaaatctaactgtaatgaggtcctttctgttttttatatgtaaacagatctactaatcctgtataaaagttattttacga

SEQ ID NO: 432641 - DNA, 4296 bp, Homo sapiens
  misc_feature (4167)..(4167): n is a, c, g, or t
cgcccggagcgctgagccgcgggagcggagccggggttagcggcgctgctggaagatggcgagcggccgggacgagcggccgccttggcggctagggcggctcctgttgctcatgtgcctgctgctgctggggagctcggcccgggcggctcacatcaagaaggcggaggcgactaccacaactacgagcgcgggcgccgaggcggccgagggccagttcgaccgctactaccacgaagaggagttggagtcggcgctgagggaggcggcggccgcgggcctccccggcctggcccgcctctttagcatcggccgctcggtggaaggccggccgctgtgggtgcttcgcctcaccgccggcctggggtcgctaatccctgagggcgacgcggggcctgacgctgccgggcccgacgctgcggggccgctgctgcccggccggccccaggtgaagctggtgggcaacatgcatggcgacgagaccgtgtcgcgccaggtgttgatctacttggcccgcgagctggcggccggctaccgccgcggggacccgcgcctggtccgcctgctcaacaccaccgacgtgtacctgctgcccagcctcaaccccgatggcttcgagcgtgcccgcgagggcgactgtggcttcggcgacggcggcccgtccggggccagcggccgcgacaatagtcgcggccgcgacctcaaccgaagctttcccgaccagtttagcaccggcgaaccccccgccctggacgaggtgcccgaggtgcgcgccctcatcgagtggatccgcaggaacaagtttgtgctttctggaaatctgcatggtggctcagtggtagcaagctatccttttgatgattctccagaacataaggccactggaatctatagcaaaacctcagatgatgaagtatttaaatacttggcaaaagcttatgcttcaaaccaccccataatgaaaactggtgagcctcattgtccaggagatgaagacgagactttcaaagatggaatcacaaacggcgcacattggtatgatgtggaaggtggtatgcaagattacaattatgtgtgggccaactgttttgagatcacattagaactgtcttgttgcaagtacccacctgcttcacagcttcgacaggaatgggagaacaatcgtgagtctttgatcacattgattgaaaaggttcacattggagtgaaaggatttgttaaagattccataacaggatctgggttagagaatgcaaccatctcagtggctggtattaatcataatatcacaacaggcagatttggtgatttctaccgattacttgttcctggaacttacaaccttacagtagttttaactgggtatatgccattgactgttactaatgtagtggtgaaagaaggaccagccacagaggtggatttttctcttaggccaactgtaacttcagtaatccctgacacgacagaggctgtatcaactgctagcacagttgctatacctaatattctttctggaacatcatcctcctaccagccaattcagccaaaggactttcaccaccaccatttccctgatatggaaatcttcttgagaaggtttgccaatgaatatcctaacattacccggctttattccttgggaaaatcagtagagtcaagagaactttatgtgatggagatatctgataatccgggtgtccatgaaccaggtgaaccagaatttaagtacattggaaatatgcatggaaatgaagtggttggaagagaactgctgttgaacctcatagaatacctttgtaagaactttggaacagaccctgaagtcacagatttggttcataacactagaattcaccttatgccatccatgaatcctgatgggtatgaaaagtcccaggaaggagattcaataagtgtaattggcagaaacaacagcaacaactttgacctgaaccgaaatttcccagaccagtttgttcagatcacagatcctacgcaaccagaaactattgctgtaatgagctggatgaagtcctatccatttgtactttcagcaaacctgcatggaggttctttggtggttaactacccttttgatgatgatgaacaaggacttgccacatatagtaaatcaccagatgatgctgtgttccaacaaatagcactttcttattccaaggaaaattcccagatgtttcaaggtagaccttgcaagaatatgtatcctaatgaatattttcctcatggaataacaaatggagctagttggtataatgtgccaggaggaatgcaggactggaactatttacaaacaaattgctttgaagtgactattgaactaggttgtgtgaaatatccacttgagaaagagctgccaaacttttgggaacagaatcgaagatcactaatccagtttatgaaacaggttcatcagggcgtcagaggatttgttctagatgccacagatggcaggggtatattaaatgccaccattagtgttgctgagattaatcacccagtgactacttacaaaactggagattactggcgtctcttggttccaggaacttataaaatcacagcatctgctcgagggtataatccagttaccaagaatgtgactgtcaagagtgaaggcgctattcaggtcaacttcacacttgttcgatcctcaacagattcaaacaatgaatcaaagaaaggaaaaggggctagcagcagcaccaatgatgccagtgatccaactactaaagagtttgaaactttaattaaagacctttcagcggagaatggtttggaaagcctcatgttacgctcctcctcaaatctggctctggctctttatcgataccattcctacaaagacttatcagagtttctgagaggacttgtaatgaactatccacatattacaaatcttaccaatttgggacagagcactgaatatcgtcacatttggtcccttgaaatctccaataagcccaatgtatctgagcctgaagaaccaaagattcgttttgttgctggtatccatggaaatgcgccagttggaactgaactgcttttggctctggcagaatttctctgcctgaactacaaaaagaacccagctgttacccaattggttgacaggactaggattgtgattgtcccttctctaaatccagatgggcgagagagagctcaagagaaagactgtacttcaaaaataggacaaacaaatgctcgtggcaaagatttggatacagacttcacaaataatgcctcccaacctgagaccaaagccatcattgaaaatttgattcaaaaacaggactttagtctttctgttgccttagatggtggttccatgctggtcacatatccttatgacaagccagtacagacagtggaaaataaagagactctgaagcatttggcatctctttatgcaaataatcatccatccatgcacatgggtcagcccagttgcccaaataaatcagatgagaatattccaggaggagtaatgcgtggagcagaatggcatagtcacctgggcagcatgaaggattatagtgtcacctatggccattgtccggaaatcacagtatacacaagctgctgttactttcctagtgctgcacgactcccttccttgtgggcagacaataagagatctcttcttagtatgttagtggaggttcacaagggagttcatggatttgttaaagataagactggaaagccaatctctaaagcagtcattgtacttaatgaaggaataaaggtacaaacaaaagagggaggttatttccatgtactcttagcgccaggtgtccataacattattgccatcgctgatgggtaccagcaacaacattcacaggtctttgtgcatcatgatgcagctagttctgtggtgatagtctttgacacagataaccggatatttggtttgccaagggagcttgtggtaactgtatcaggtgctactatgtcggcattgatcctaacagcttgcattatttggtgcatctgctcaatcaagtctaatagacacaaggatggctttcatcggctcaggcagcatcatgatgagtatgaagatgaaattcgcatgatgtctaccggctccaagaagtccctcctaagccatgagttccaggatgaaacagacacttngcatccagagacactttgcatccagagacactttgcatccagagacactttgcatccagaggcactttgcatccagagacactttgcatccagaggcactttgcatccagagacactttgcatccagag

SEQ ID NO: 432642 - DNA, 2772 bp, Homo sapiens
cgcccggagcgctgagccgcgggagcggagccggggttagcggcgctgctggaagatggcgagcggccgggacgagcggccgccttggcggctagggcggctcctgttgctcatgtgcctgctgctgctggggagctcggcccgggcggctcacatcaagaaggcggaggcgactaccacaactacgagcgcgggcgccgaggcggccgagggccagttcgaccgctactaccacgaagaggagttggagtcggcgctgagggaggcggcggccgcgggcctccccggcctggcccgcctctttagcatcggccgctcggtggaaggccggccgctgtgggtgcttcgcctcaccgccggcctggggtcgctaatccctgagggcgacgcggggcctgacgctgccgggcccgacgctgcggggccgctgctgcccggccggccccaggtgaagctggtgggcaacatgcatggcgacgagaccgtgtcgcgccaggtgttgatctacttggcccgcgagctggcggccggctaccgccgcggggacccgcgcctggtccgcctgctcaacaccaccgacgtgtacctgctgcccagcctcaaccccgatggcttcgagcgtgcccgcgagggcgactgtggcttcggcgacggcggcccgtccggggccagcggccgcgacaatagtcgcggccgcgacctcaaccgaagctttcccgaccagtttagcaccggcgaaccccccgccctggacgaggtgcccgaggtgcgcgccctcatcgagtggatccgcaggaacaagtttgtgctttctggaaatctgcatggtggctcagtggtagcaagctatccttttgatgattctccagaacataaggccactggaatctatagcaaaacctcagatgatgaagtatttaaatacttggcaaaagcttatgcttcaaaccaccccataatgaaaactggtgagcctcattgtccaggagatgaagacgagactttcaaagatggaatcacaaacggcgcacattggtatgatgtggaaggtggtatgcaagattacaattatgtgtgggccaactgttttgagatcacattagaactgtcttgttgcaagtacccacctgcttcacagcttcgacaggaatgggagaacaatcgtgagtctttgatcacattgattgaaaaggttcacattggagtgaaaggatttgttaaagattccataacaggatctgggttagagaatgcaaccatctcagtggctggtattaatcataatatcacaacaggcagatttggtgatttctaccgattacttgttcctggaacttacaaccttacagtagttttaactgggtatatgccattgactgttactaatgtagtggtgaaagaaggaccagccacagaggtggatttttctcttaggccaactgtaacttcagtaatccctgacacgacagaggctgtatcaactgctagcacagttgctatacctaatattctttctggaacatcatcctcctaccagccaattcagccaaaggactttcaccaccaccatttccctgatatggaaatcttcttgagaaggtttgccaatgaatatcctaacattacccggctttattccttgggaaaatcagtagagtcaagagaactttatgtgatggagatatctgataatccgggtgtccatgaaccaggtgaaccagaatttaagtacattggaaatatgcatggaaatgaagtggttggaagagaactgctgttgaacctcatagaatacctttgtaagaactttggaacagaccctgaagtcacagatttggttcataacactagaattcaccttatgccatccatgaatcctgatgggtatgaaaagtcccaggaaggagattcaataagtgtaattggcagaaacaacagcaacaactttgacctgaaccgaaatttcccagaccagtttgttcagatcacagatcctacgcaaccagaaactattgctgtaatgagctggatgaagtcctatccatttgtactttcagcaaacctgcatggaggttctttggtggttaactacccttttgatgatgatgaacaaggacttgccacatatagtaaatcaccagatgatgctgtgttccaacaaatagcactttcttattccaaggaaaattcccagatgtttcaaggtagaccttgcaagaatatgtatcctaatgaatattttcctcatggaataacaaatggagctagttggtataatgtgccaggaggaatgcaggactggaactatttacaaacaaattgctttgaagtgactattgaactaggttgtgtgaaatatccacttgagaaagagctgccaaacttttgggaacagaatcgaagatcactaatccagtttatgaaacaggttcatcagggcgtcagaggatttgttctagatgccacagatggcaggggtatattaaatgccaccattagtgttgctgagattaatcacccagtgactacttacaaaactggagattactggcgtctcttggttccaggaacttataaaatcacagcatctgctcgagggtgagtgactgaatgctttgaaatagagtgctcggaggacaaacatggctccattctggaggattattactagaacgttctagagagcctgttaagcaactttgaatggattgctgcgaagtttagggctggttatacctttgactctcctttagtggcagatagagtacacga

SEQ ID NO: 432643 - DNA, 2544 bp, Homo sapiens
cgcccggagcgctgagccgcgggagcggagccggggttagcggcgctgctggaagatggcgagcggccgggacgagcggccgccttggcggctagggcggctcctgttgctcatgtgcctgctgctgctggggagctcggcccgggcggctcacatcaagaaggcggaggcgactaccacaactacgagcgcgggcgccgaggcggccgagggccagttcgaccgctactaccacgaagaggagttggagtcggcgctgagggaggcggcggccgcgggcctccccggcctggcccgcctctttagcatcggccgctcggtggaaggccggccgctgtgggtgcttcgcctcaccgccggcctggggtcgctaatccctgagggcgacgcggggcctgacgctgccgggcccgacgctgcggggccgctgctgcccggccggccccaggtgaagctggtgggcaacatgcatggcgacgagaccgtgtcgcgccaggtgttgatctacttggcccgcgagctggcggccggctaccgccgcggggacccgcgcctggtccgcctgctcaacaccaccgacgtgtacctgctgcccagcctcaaccccgatggcttcgagcgtgcccgcgagggcgactgtggcttcggcgacggcggcccgtccggggccagcggccgcgacaatagtcgcggccgcgacctcaaccgaagctttcccgaccagtttagcaccggcgaaccccccgccctggacgaggtgcccgaggtgcgcgccctcatcgagtggatccgcaggaacaagtttgtgctttctggaaatctgcatggtggctcagtggtagcaagctatccttttgatgattctccagaacataaggccactggaatctatagcaaaacctcagatgatgaagtatttaaatacttggcaaaagcttatgcttcaaaccaccccataatgaaaactggtgagcctcattgtccaggagatgaagacgagactttcaaagatggaatcacaaacggcgcacattggtatgatgtggaaggtggtatgcaagattacaattatgtgtgggccaactgttttgagatcacattagaactgtcttgttgcaagtacccacctgcttcacagcttcgacaggaatgggagaacaatcgtgagtctttgatcacattgattgaaaaggttcacattggagtgaaaggatttgttaaagattccataacaggatctgggttagagaatgcaaccatctcagtggctggtattaatcataatatcacaacaggcagatttggtgatttctaccgattacttgttcctggaacttacaaccttacagtagttttaactgggtatatgccattgactgttactaatgtagtggtgaaagaaggaccagccacagaggtggatttttctcttaggccaactgtaacttcagtaatccctgacacgacagaggctgtatcaactgctagcacagttgctatacctaatattctttctggaacatcatcctcctaccagccaattcagccaaaggactttcaccaccaccatttccctgatatggaaatcttcttgagaaggtttgccaatgaatatcctaacattacccggctttattccttgggaaaatcagtagagtcaagagaactttatgtgatggagatatctgataatccgggtgtccatgaaccaggtgaaccagaatttaagtacattggaaatatgcatggaaatgaagtggttggaagagaactgctgttgaacctcatagaatacctttgtaagaactttggaacagaccctgaagtcacagatttggttcataacactagaattcaccttatgccatccatgaatcctgatgggtatgaaaagtcccaggaaggagattcaataagtgtaattggcagaaacaacagcaacaactttgacctgaaccgaaatttcccagaccagtttgttcagatcacagatcctacgcaaccagaaactattgctgtaatgagctggatgaagtcctatccatttgtactttcagcaaacctgcatggaggttctttggtggttaactacccttttgatgatgatgaacaaggacttgccacatatagtaaatcaccagatgatgctgtgttccaacaaatagcactttcttattccaaggtaggcttgtctttgaatataaaatgttacaaaattaattcttttatttaaaaatatgctttaaagtcctgcaagactcaggtcaagtgcttccatagttaataaagcatgactttttcagctgtttccgaaaaatagctttttctcctgtttcccacctcacttttgaatacactacatgtctttctccattggccttttatctatggttttagcacagtacctggaacatatacatgtcaatttatttcatttgacaaataagttataagcccagtaaagtaggccaagataagggcttaatgaattatagctctggagccaaatcttgcccaccacctgtttttgtaaataaaattgta

SEQ ID NO: 432644 - DNA, 446 bp, Homo sapiens
aataagatttttctttaacttgcttagagtcattagtatatacacatcctgaagtacataataaaactcagactaacctaccttctgtaatgtatctttcttgcttgagatagtggcttatggagaaataaaatatttatctacaaatttttaagttagcattttgattgtattcaagtagagaatattttcttagatactcatactaagatttaaaatttgatattttatatttgacttttctcttttttagataatgcctcccaacctgagaccaaagccatcattgaaaatttgattcaaaaacaggactttagtctttctgttgccttagatggtggttccatgctggtcacatatccttatgacaagccagtacagacaggtatgtagaatgtcattttatatatatactgtttaagcttaggtagcaaatcccaattaag

SEQ ID NO: 432645 - DNA, 455 bp, Homo sapiens
cggccgcgacctcaaccgaagctttcccgaccagtttagcaccggcgaaccccccgccctggacgaggtgcccgaggtgcgcgccctcatcgagtggatccgcaggaacaagtgagtgttgcctgccccctccccgtccgtgtgagcctccaagggccgaggctggttccggcacccagtaggcgctcagacaatgctggcataaggggtggcggtggtgaaggtgaagggagacaccctgtaacggggacagggcccaggccgcgtagcctcccgtcctgctaatcatcaaagaattgcctcctagaggctgtcatttgttcaagggatggctggaggggacactcctttctgacatttctggtccctattcttacaggggcatagaatatgagcgagaagagatcttaaggataacctaggtcagctcacacattttatagataagctgtcaa

SEQ ID NO: 432646 - DNA, 1891 bp, Homo sapiens
ggatacgtcgacaatagatgacggggctcacgttgtacgttcacatcaggtcccggcccgccggaacctgggcgatccacgatgccgagtttgccacgctgcgacagcccataggcttgcccccccgggcattcgggtggactacgaacacaaactgaagccctaggacttgtcgcccgtttgcgctctcgccgaggcacaggctgctcgcggaccaccctgctccgaaaactaagaggtaggtggtagcccattcatctggttactgatactggccggcatcagtggactgtcggcaggtccttgagcaactggtgtgtgaaatgggacggacgtcaaaggacaagcgggatgtctactaccgcctggccaaggagaatggctggcgtgctcgcagcgccttcaaactgctacaactggataaggaattccaactcttccaaggcgtgacacgggcagttgacctgtgtgcagccccaggcagctggagccaggtgctgagccagaagatcgggggccaagggtccggccacgtggtggctgtggacctgcaggctatggctccactaccaggtgtggtacagatccagggggacatcacccagctgtccactgccaaggagatcatccagcactttaagggctgccctgcggacctagtggtgtgtgacggggctcctgatgtaaccggtctccatgatgttgatgagtatatgcaggcccagctcctcctagctgctctgaacattgctacacatgtcctgaagccagggggctgctttgtggccaagatattccgaggccgggatgtgacgctcctctacagccagctgcaggtcttcttctccagcgtgctgtgtgccaagcccaggagcagccggaactctagcatcgaggccttcgctgtctgtcagggctatgaccctcccgagggcttcatcccggacctgagcaaacccctgctggaccattcttacgacccagatttcaaccagctggatggtcccacccgcatcattgtgccttttgtgacctgtggggacctgagctcctatgattcggaccgcagttacccactggacctagagggcggctcagagtacaagtacactccacccacacagccccccatctcgccaccataccaggaggcctgcacgttgaagaggaaggggcagctggccaaggagatccgcccccaggactgccccatcagcagagtggacacgtttccccagcccctggccgcccctcagtgccacaccctgctggcccctgagatggaagacaatgaaatgagttgttcaccttaacccattacgctggcaaactgatacaactcagaaactgctcaatgtcaggaaaaccggaacttgttgatgaacttgttttcaaaatatcatctcatcaacgaggcctggacaaacaagccctgaggagggatctgcaacaaccctgaagacaacaaggaaagaaaccatgaaagtctgtctgtactgcagtgggaattcttgagtgaggtcttacctcttctttaaacctcttcaggagtgtcctgattatgtccagaattttccctaaaggcagggattcttaacctggatagaagccaggggtaaccatgaacttgatggaagaaaatgttacatctttattttcagcaatgaaactgaaatttagccttactcccaagttataaatgctggcaacaaatcacagtagtaaaagcagtacctgggattttcccaccaatacaaaccagttacagcaactgtaatgtaacataaaaagggcatcttgaagtattgttcatatttgtcacctcttggaatgatagcagatcctgtaagttgatgtattaattaaaaagcccatatattactgcatctca

SEQ ID NO: 432647 - DNA, 1997 bp, Homo sapiens
ggatacgtcgacaatagatgacggggctcacgttgtacgttcacatcaggtcccggcccgccggaacctgggcgatccacgatgccgagtttgccacgctgcgacagcccataggcttgcccccccgggcattcgggtggactacgaacacaaactgaagccctaggacttgtcgcccgtttgcgctctcgccgaggcacaggctgctcgcggaccaccctgctccgaaaactaagaaggggaccagtagacggggtggattcgaggtggggacatgggacgcagcggtcggagccgcctggaggggtacccggtggtcccgatggagctatcatctttgagaggtaggtggtagcccattcatctggttactgatactggccggcatcagtggactgtcggcaggtccttgagcaactggtgtgtgaaatgggacggacgtcaaaggacaagcgggatgtctactaccgcctggccaaggagaatggctggcgtgctcgcagcgccttcaaactgctacaactggataaggaattccaactcttccaaggcgtgacacgggcagttgacctgtgtgcagccccaggcagctggagccaggtgctgagccagaagatcgggggccaagggtccggccacgtggtggctgtggacctgcaggctatggctccactaccaggtgtggtacagatccagggggacatcacccagctgtccactgccaaggagatcatccagcactttaagggctgccctgcggacctagtggtgtgtgacggggctcctgatgtaaccggtctccatgatgttgatgagtatatgcaggcccagctcctcctagctgctctgaacattgctacacatgtcctgaagccagggggctgctttgtggccaagatattccgaggccgggatgtgacgctcctctacagccagctgcaggtcttcttctccagcgtgctgtgtgccaagcccaggagcagccggaactctagcatcgaggccttcgctgtctgtcagggctatgaccctcccgagggcttcatcccggacctgagcaaacccctgctggaccattcttacgacccagatttcaaccagctggatggtcccacccgcatcattgtgccttttgtgacctgtggggacctgagctcctatgattcggaccgcagttacccactggacctagagggcggctcagagtacaagtacactccacccacacagccccccatctcgccaccataccaggaggcctgcacgttgaagaggaaggggcagctggccaaggagatccgcccccaggactgccccatcagcagagtggacacgtttccccagcccctggccgcccctcagtgccacaccctgctggcccctgagatggaagacaatgaaatgagttgttcaccttaacccattacgctggcaaactgatacaactcagaaactgctcaatgtcaggaaaaccggaacttgttgatgaacttgttttcaaaatatcatctcatcaacgaggcctggacaaacaagccctgaggagggatctgcaacaaccctgaagacaacaaggaaagaaaccatgaaagtctgtctgtactgcagtgggaattcttgagtgaggtcttacctcttctttaaacctcttcaggagtgtcctgattatgtccagaattttccctaaaggcagggattcttaacctggatagaagccaggggtaaccatgaacttgatggaagaaaatgttacatctttattttcagcaatgaaactgaaatttagccttactcccaagttataaatgctggcaacaaatcacagtagtaaaagcagtacctgggattttcccaccaatacaaaccagttacagcaactgtaatgtaacataaaaagggcatcttgaagtattgttcatatttgtcacctcttggaatgatagcagatcctgtaagttgatgtattaattaaaaagcccatatattactgcatctca

SEQ ID NO: 432648 - DNA, 397 bp, Homo sapiens
gggtgcaagggacaggaagcaggagggactgaggtgcacacggcccccgagaagtgtgcgctgcctcacgaccacacacaccagaccgaggccaagagatcgaccgcgatgcatccgtacacccacaccagaacaacacgagctccagcaggaatctgagagcaatcagcggacgggctcaggaaccctcatcctccctctctccatagctgtccactgccaaggagatcatccagcactttaagggctgccctgcggacctagtggtgtgtgacggggctcctgatggtaaatagcaacagaaagtgggaggccaggcggggccccctgtgtgtgtccttctctgtatctcccaccttggttgacttattcacctcttcagttactccctgcctct

SEQ ID NO: 432649 - DNA, 1951 bp, Homo sapiens
ggatacgtcgacaatagatgacggggctcacgttgtacgttcacatcaggtcccggcccgccggaacctgggcgatccacgatgccgagtttgccacgctgcgacagcccataggcttgcccccccgggcattcgggtggactacgaacacaaactgaagccctaggacttgtcgcccgtttgcgctctcgccgaggcacaggctgctcgcggaccaccctgctccgaaaactaagaggtaggtggtagcccattcatctggttactgatactggccggcatcagtggactgtcggcaggtccttgagcaactggtgtgtgaaatgggacggacgtcaaaggacaagcgggatgtctactaccgcctggccaaggagaatggctggcgtgctcgcagcgccttcaaactgctacaactggataaggaattccaactcttccaaggcgtgacacgggcagttgacctgtgtgcagccccaggcagctggagccaggtgctgagccagaagatcgggggccaagggtccggccacgtggtggctgtggacctgcaggctatggctccactaccaggtgtggtacagatccagggggacatcacccagctgtccactgccaaggagatcatccagcactttaagggctgccctgcggacctagtggtgtgtgacggggctcctgatgtaaccggtctccatgatgttgatgagtatatgcaggcccagctcctcctagctgctctgaacattgctacacatgtcctgaagccagggggctgctttgtggccaagatattccgaggccgggatgtgacgctcctctacagccagctgcaggtcttcttctccagcgtgctgtgtgccaagcccaggagcagccggaactctagcatcgaggccttcgctgtctgtcagggctatgaccctcccgagggcttcatcccggacctgagcaaacccctgctggaccattcttacgacccagatttcaaccagctggatggtcccacccgcatcattgtgccttttgtgacctgtggggacctgagctcctatgattcggaccgcagttacccactggacctagagggcggctcagagtacaagtacactccacccacacagccccccatctcgccaccataccaggaggcctgcacgttgaagaggaaggggcagctggccaaggagatccgcccccaggactgccccatcagcagagtggacacgtttccccagcccctggccgcccctcagtgccacaccctgctggcccctgagatggaagacaatgaaatgagttgttcaccttaacccattacgctggcaaactgatacaactcagaaactgctcaatgtcaggaaaaccggaacttgttgatgaacttgttttcaaaatatcatctcatcaacgaggcctggacaaacaagccctgaggagggatctgcaacaaccctgaagacaacaaggaaagaaaccatgaaagtctgtctgtactgcagtgggaattcttgagtgaggtcttacctcttctttaaacctcttcaggagtgtcctgattatgtccagaattttccctaaaggcagggattcttaacctggatagaagccaggggtaaccatgaacttgatggaagaaaatgttacatctttattttcagcaatgaaactgaaatttagccttactcccaagttataaatgctggcaacaaatcacagtagtaaaagcagtacctgggattttcccaccaatacaaaccagttacagcaactgtaatgtaacataaaaagggcatcttgaagtattgttcatatttgtcacctcttggaatgatagcagatcctgtaagttgatgtattaattaaaaagcccatatattactgcatctcaattttgtttcaatttaatatatagtaataattgtaattcaatgtaattggcttccattgt

SEQ ID NO: 432650 - DNA, 2082 bp, Homo sapiens
ggatacgtcgacaatagatgacggggctcacgttgtacgttcacatcaggtcccggcccgccggaacctgggcgatccacgatgccgagtttgccacgctgcgacagcccataggcttgcccccccgggcattcgggtggactacgaacacaaactgaagccctaggacttgtcgcccgtttgcgctctcgccgaggcacaggctgctcgcggaccaccctgctccgaaaactaagaggtaggtggtagcccattcatctggttactgatactggccggcatcagtggactgtcggcaggtccttgagcaactggtgtgtgaaatgggacggacgtcaaaggacaagcgggatgtctactaccgcctggccaaggagaatggctggcgtgctcgcagcgccttcaaactgctacaactggataaggaattccaactcttccaaggcgtgacacgggcagttgacctgtgtgcagccccaggcagctggagccaggtgctgagccagaagatcgggggccaagggtccggccacgtggtggctgtggacctgcaggctatggctccactaccaggtgtggtacagatccagggggacatcacccagctgtccactgccaaggagatcatccagcactttaagggctgccctgcggacctagtggtgtgtgacggggctcctgatgtaaccggtctccatgatgttgatgagtatatgcaggcccagctcctcctagctgctctgaacattgctacacatgtcctgaagccagggggctgctttgtggccaagatattccgaggccgggatgtgacgctcctctacagccagctgcaggtcttcttctccagcgtgctgtgtgccaagcccaggagcagccggaactctagcatcgaggccttcgctgtctgtcagggctatgaccctcccgagggcttcatcccggacctgagcaaacccctgctggaccattcttacgacccagatttcaaccagctggatggtcccacccgcatcattgtgccttttgtgacctgtggggacctgagctcctatgattcggaccgcagttacccactggacctagagggcggctcagagtacaagtacactccacccacacagccccccatctcgccaccataccaggaggcctgcacgttgaagaggaaggggcagctggccaaggagatccgcccccaggactgccccatcagcagagtggacacgtttccccagcccctggccgcccctcagtgccacaccctgctggcccctgaggtctggaaatgtgactctcagcctgccttgaccccttccccgtgtgcctttttctgacccaaatctcatggtttctggggccaaaattccctttcctgcctcccaatagctataaaaaattggtaaagccaagcataatgaatggaaaagtttcgccaaatatgtgagtcacttttctttttcttgggtagatggaagacaatgaaatgagttgttcaccttaacccattacgctggcaaactgatacaactcagaaactgctcaatgtcaggaaaaccggaacttgttgatgaacttgttttcaaaatatcatctcatcaacgaggcctggacaaacaagccctgaggagggatctgcaacaaccctgaagacaacaaggaaagaaaccatgaaagtctgtctgtactgcagtgggaattcttgagtgaggtcttacctcttctttaaacctcttcaggagtgtcctgattatgtccagaattttccctaaaggcagggattcttaacctggatagaagccaggggtaaccatgaacttgatggaagaaaatgttacatctttattttcagcaatgaaactgaaatttagccttactcccaagttataaatgctggcaacaaatcacagtagtaaaagcagtacctgggattttcccaccaatacaaaccagttacagcaactgtaatgtaacataaaaagggcatcttgaagtattgttcatatttgtcacctcttggaatgatagcagatcctgtaagttgatgtattaattaaaaagcccatatattactgcatctca

SEQ ID NO: 432651 - DNA, 1693 bp, Homo sapiens
ggatacgtcgacaatagatgacggggctcacgttgtacgttcacatcaggtcccggcccgccggaacctgggcgatccacgatgccgagtttgccacgctgcgacagcccataggcttgcccccccgggcattcgggtggactacgaacacaaactgaagccctaggacttgtcgcccgtttgcgctctcgccgaggcacaggctgctcgcggaccaccctgctccgaaaactaagaggtaggtggtagcccattcatctggttactgatactggccggcatcagtggactgtcggcaggtccttgagcaactggtgtgtgaaatgggacggacgtcaaaggacaagcgggatgtctactaccgcctggccaaggagaatggctggcgtgctcgcagcgccttcaaactgctacaactggataaggaattccaactcttccaaggcgtgacacgggcagttgacctgtgtgcagccccaggcagctggagccaggtgctgagccagaagatcgggggccaagggtccggccacgtggtggctgtggacctgcaggctatggctccactaccaggtgtggtacagatccagggggacatcacccagctgtccactgccaaggagatcatccagcactttaagggctgccctgcggacctagtggtgtgtgacggggctcctgatgtaaccggtctccatgatgttgatgagtatatgcaggcccagctcctcctagctgctctgaacattgctacacatgtcctgaagccagggggctgctttgtggccaagatattccgaggccgggatgtgacgctcctctacagccagctgcaggtcttcttctccagcgtgctgtgtgccaagcccaggagcagccggaactctagcatcgaggccttcgctgtctgtcagggctatgaccctcccgagggcttcatcccggacctgagcaaacccctgctggaccattcttacgacccagatttcaaccagctggatggtcccacccgcatcattgtgccttttgtgacctgtggggacctgagctcctatgattcggaccgcagttacccactggacatggaagacaatgaaatgagttgttcaccttaacccattacgctggcaaactgatacaactcagaaactgctcaatgtcaggaaaaccggaacttgttgatgaacttgttttcaaaatatcatctcatcaacgaggcctggacaaacaagccctgaggagggatctgcaacaaccctgaagacaacaaggaaagaaaccatgaaagtctgtctgtactgcagtgggaattcttgagtgaggtcttacctcttctttaaacctcttcaggagtgtcctgattatgtccagaattttccctaaaggcagggattcttaacctggatagaagccaggggtaaccatgaacttgatggaagaaaatgttacatctttattttcagcaatgaaactgaaatttagccttactcccaagttataaatgctggcaacaaatcacagtagtaaaagcagtacctgggattttcccaccaatacaaaccagttacagcaactgtaatgtaacataaaaagggcatcttgaagtattgttcatatttgtcacctcttggaatgatagcagatcctgtaagttgatgtattaattaaaaagcccatatattactgcatctca

SEQ ID NO: 432652 - DNA, 1854 bp, Homo sapiens
cgaccacgcaacaatataaaaggaaaatctatacggctagtgacgaggcctgcgtgccacgctgcgacagcccataggcttgcccccccgggcattcgggtggactacgaacacaaactgaagccctaggacttgtcgcccgtttgcgctctcgccgaggcacaggctgctcgcggaccaccctgctccgaaaactaagaggtaggtggtagcccattcatctggttactgatactggccggcatcagtggactgtcggcaggtccttgagcaactggtgtgtgaaatgggacggacgtcaaaggacaagcgggatgtctactaccgcctggccaaggagaatggctggcgtgctcgcagcgccttcaaactgctacaactggataaggaattccaactcttccaaggcgtgacacgggcagttgacctgtgtgcagccccaggcagctggagccaggtgctgagccagaagatcgggggccaagggtccggccacgtggtggctgtggacctgcaggctatggctccactaccaggtgtggtacagatccagggggacatcacccagctgtccactgccaaggagatcatccagcactttaagggctgccctgcggacctagtggtgtgtgacggggctcctgatgtaaccggtctccatgatgttgatgagtatatgcaggcccagctcctcctagctgctctgaacattgctacacatgtcctgaagccagggggctgctttgtggccaagatattccgaggccgggatgtgacgctcctctacagccagctgcaggtcttcttctccagcgtgctgtgtgccaagcccaggagcagccggaactctagcatcgaggccttcgctgtctgtcagggctatgaccctcccgagggcttcatcccggacctgagcaaacccctgctggaccattcttacgacccagatttcaaccagctggatggtcccacccgcatcattgtgccttttgtgacctgtggggacctgagctcctatgattcggaccgcagttacccactggacctagagggcggctcagagtacaagtacactccacccacacagccccccatctcgccaccataccaggaggcctgcacgttgaagaggaaggggcagctggccaaggagatccgcccccaggactgccccatcagcagagtggacacgtttccccagcccctggccgcccctcagtgccacaccctgctggcccctgagatggaagacaatgaaatgagttgttcaccttaacccattacgctggcaaactgatacaactcagaaactgctcaatgtcaggaaaaccggaacttgttgatgaacttgttttcaaaatatcatctcatcaacgaggcctggacaaacaagccctgaggagggatctgcaacaaccctgaagacaacaaggaaagaaaccatgaaagtctgtctgtactgcagtgggaattcttgagtgaggtcttacctcttctttaaacctcttcaggagtgtcctgattatgtccagaattttccctaaaggcagggattcttaacctggatagaagccaggggtaaccatgaacttgatggaagaaaatgttacatctttattttcagcaatgaaactgaaatttagccttactcccaagttataaatgctggcaacaaatcacagtagtaaaagcagtacctgggattttcccaccaatacaaaccagttacagcaactgtaatgtaacataaaaagggcatcttgaagtattgttcatatttgtcacctcttggaatgatagcagatcctgtaagttgatgtattaattaaaaagcccatatattactgcatctca

SEQ ID NO: 432653 - DNA, 1994 bp, Homo sapiens
ggatacgtcgacaatagatgacggggctcacgttgtacgttcacatcaggtcccggcccgccggaacctgggcgatccacgatgccgagtttgccacgctgcgacagcccataggcttgcccccccgggcattcgggtggactacgaacacaaactgaagccctaggacttgtcgcccgtttgcgctctcgccgaggcacaggctgctcgcggaccaccctgctccgaaaactaagaggtaggtggtagcccattcatctggttactgatactggccggcatcagtggactgtcggcaggtccttgagcaactggtgtgtgaaatgggacggacgtcaaaggacaagcgggatgtctactaccgcctggccaaggagaatggctggcgtgctcgcagcgccttcaaactgctacaactggataaggaattccaactcttccaaggcgtgacacgggcagttgacctgtgtgcagccccaggcagctggagccaggtgctgagccagaagatcgggggccaagggtccggccacgtggtggctgtggacctgcaggctatggctccactaccaggtgtggtacagatccagggggacatcacccagctgtccactgccaaggagatcatccagcactttaagggctgccctgcggacctagtggtgtgtgacggggctcctgatgtaaccggtctccatgatgttgatgagtatatgcaggcccagctcctcctagctgctctgaacattgctacacatgtcctgaagccagggggctgctttgtggccaagatattccgaggccgggatgtgacgctcctctacagccagctgcaggtcttcttctccagcgtgctgtgtgccaagcccaggagcagccggaactctagcatcggtcagtggggtggaggggccaggcaggcagagggggatctctgggacgccgactgcacgaggaggaagcggcagtcatgcctcactccaccttcccctggcagaggccttcgctgtctgtcagggctatgaccctcccgagggcttcatcccggacctgagcaaacccctgctggaccattcttacgacccagatttcaaccagctggatggtcccacccgcatcattgtgccttttgtgacctgtggggacctgagctcctatgattcggaccgcagttacccactggacctagagggcggctcagagtacaagtacactccacccacacagccccccatctcgccaccataccaggaggcctgcacgttgaagaggaaggggcagctggccaaggagatccgcccccaggactgccccatcagcagagtggacacgtttccccagcccctggccgcccctcagtgccacaccctgctggcccctgagatggaagacaatgaaatgagttgttcaccttaacccattacgctggcaaactgatacaactcagaaactgctcaatgtcaggaaaaccggaacttgttgatgaacttgttttcaaaatatcatctcatcaacgaggcctggacaaacaagccctgaggagggatctgcaacaaccctgaagacaacaaggaaagaaaccatgaaagtctgtctgtactgcagtgggaattcttgagtgaggtcttacctcttctttaaacctcttcaggagtgtcctgattatgtccagaattttccctaaaggcagggattcttaacctggatagaagccaggggtaaccatgaacttgatggaagaaaatgttacatctttattttcagcaatgaaactgaaatttagccttactcccaagttataaatgctggcaacaaatcacagtagtaaaagcagtacctgggattttcccaccaatacaaaccagttacagcaactgtaatgtaacataaaaagggcatcttgaagtattgttcatatttgtcacctcttggaatgatagcagatcctgtaagttgatgtattaattaaaaagcccatatattactgcatctca

SEQ ID NO: 432654 - DNA, 1853 bp, Homo sapiens
ccggaaagggggggaaacaacctttacggctaggtactgaggcctgggtggtgtgccacgctgcgacagcccataggcttgcccccccgggcattcgggtggactacgaacacaaactgaagccctaggacttgtcgcccgtttgcgctctcgccgaggcacaggctgctcgcggaccaccctgctccgaaaactaagaggtaggtggtagcccattcatctggttactgatactggccggcatcagtggactgtcggcaggtccttgagcaactggtgtgtgaaatgggacggacgtcaaaggacaagcgggatgtctactaccgcctggccaaggagaatggctggcgtgctcgcagcgccttcaaactgctacaactggataaggaattccaactcttccaaggcgtgacacgggcagttgacctgtgtgcagccccaggcagctggagccaggtgctgagccagaagatcgggggccaagggtccggccacgtggtggctgtggacctgcaggctatggctccactaccaggtgtggtacagatccagggggacatcacccagctgtccactgccaaggagatcatccagcactttaagggctgccctgcggacctagtggtgtgtgacggggctcctgatgtaaccggtctccatgatgttgatgagtatatgcaggcccagctcctcctagctgctctgaacattgctacacatgtcctgaagccagggggctgctttgtggccaagatattccgaggccgggatgtgacgctcctctacagccagctgcaggtcttcttctccagcgtgctgtgtgccaagcccaggagcagccggaactctagcatcgaggccttcgctgtctgtcagggctatgaccctcccgagggcttcatcccggacctgagcaaacccctgctggaccattcttacgacccagatttcaaccagctggatggtcccacccgcatcattgtgccttttgtgacctgtggggacctgagctcctatgattcggaccgcagttacccactggacctagagggcggctcagagtacaagtacactccacccacacagccccccatctcgccaccataccaggaggcctgcacgttgaagaggaaggggcagctggccaaggagatccgcccccaggactgccccatcagcagagtggacacgtttccccagcccctggccgcccctcagtgccacaccctgctggcccctgagatggaagacaatgaaatgagttgttcaccttaacccattacgctggcaaactgatacaactcagaaactgctcaatgtcaggaaaaccggaacttgttgatgaacttgttttcaaaatatcatctcatcaacgaggcctggacaaacaagccctgaggagggatctgcaacaaccctgaagacaacaaggaaagaaaccatgaaagtctgtctgtactgcagtgggaattcttgagtgaggtcttacctcttctttaaacctcttcaggagtgtcctgattatgtccagaattttccctaaaggcagggattcttaacctggatagaagccaggggtaaccatgaacttgatggaagaaaatgttacatctttattttcagcaatgaaactgaaatttagccttactcccaagttataaatgctggcaacaaatcacagtagtaaaagcagtacctgggattttcccaccaatacaaaccagttacagcaactgtaatgtaacataaaaagggcatcttgaagtattgttcatatttgtcacctcttggaatgatagcagatcctgtaagttgatgtattaattaaaaagcccatatattactgcatctca

SEQ ID NO: 432655 - DNA, 1837 bp, Homo sapiens
aacttaggctatgtactgagacctcgggtgttaattcggcagaggttcgaccgcgaatatgcttgcccccccgggcattcgggtggactacgaacacaaactgaagccctaggacttgtcgcccgtttgcgctctcgccgaggcacaggctgctcgcggaccaccctgctccgaaaactaagaggtaggtggtagcccattcatctggttactgatactggccggcatcagtggactgtcggcaggtccttgagcaactggtgtgtgaaatgggacggacgtcaaaggacaagcgggatgtctactaccgcctggccaaggagaatggctggcgtgctcgcagcgccttcaaactgctacaactggataaggaattccaactcttccaaggcgtgacacgggcagttgacctgtgtgcagccccaggcagctggagccaggtgctgagccagaagatcgggggccaagggtccggccacgtggtggctgtggacctgcaggctatggctccactaccaggtgtggtacagatccagggggacatcacccagctgtccactgccaaggagatcatccagcactttaagggctgccctgcggacctagtggtgtgtgacggggctcctgatgtaaccggtctccatgatgttgatgagtatatgcaggcccagctcctcctagctgctctgaacattgctacacatgtcctgaagccagggggctgctttgtggccaagatattccgaggccgggatgtgacgctcctctacagccagctgcaggtcttcttctccagcgtgctgtgtgccaagcccaggagcagccggaactctagcatcgaggccttcgctgtctgtcagggctatgaccctcccgagggcttcatcccggacctgagcaaacccctgctggaccattcttacgacccagatttcaaccagctggatggtcccacccgcatcattgtgccttttgtgacctgtggggacctgagctcctatgattcggaccgcagttacccactggacctagagggcggctcagagtacaagtacactccacccacacagccccccatctcgccaccataccaggaggcctgcacgttgaagaggaaggggcagctggccaaggagatccgcccccaggactgccccatcagcagagtggacacgtttccccagcccctggccgcccctcagtgccacaccctgctggcccctgagatggaagacaatgaaatgagttgttcaccttaacccattacgctggcaaactgatacaactcagaaactgctcaatgtcaggaaaaccggaacttgttgatgaacttgttttcaaaatatcatctcatcaacgaggcctggacaaacaagccctgaggagggatctgcaacaaccctgaagacaacaaggaaagaaaccatgaaagtctgtctgtactgcagtgggaattcttgagtgaggtcttacctcttctttaaacctcttcaggagtgtcctgattatgtccagaattttccctaaaggcagggattcttaacctggatagaagccaggggtaaccatgaacttgatggaagaaaatgttacatctttattttcagcaatgaaactgaaatttagccttactcccaagttataaatgctggcaacaaatcacagtagtaaaagcagtacctgggattttcccaccaatacaaaccagttacagcaactgtaatgtaacataaaaagggcatcttgaagtattgttcatatttgtcacctcttggaatgatagcagatcctgtaagttgatgtattaattaaaaagcccatatattactgcatctca

SEQ ID NO: 432656 - DNA, 1829 bp, Homo sapiens
cttaggctatggtctacactacgctgttacacgccggaacaggcctagttccgcttgcccccccgggcattcgggtggactacgaacacaaactgaagccctaggacttgtcgcccgtttgcgctctcgccgaggcacaggctgctcgcggaccaccctgctccgaaaactaagaggtaggtggtagcccattcatctggttactgatactggccggcatcagtggactgtcggcaggtccttgagcaactggtgtgtgaaatgggacggacgtcaaaggacaagcgggatgtctactaccgcctggccaaggagaatggctggcgtgctcgcagcgccttcaaactgctacaactggataaggaattccaactcttccaaggcgtgacacgggcagttgacctgtgtgcagccccaggcagctggagccaggtgctgagccagaagatcgggggccaagggtccggccacgtggtggctgtggacctgcaggctatggctccactaccaggtgtggtacagatccagggggacatcacccagctgtccactgccaaggagatcatccagcactttaagggctgccctgcggacctagtggtgtgtgacggggctcctgatgtaaccggtctccatgatgttgatgagtatatgcaggcccagctcctcctagctgctctgaacattgctacacatgtcctgaagccagggggctgctttgtggccaagatattccgaggccgggatgtgacgctcctctacagccagctgcaggtcttcttctccagcgtgctgtgtgccaagcccaggagcagccggaactctagcatcgaggccttcgctgtctgtcagggctatgaccctcccgagggcttcatcccggacctgagcaaacccctgctggaccattcttacgacccagatttcaaccagctggatggtcccacccgcatcattgtgccttttgtgacctgtggggacctgagctcctatgattcggaccgcagttacccactggacctagagggcggctcagagtacaagtacactccacccacacagccccccatctcgccaccataccaggaggcctgcacgttgaagaggaaggggcagctggccaaggagatccgcccccaggactgccccatcagcagagtggacacgtttccccagcccctggccgcccctcagtgccacaccctgctggcccctgagatggaagacaatgaaatgagttgttcaccttaacccattacgctggcaaactgatacaactcagaaactgctcaatgtcaggaaaaccggaacttgttgatgaacttgttttcaaaatatcatctcatcaacgaggcctggacaaacaagccctgaggagggatctgcaacaaccctgaagacaacaaggaaagaaaccatgaaagtctgtctgtactgcagtgggaattcttgagtgaggtcttacctcttctttaaacctcttcaggagtgtcctgattatgtccagaattttccctaaaggcagggattcttaacctggatagaagccaggggtaaccatgaacttgatggaagaaaatgttacatctttattttcagcaatgaaactgaaatttagccttactcccaagttataaatgctggcaacaaatcacagtagtaaaagcagtacctgggattttcccaccaatacaaaccagttacagcaactgtaatgtaacataaaaagggcatcttgaagtattgttcatatttgtcacctcttggaatgatagcagatcctgtaagttgatgtattaattaaaaagcccatatattactgcatctca

SEQ ID NO: 432657 - DNA, 1440 bp, Homo sapiens
ggatacgtcgacaatagatgacggggctcacgttgtacgttcacatcaggtcccggcccgccggaacctgggcgatccacgatgccgagtttgccacgctgcgacagcccataggcttgcccccccgggcattcgggtggactacgaacacaaactgaagccctaggacttgtcgcccgtttgcgctctcgccgaggcacaggctgctcgcggaccaccctgctccgaaaactaagaggtaggtggtagcccattcatctggttactgatactggccggcatcagtggactgtcggcaggtccttgagcaactggtgtgtgaaatgggacggacgtcaaaggacaagcgggatgtctactaccgcctggccaaggagaatggctggcgtgctcgcagcgccttcaaactgctacaactggataaggaattccaactcttccaaggcgtgacacgggcagttgacctgtgtgcagccccaggcagctggagccaggtgctgagccagaagatcgggggccaagggtccggccacgtggtggctgtggacctgcaggctatggctccactaccaggtgtggtacagatccagggggacatcacccagctgtccactgccaaggagatcatccagcactttaagggctgccctgcggacctagtggtgtgtgacggggctcctgatgtaaccggtctccatgatgttgatgagtatatgcaggcccagctcctcctagctgctctgaacattgctacacatgtcctgaagccagggggctgctttgtggccaagatattccgaggccgggatgtgacgctcctctacagccagctgcaggtcttcttctccagcgtgctgtgtgccaagcccaggagcagccggaactctagcatcgaggccttcgctgtctgtcagggctatgaccctcccgagggcttcatcccggacctgagcaaacccctgctggaccattcttacgacccagatttcaaccagctggatggtcccacccgcatcattgtgccttttgtgacctgtggggacctgagctcctatgattcggaccgcagttacccactggacctagagggcggctcagagtacaagtacactccacccacacagccccccatctcgccaccataccaggaggcctgcacgttgaagaggaaggggcagctggccaaggagatccgcccccaggactgccccatcagcagagtggacacgtttccccagcccctggccgcccctcagtgccacaccctgctggcccctgaggtctggaaatgtgactctcagcctgccttgaccccttccccgtgtgcctttttctgacccaaatctcatggtttctggggccaaaattccctttcctgcctcccaatagctataaaaaattggtaaagccaagcataatgaatggaaaagtttcgccaaa

SEQ ID NO: 432658 - DNA, 1976 bp, Homo sapiens
ggatacgtcgacaatagatgacggggctcacgttgtacgttcacatcaggtcccggcccgccggaacctgggcgatccacgatgccgagtttgccacgctgcgacagcccataggcttgcccccccgggcattcgggtggactacgaacacaaactgaagccctaggacttgtcgcccgtttgcgctctcgccgaggcacaggctgctcgcggaccaccctgctccgaaaactaagaggtaggtggtagcccattcatctggttactgatactggccggcatcagtggactgtcggcaggtccttgagcaactggtgtgtgaaatgggacggacgtcaaaggacaagcgggatgtctactaccgcctggccaaggagaatggctggcgtgctcgcagcgccttcaaactgctacaactggataaggaattccaactcttccaaggcgtgacacgggcagttgacctgtgtgcagccccaggcagctggagccaggtgctgagccagaagatcgggggccaagggtccggccacgtggtggctgtggacctgcaggctatggctccactaccaggtgtggtacagatccagggggacatcacccagctgtccactgccaaggagatcatccagcactttaagggctgccctgcggacctagtggtgtgtgacggggctcctgatgtaaccggtctccatgatgttgatgagtatatgcaggcccagctcctcctagctgtgagtaaccctggccacccctgacccactttggccccctcctggctgtctccacctcagcctcagccgtctgtcctgcccacaggctctgaacattgctacacatgtcctgaagccagggggctgctttgtggccaagatattccgaggccgggatgtgacgctcctctacagccagctgcaggtcttcttctccagcgtgctgtgtgccaagcccaggagcagccggaactctagcatcgaggccttcgctgtctgtcagggctatgaccctcccgagggcttcatcccggacctgagcaaacccctgctggaccattcttacgacccagatttcaaccagctggatggtcccacccgcatcattgtgccttttgtgacctgtggggacctgagctcctatgattcggaccgcagttacccactggacctagagggcggctcagagtacaagtacactccacccacacagccccccatctcgccaccataccaggaggcctgcacgttgaagaggaaggggcagctggccaaggagatccgcccccaggactgccccatcagcagagtggacacgtttccccagcccctggccgcccctcagtgccacaccctgctggcccctgagatggaagacaatgaaatgagttgttcaccttaacccattacgctggcaaactgatacaactcagaaactgctcaatgtcaggaaaaccggaacttgttgatgaacttgttttcaaaatatcatctcatcaacgaggcctggacaaacaagccctgaggagggatctgcaacaaccctgaagacaacaaggaaagaaaccatgaaagtctgtctgtactgcagtgggaattcttgagtgaggtcttacctcttctttaaacctcttcaggagtgtcctgattatgtccagaattttccctaaaggcagggattcttaacctggatagaagccaggggtaaccatgaacttgatggaagaaaatgttacatctttattttcagcaatgaaactgaaatttagccttactcccaagttataaatgctggcaacaaatcacagtagtaaaagcagtacctgggattttcccaccaatacaaaccagttacagcaactgtaatgtaacataaaaagggcatcttgaagtattgttcatatttgtcacctcttggaatgatagcagatcctgtaagttgatgtattaattaaaaagcccatatattactgcatctca

SEQ ID NO: 432659 - DNA, 1630 bp, Homo sapiens
  misc_feature (1630)..(1630): n is a, c, g, or t
ggatacgtcgacaatagatgacggggctcacgttgtacgttcacatcaggtcccggcccgccggaacctgggcgatccacgatgccgagtttgccacgctgcgacagcccataggcttgcccccccgggcattcgggtggactacgaacacaaactgaagccctaggacttgtcgcccgtttgcgctctcgccgaggcacaggctgctcgcggaccaccctgctccgaaaactaagaggtaggtggtagcccattcatctggttactgatactggccggcatcagtggactgtcggcaggtccttgagcaactggtgtgtgaaatgggacggacgtcaaaggacaagcgggatgtctactaccgcctggccaaggagaatggctggcgtgctcgcagcgccttcaaactgctacaactggataaggaattccaactcttccaaggcgtgacacgggcagttgacctgtgtgcagccccaggcagctggagccaggtgctgagccagaagatcgggggccaagggtccggccacgtggtggctgtggacctgcaggctatggctccactaccaggtgtggtacagatccagggggacatcacccagctgtccactgccaaggagatcatccagcactttaagggctgccctgcggacctagtggtgtgtgacggggctcctgatgtaaccggtctccatgatgttgatgagtatatgcaggcccagctcctcctagctgctctgaacattgctacacatgtcctgaagccagggggctgctttgtggccaagatattccgaggccgggatgtgacgctcctctacagccagctgcaggtcttcttctccagcgtgctgtgtgccaagcccaggagcagccggaactctagcatcgaggccttcgctgtctgtcagggctatgaccctcccgagggcttcatcccggacctgagcaaacccctgctggaccattcttacgacccagatttcaaccagctggatggtcccacccgcatcattgtgccttttgtgacctgtggggacctgagctcctatgattcggaccgcagttacccactggacctagagggcggctcagagtacaagtacactccacccacacagccccccatctcgccaccataccaggaggcctgcacgttgaagaggaaggggcagctggccaaggagatccgcccccaggactgccccatcagcagagtggacacgtttccccagcccctggccgcccctcagtgccacaccctgctggcccctgaggtctggaaatgtgactctcagcctgccttgaccccttccccgtgtgcctttttctgacccaaatctcatggtttctggggccaaaattccctttcctgcctcccaatagctataaaaaattggtaaagccaagcataatgaatggaaaagtttcgccaaaaaaaaaaaatataacctaaaaaataaaaaaaaaaagctggatttgggactgatggagatgatcaagaggcaattaatgaagctatatctgtgaaacaggaagtaacagacatgaactatccatcaaactcatagtgtaataattgtgcaggtacaggaattgttccaccagctttaggctttagcatgtn

SEQ ID NO: 432660 - DNA, 2171 bp, Homo sapiens
ggatacgtcgacaatagatgacggggctcacgttgtacgttcacatcaggtcccggcccgccggaacctgggcgatccacgatgccgagtttgccacgctgcgacagcccataggcttgcccccccgggcattcgggtggactacgaacacaaactgaagccctaggacttgtcgcccgtttgcgctctcgccgaggcacaggctgctcgcggaccaccctgctccgaaaactaagaggtaggtggtagcccattcatctggttactgatactggccggcatcagtggactgtcggcaggtccttgagcaactggtgtgtgaaatgggacggacgtcaaaggacaagcgggatgtctactaccgcctggccaaggagaatggctggcgtgctcgcagcgccttcaaactgctacaactggataaggaattccaactcttccaaggtccctgactggtgggcaggtcactgggcggtgaggtgggcacaggaggtaaacaagtaggctgggtctgcagagctccctgtggtaggtgggctgactcagagggtctctggggcagggagacaggcaggaagataggcagaataccggagaggagttgggcacctgggcaatggagatatgtgggtgctccccaggggagaggggtgaattttgcaagggtctccaggttggagaagtgggtgcagctgatcaggatgctttcactatgtatgcccaggcgtgacacgggcagttgacctgtgtgcagccccaggcagctggagccaggtgctgagccagaagatcgggggccaagggtccggccacgtggtggctgtggacctgcaggctatggctccactaccaggtgtggtacagatccagggggacatcacccagctgtccactgccaaggagatcatccagcactttaagggctgccctgcggacctagtggtgtgtgacggggctcctgatgtaaccggtctccatgatgttgatgagtatatgcaggcccagctcctcctagctgctctgaacattgctacacatgtcctgaagccagggggctgctttgtggccaagatattccgaggccgggatgtgacgctcctctacagccagctgcaggtcttcttctccagcgtgctgtgtgccaagcccaggagcagccggaactctagcatcgaggccttcgctgtctgtcagggctatgaccctcccgagggcttcatcccggacctgagcaaacccctgctggaccattcttacgacccagatttcaaccagctggatggtcccacccgcatcattgtgccttttgtgacctgtggggacctgagctcctatgattcggaccgcagttacccactggacctagagggcggctcagagtacaagtacactccacccacacagccccccatctcgccaccataccaggaggcctgcacgttgaagaggaaggggcagctggccaaggagatccgcccccaggactgccccatcagcagagtggacacgtttccccagcccctggccgcccctcagtgccacaccctgctggcccctgagatggaagacaatgaaatgagttgttcaccttaacccattacgctggcaaactgatacaactcagaaactgctcaatgtcaggaaaaccggaacttgttgatgaacttgttttcaaaatatcatctcatcaacgaggcctggacaaacaagccctgaggagggatctgcaacaaccctgaagacaacaaggaaagaaaccatgaaagtctgtctgtactgcagtgggaattcttgagtgaggtcttacctcttctttaaacctcttcaggagtgtcctgattatgtccagaattttccctaaaggcagggattcttaacctggatagaagccaggggtaaccatgaacttgatggaagaaaatgttacatctttattttcagcaatgaaactgaaatttagccttactcccaagttataaatgctggcaacaaatcacagtagtaaaagcagtacctgggattttcccaccaatacaaaccagttacagcaactgtaatgtaacataaaaagggcatcttgaagtattgttcatatttgtcacctcttggaatgatagcagatcctgtaagttgatgtattaattaaaaagcccatatattactgcatctca

SEQ ID NO: 432661 - DNA, 2277 bp, Homo sapiens
ggatacgtcgacaatagatgacggggctcacgttgtacgttcacatcaggtcccggcccgccggaacctgggcgatccacgatgccgagtttgccacgctgcgacagcccataggcttgcccccccgggcattcgggtggactacgaacacaaactgaagccctaggacttgtcgcccgtttgcgctctcgccgaggcacaggctgctcgcggaccaccctgctccgaaaactaagaaggggaccagtagacggggtggattcgaggtggggacatgggacgcagcggtcggagccgcctggaggggtacccggtggtcccgatggagctatcatctttgagaggtaggtggtagcccattcatctggttactgatactggccggcatcagtggactgtcggcaggtccttgagcaactggtgtgtgaaatgggacggacgtcaaaggacaagcgggatgtctactaccgcctggccaaggagaatggctggcgtgctcgcagcgccttcaaactgctacaactggataaggaattccaactcttccaaggtccctgactggtgggcaggtcactgggcggtgaggtgggcacaggaggtaaacaagtaggctgggtctgcagagctccctgtggtaggtgggctgactcagagggtctctggggcagggagacaggcaggaagataggcagaataccggagaggagttgggcacctgggcaatggagatatgtgggtgctccccaggggagaggggtgaattttgcaagggtctccaggttggagaagtgggtgcagctgatcaggatgctttcactatgtatgcccaggcgtgacacgggcagttgacctgtgtgcagccccaggcagctggagccaggtgctgagccagaagatcgggggccaagggtccggccacgtggtggctgtggacctgcaggctatggctccactaccaggtgtggtacagatccagggggacatcacccagctgtccactgccaaggagatcatccagcactttaagggctgccctgcggacctagtggtgtgtgacggggctcctgatgtaaccggtctccatgatgttgatgagtatatgcaggcccagctcctcctagctgctctgaacattgctacacatgtcctgaagccagggggctgctttgtggccaagatattccgaggccgggatgtgacgctcctctacagccagctgcaggtcttcttctccagcgtgctgtgtgccaagcccaggagcagccggaactctagcatcgaggccttcgctgtctgtcagggctatgaccctcccgagggcttcatcccggacctgagcaaacccctgctggaccattcttacgacccagatttcaaccagctggatggtcccacccgcatcattgtgccttttgtgacctgtggggacctgagctcctatgattcggaccgcagttacccactggacctagagggcggctcagagtacaagtacactccacccacacagccccccatctcgccaccataccaggaggcctgcacgttgaagaggaaggggcagctggccaaggagatccgcccccaggactgccccatcagcagagtggacacgtttccccagcccctggccgcccctcagtgccacaccctgctggcccctgagatggaagacaatgaaatgagttgttcaccttaacccattacgctggcaaactgatacaactcagaaactgctcaatgtcaggaaaaccggaacttgttgatgaacttgttttcaaaatatcatctcatcaacgaggcctggacaaacaagccctgaggagggatctgcaacaaccctgaagacaacaaggaaagaaaccatgaaagtctgtctgtactgcagtgggaattcttgagtgaggtcttacctcttctttaaacctcttcaggagtgtcctgattatgtccagaattttccctaaaggcagggattcttaacctggatagaagccaggggtaaccatgaacttgatggaagaaaatgttacatctttattttcagcaatgaaactgaaatttagccttactcccaagttataaatgctggcaacaaatcacagtagtaaaagcagtacctgggattttcccaccaatacaaaccagttacagcaactgtaatgtaacataaaaagggcatcttgaagtattgttcatatttgtcacctcttggaatgatagcagatcctgtaagttgatgtattaattaaaaagcccatatattactgcatctca

SEQ ID NO: 432662 - DNA, 1387 bp, Homo sapiens
ggatacgtcgacaatagatgacggggctcacgttgtacgttcacatcaggtcccggcccgccggaacctgggcgatccacgatgccgagtttgccacgctgcgacagcccataggcttgcccccccgggcattcgggtggactacgaacacaaactgaagccctaggacttgtcgcccgtttgcgctctcgccgaggcacaggctgctcgcggaccaccctgctccgaaaactaagaggtaggtggtagcccattcatctggttactgatactggccggcatcagtggactgtcggcaggtccttgagcaactggtgtgtgaaatgggacggacgtcaaaggacaagcgggatgtctactaccgcctggccaaggagaatggctggcgtgctcgcagcgccttcaaactgctacaactggataaggaattccaactcttccaaggcgtgacacgggcagttgacctgtgtgcagccccaggcagctggagccaggtgctgagccagaagatcgggggccaagggtccggccacgtggtggctgtggacctgcaggctatggctccactaccaggtgtggtacagatccagggggacatcacccagctgtccactgccaaggagatcatccagcactttaagggctgccctgcggacctagtggtgtgtgacggggctcctgatgtaaccggtctccatgatgttgatgagtatatgcaggcccagctcctcctagctgctctgaacattgctacacatgtcctgaagccagggggctgctttgtggccaagatattccgaggccgggatgtgacgctcctctacagccagctgcaggtcttcttctccagcgtgctgtgtgccaagcccaggagcagccggaactctagcatcgaggccttcgctgtctgtcagggctatgaccctcccgagggcttcatcccggacctgagcaaacccctgctggaccattcttacgacccagatttcaaccagctggatggtcccacccgcatcattgtgccttttgtgacctgtggggacctgagctcctatgattcggaccgcagttacccactggacctagagggcggctcagagtacaagtacactccacccacacagccccccatctcgccaccataccaggaggcctgcacgttgaagaggaaggggcagctggccaaggagatccgcccctcagtgccacaccctgctggcccctgaggtctggaaatgtgactctcagcctgccttgaccccttccccgtgtgcctttttctgacccaaatctcatggtttctggggccaaaattccctttcctgcctcccaatagctataaaaaattggtaaagccaagcataatgaatggaaaagtttcgccaaa

SEQ ID NO: 432663 - DNA, 1362 bp, Homo sapiens
ggatacgtcgacaatagatgacggggctcacgttgtacgttcacatcaggtcccggcccgccggaacctgggcgatccacgatgccgagtttgccacgctgcgacagcccataggcttgcccccccgggcattcgggtggactacgaacacaaactgaagccctaggacttgtcgcccgtttgcgctctcgccgaggcacaggctgctcgcggaccaccctgctccgaaaactaagaggtaggtggtagcccattcatctggttactgatactggccggcatcagtggactgtcggcaggtccttgagcaactggtgtgtgaaatgggacggacgtcaaaggacaagcgggatgtctactaccgcctggccaaggagaatggctggcgtgctcgcagcgccttcaaactgctacaactggataaggaattccaactcttccaaggcgtgacacgggcagttgacctgtgtgcagccccaggcagctggagccaggtgctgagccagaagatcgggggccaagggtccggccacgtggtggctgtggacctgcaggctatggctccactaccaggtgtggtacagatccagggggacatcacccagctgtccactgccaaggagatcatccagcactttaagggctgccctgcggacctagtggtgtgtgacggggctcctgatgtaaccggtctccatgatgttgatgagtatatgcaggcccagctcctcctagctgctctgaacattgctacacatgtcctgaagccagggggctgctttgtggccaagatattccgaggccgggatgtgacgctcctctacagccagctgcaggtcttcttctccagcgtgctgtgtgccaagcccaggagcagccggaactctagcatcgaaacaagccctgaggagggatctgcaacaaccctgaagacaacaaggaaagaaaccatgaaagtctgtctgtactgcagtgggaattcttgagtgaggtcttacctcttctttaaacctcttcaggagtgtcctgattatgtccagaattttccctaaaggcagggattcttaacctggatagaagccaggggtaaccatgaacttgatggaagaaaatgttacatctttattttcagcaatgaaactgaaatttagccttactcccaagttataaatgctggcaacaaatcacagtagtaaaagcagtacctgggattttcccaccaatacaaaccagttacagcaactgtaatgtaacataaaaagggcatcttgaagtattgttcatatttgtcacctcttggaatgatagcagatcctgtaagttgatgtattaattaaaaagcccatatattactgcatctca

SEQ ID NO: 432664 - DNA, 1450 bp, Homo sapiens
ggatacgtcgacaatagatgacggggctcacgttgtacgttcacatcaggtcccggcccgccggaacctgggcgatccacgatgccgagtttgccacgctgcgacagcccataggcttgcccccccgggcattcgggtggactacgaacacaaactgaagccctaggacttgtcgcccgtttgcgctctcgccgaggcacaggctgctcgcggaccaccctgctccgaaaactaagaggtaggtggtagcccattcatctggttactgatactggccggcatcagtggactgtcggcaggtccttgagcaactggtgtgtgaaatgggacggacgtcaaaggacaagcgggatgtctactaccgcctggccaaggagaatggctggcgtgctcgcagcgccttcaaactgctacaactggataaggaattccaactcttccaaggcgtgacacgggcagttgacctgtgtgcagccccaggcagctggagccaggtgctgagccagaagatcgggggccaagggtccggccacgtggtggctgtggacctgcaggctatggctccactaccaggtgtggtacagatccagggggacatcacccagctgtccactgccaaggagatcatccagcactttaagggctgccctgcggacctagtggtgtgtgacggggctcctgatgtaaccggtctccatgatgttgatgagtatatgcaggcccagctcctcctagctgctctgaacattgctacacatgtcctgaagccagggggctgctttgtggccaagatattccgaggccgggatgtgacgctcctctacagccagctgcaggtcttcttctccagcgtgctgtgtgccaagcccaggagcagccggaactctagcatcgaggccttcgctgtctgtcagggctatgaccctcccgagggcttcatcccggacctgagcaaacccctgctggaccattcttacggtgagagctggagcatgggccaccctgggggactctgccacaccttatgcaatctaggtcccatgagggcccacagtctcaccccctgggggaggctctgtcccctcatgggaatttttttcccaaggggatccttagccccattctctgatggaaatcccacccctttatgggtattttgtcccgggaggagcttcagcccaggcagtcctctagtggtaactcttgggcctggtgaaaattccatcccaggaggatcctgagccctgccccagtggagactccacctgcctaaggacattctctcctaggaagatctcagtcatgtcccaggtggaaacctcctcggtgtgaaacttttgccccttaagcctctagcaggaagagacagagcctgcccctgggatgacatttgagtgagggagacgtcatccaggcagcatataatccaatatcaggtggacataaatgc

SEQ ID NO: 432665 - DNA, 1546 bp, Homo sapiens
ggatacgtcgacaatagatgacggggctcacgttgtacgttcacatcaggtcccggcccgccggaacctgggcgatccacgatgccgagtttgccacgctgcgacagcccataggcttgcccccccgggcattcgggtggactacgaacacaaactgaagccctaggacttgtcgcccgtttgcgctctcgccgaggcacaggctgctcgcggaccaccctgctccgaaaactaagtaaccggtctccatgatgttgatgagtatatgcaggcccagctcctcctagctgctctgaacattgctacacatgtcctgaagccagggggctgctttgtggccaagatattccgaggccgggatgtgacgctcctctacagccagctgcaggtcttcttctccagcgtgctgtgtgccaagcccaggagcagccggaactctagcatcggtcagtggggtggaggggccaggcaggcagagggggatctctgggacgccgactgcacgaggaggaagcggcagtcatgcctcactccaccttcccctggcagaggccttcgctgtctgtcagggctatgaccctcccgagggcttcatcccggacctgagcaaacccctgctggaccattcttacgacccagatttcaaccagctggatggtcccacccgcatcattgtgccttttgtgacctgtggggacctgagctcctatgattcggaccgcagttacccactggacctagagggcggctcagagtacaagtacactccacccacacagccccccatctcgccaccataccaggaggcctgcacgttgaagaggaaggggcagctggccaaggagatccgcccccaggactgccccatcagcagagtggacacgtttccccagcccctggccgcccctcagtgccacaccctgctggcccctgagatggaagacaatgaaatgagttgttcaccttaacccattacgctggcaaactgatacaactcagaaactgctcaatgtcaggaaaaccggaacttgttgatgaacttgttttcaaaatatcatctcatcaacgaggcctggacaaacaagccctgaggagggatctgcaacaaccctgaagacaacaaggaaagaaaccatgaaagtctgtctgtactgcagtgggaattcttgagtgaggtcttacctcttctttaaacctcttcaggagtgtcctgattatgtccagaattttccctaaaggcagggattcttaacctggatagaagccaggggtaaccatgaacttgatggaagaaaatgttacatctttattttcagcaatgaaactgaaatttagccttactcccaagttataaatgctggcaacaaatcacagtagtaaaagcagtacctgggattttcccaccaatacaaaccagttacagcaactgtaatgtaacataaaaagggcatcttgaagtattgttcatatttgtcacctcttggaatgatagcagatcctgtaagttgatgtattaattaaaaagcccatatattactgcatctca

SEQ ID NO: 432666 - DNA, 1543 bp, Homo sapiens
ggatacgtcgacaatagatgacggggctcacgttgtacgttcacatcaggtcccggcccgccggaacctgggcgatccacgatgccgagtttgccacgctgcgacagcccataggcttgcccccccgggcattcgggtggactacgaacacaaactgaagccctaggacttgtcgcccgtttgcgctctcgccgaggcacaggctgctcgcggaccaccctgctccgaaaactaagaggtaggtggtagcccattcatctggttactgatactggccggcatcagtggactgtcggcaggtccttgagcaactggtgtgtgaaatgggacggacgtcaaaggacaagcgggatgtctactaccgcctggccaaggagaatggctggcgtgctcgcagcgccttcaaactgctacaactggataaggaattccaactcttccaaggcgtgacacgggcagttgacctgtgtgcagccccaggcagctggagccaggtgctgagccagaagatcgggggccaagggtccggccacgtggtggctgtggacctgcaggctatggctccactaccaggtgtggtacagatccagggggacatcacccagctgtccactgccaaggagatcatccagcactttaagggctgccctgcggacctagtggtgtgtgacggggctcctgatgtaaccggtctccatgatgttgatgagtatatgcaggcccagctcctcctagctgctctgaacattgctacacatgtcctgaagccagggggctgctttgtggccaagatattccgaggccgggatgtgacgctcctctacagccagctgcaggtcttcttctccagcgtgctgtgtgccaagcccaggagcagccggaactctagcatcggtcagtggggtggaggggccaggcaggcagagggggatctctgggacgccgactgcacgaggaggaagcggcagtcatgcctcactccaccttcccctggcagaggccttcgctgtctgtcagggctatgaccctcccgagggcttcatcccggacctgagcaaacccctgctggaccattcttacgacccagatttcaaccagctggatggtcccacccgcatcattgtgccttttgtgacctgtggggacctgagctcctatgattcggaccgcagttacccactggacctagagggcggctcagagtacaagtacactccacccacacagccccccatctcgccaccataccaggaggcctgcacgttgaagaggaaggggcagctggccaaggagatccgcccccaggactgccccatcagcagagtggacacgtttccccagcccctggccgcccctcagtgccacaccctgctggcccctgaggtctggaaatgtgactctcagcctgccttgaccccttccccgtgtgcctttttctgacccaaatctcatggtttctggggccaaaattccctttcctgcctcccaatagctataaaaaattggtaaagccaagcataatgaatggaaaagtttcgccaaa

SEQ ID NO: 432667 - DNA, 1060 bp, Homo sapiens
  misc_feature (23)..(23): n is a, c, g, or t
  misc_feature (39)..(39): n is a, c, g, or t
  misc_feature (54)..(54): n is a, c, g, or t
  misc_feature (63)..(63): n is a, c, g, or t
  misc_feature (73)..(73): n is a, c, g, or t
taaaatattcaacttttatttgngccaatgtggttcaanttcgattgtgaaatnagaaatgcnctgaagaaanctgtcagcgtctttgtattcagctccatgcatttcccggactctgagacaaacaccctgtctggaccatttcttacccagatttcaaccagctggatggtcccacccgcatcattgtgccttttgtgacctgtggggacctgagctcctatgattcggaccgcagttacccactggacctagagggcggctcagagtacaagtacactccacccacacagccccccatctcgccaccataccaggaggcctgcacgttgaagaggaaggggcagctggccaaggagatccgcccccaggactgccccatcagcagagtggacacgtttccccagcccctggccgcccctcagtgccacaccctgctggcccctgagatggaagacaatgaaatgagttgttcaccttaacccattacgctggcaaactgatacaactcagaaactgctcaatgtcaggaaaaccggaacttgttgatgaacttgttttcaaaatatcatctcatcaacgaggcctggacaaacaagccctgaggagggatctgcaacaaccctgaagacaacaaggaaagaaaccatgaaagtctgtctgtactgcagtgggaattcttgagtgaggtcttacctcttctttaaacctcttcaggagtgtcctgattatgtccagaattttccctaaaggcagggattcttaacctggatagaagccaggggtaaccatgaacttgatggaagaaaatgttacatctttattttcagcaatgaaactgaaatttagccttactcccaagttataaatgctggcaacaaatcacagtagtaaaagcagtacctgggattttcccaccaatacaaaccagttacagcaactgtaatgtaacataaaaagggcatcttgaagtattgttcatatttgtcacctcttggaatgatagcagatcctgtaagttgatgtattaattaaaaagcccatatattactgcatctca

SEQ ID NO: 432668 - DNA, 1490 bp, Homo sapiens
ggatacgtcgacaatagatgacggggctcacgttgtacgttcacatcaggtcccggcccgccggaacctgggcgatccacgatgccgagtttgccacgctgcgacagcccataggcttgcccccccgggcattcgggtggactacgaacacaaactgaagccctaggacttgtcgcccgtttgcgctctcgccgaggcacaggctgctcgcggaccaccctgctccgaaaactaagaggtaggtggtagcccattcatctggttactgatactggccggcatcagtggactgtcggcaggtccttgagcaactggtgtgtgaaatgggacggacgtcaaaggacaagcgggatgtctactaccgcctggccaaggagaatggctggcgtgctcgcagcgccttcaaactgctacaactggataaggaattccaactcttccaaggcgtgacacgggcagttgacctgtgtgcagccccaggcagctggagccaggtgctgagccagaagatcgggggccaagggtccggccacgtggtggctgtggacctgcaggctatggctccactaccaggtgtggtacagatccagggggacatcacccagctgtccactgccaaggagatcatccagcactttaagggctgccctgcggacctagtggtgtgtgacggggctcctgatgtaaccggtctccatgatgttgatgagtatatgcaggcccagctcctcctagctgctctgaacattgctacacatgtcctgaagccagggggctgctttgtggccaagatattccgaggccgggatgtgacgctcctctacagccagctgcaggtcttcttctccagcgtgctgtgtgccaagcccaggagcagccggaactctagcatcggtcagtggggtggaggggccaggcaggcagagggggatctctgggacgccgactgcacgaggaggaagcggcagtcatgcctcactccaccttcccctggcagaggccttcgctgtctgtcagggctatgaccctcccgagggcttcatcccggacctgagcaaacccctgctggaccattcttacgacccagatttcaaccagctggatggtcccacccgcatcattgtgccttttgtgacctgtggggacctgagctcctatgattcggaccgcagttacccactggacctagagggcggctcagagtacaagtacactccacccacacagccccccatctcgccaccataccaggaggcctgcacgttgaagaggaaggggcagctggccaaggagatccgcccctcagtgccacaccctgctggcccctgaggtctggaaatgtgactctcagcctgccttgaccccttccccgtgtgcctttttctgacccaaatctcatggtttctggggccaaaattccctttcctgcctcccaatagctataaaaaattggtaaagccaagcataatgaatggaaaagtttcgccaaa

SEQ ID NO: 432669 - DNA, 966 bp, Homo sapiens
ggctcgggagagaccttggagcgcgcgggaaagagaccaatataaactgtggcgggatagttttcgggtccttgtccagtgaaacaccctcggctgggaagtcagttcgttctctcctctcctctcttcttgtttgaacatggtgcggactaaagcagacagtgttccaggcacttacagaaaagtggtggctgctcgagcccccagaaaggtgcttggttcttccacctctgccactaattcgacatcagtttcatcgaggaaagctgaaaataaatatgcaggagggaaccccgtttgcgtgcgcccaactcccaagtggcaaaaaggaattggagaattctttaggttgtcccctaaagattctgaaaaagagaatcagattcctgaagaggcaggaagcagtggcttaggaaaagcaaagagaaaagcatgtcctttgcaacctgatcacacaaatgatgaaaaagaatagaactttctcattcatctttgaataacgtctccttgtttaccctggtattctagaatgtaaatttacataaatgtgtttgttccaattagctttgttgaacaggcatttaattaaaaaatttaggtttaaatttagatgttcaaaagtagttgtgaaatttgagaatttgtaagactaattatggtaacttagcttagtattcaatataatgcattgtttggtttcttttaccaaattaagtgtctagttcttgctaaaatcaagtcattgcattgtgttctaattacaagtatgttgtatttgagatttgcttagattgttgtactgctgccatttttattggtgtttgattattggaatggtgccatattgtcactccttctacttgctttaaaaagcagagttagatttttgcacattaaaaattccgtttattagggcacacaaaacaaaacacaacactttcgggcccgccccaaaattttcaaacg

SEQ ID NO: 432670 - DNA, 892 bp, Homo sapiens
  misc_feature (787)..(787): n is a, c, g, or t
  misc_feature (892)..(892): n is a, c, g, or t
ggctcgggagagaccttggagcgcgcgggaaagagaccaatataaactgtggcgggatagttttcgggtccttgtccagtgaaacaccctcggctgggaagtcagttcgttctctcctctcctctcttcttgtttgaacatggtgcggactaaagcagacagtgttccaggcacttacagaaaagtggtggctgctcgagcccccagaaaggtgcttggttcttccacctctgccactaattcgacatcagtttcatcgaggaaagagcatgtcctttgcaacctgatcacacaaatgatgaaaaagaatagaactttctcattcatctttgaataacgtctccttgtttaccctggtattctagaatgtaaatttacataaatgtgtttgttccaattagctttgttgaacaggcatttaattaaaaaatttaggtttaaatttagatgttcaaaagtagttgtgaaatttgagaatttgtaagactaattatggtaacttagcttagtattcaatataatgcattgtttggtttcttttaccaaattaagtgtctagttcttgctaaaatcaagtcattgcattgtgttctaattacaagtatgttgtatttgagatttgcttagattgttgtactgctgccatttttattggtgtttgattattggaatggtgccatattgtcactccttctacttgctttaaaaagcagagttagatttttgcacattaaaaaattcagtattaattaaacaaacaaaaaaaaaaaattggggcggggggccnaaaaatttaacattgtggggggccaggagaagggcaggtcagaaacgcggcaggggggtcccaaacgggggggggaacacgggggctggtaagacaaacacgggn

SEQ ID NO: 432671 - DNA, 892 bp, Homo sapiens
  misc_feature (708)..(708): n is a, c, g, or t
ggacgcgtgggtcgacccacgcgtccggttcgttctctcctctcctctcttcttgtttgaacatggtgcggactaaagcagacagtgttccaggcacttacagaaaagtggtggctgctcgagcccccagaaaggtgcttggttcttccacctctgccactaattcgacatcagtttcatcgaggaaagctgaaaataaatatgcaggagggaaccccgtttgcgtgcgcccaactcccaagtggcaaaaaggaattggagaattctttaggttgtcccctaaagattctgaaaaagagaatcagattcctgaagaggcaggaagcagtggcttaggaaaagcaaagagaaaagcatgtcctttgcaacctgatcacacaaatgatgaaaaagaatagaactttctcattcatctttgaataacgtctccttgtttaccctggtattctagaatgtaaatttacataaatgtgtttgttccaattagctttgttgaacaggcatttaattaaaaaatttaggtttaaatttagatgttcaaaagtagttgtgaaatttgagaatttgtaagactaattatggtaacttagcttagtattcaatataatgcattgtttggtttcttttaccaaattaagtgtctagttcttgctaaaatcaagtcattgcattgtgttctaattacaagtatgttgtatttgagagtgnacgggcatttatgggtcgatatggagggcaattgggcgttatgtaaagcggtggtttgactcaaatggtttagtagagaaaaacaaaattgggggggcaaattaaacttgggcggccaagatgatattcaaagaagggtataaaacagaggggaaaggagtgagaaacaacgtcgaaaagaaaa

SEQ ID NO: 432672 - DNA, 822 bp, Homo sapiens
tgctttgttgtctacttccttgtgccctccggagtcgagctctgtcagtgcatgattcttgccaatcgctaaacgtaggactcgaggaaggccattggcaattctgctaagaagacagtgcaagtgcctataaaaacgacagtttagggggaaaacaaaccaatacccggaaagctgagaggccagctttttaatcgtcatggttttatgtaaaataaaacagcacgtggaaggtattgtaagcgctagacggagactcgccctgtcgcccaggctggagtgcagtagcgtgatctcggctcactgcaacctccgcctcccgggttcaaggaattctcctgcctcagcctccagagtagctgggactacaggcacatgccgccactcccagctaattttttattttttatttttatttttattttagtagagactgggtttcaccatgttgcccacgctggtctcgaactcctgagctcaggcaatctgcctgcctcggcctcccaaagtgctaggattacaggtgtgagccaccatgcctgaccgattctgttttatgtatggtatttagagagtgaaaatcactccccaggggtgttgtgagtaattagaaggtaagcataaagatagaaaaaaattatgaccctttatcctagagttatgctcactgtgtgacagcgatgtggtcttaccacatttggcagggtcttttcgtttcgtttcgtttcatttcatttccttgccttgccttgcctttcttttcttttttcttttcttttctttctttcttttcttttctttctttctttctttttttttttt

SEQ ID NO: 432673 - DNA, 1497 bp, Homo sapiens
ggctcgggagagaccttggagcgcgcgggaaagagaccaatataaactgtggcgggatagttttcgggtccttgtccagtgaaacaccctcggctgggaagtcagttcgttctctcctctcctctcttcttgtttgaacatggtgcggactaaagcagacagtgttccaggcacttacagaaaagtggtggctgctcgagcccccagaaaggtgcttggttcttccacctctgccactaattcgacatcagtttcatcgaggaaagctgaaaataaatatgcaggagggaaccccgtttgcgtgcgcccaactcccaagtggcaaaaaggaattggagaattctttaggttgtcccctaaagattctgaaaaagagaatcagattcctgaagaggcaggaagcagtggcttaggaaaagcaaagagaaaagcatgtcctttgcaacctgatcacacaaatgatgaaaaagaatagaactttctcattcatctttgaataacgtctccttgtttaccctggtattctagaatgtaaatttacataaatgtgtttgttccaattagctttgttgaacaggcatttaattaaaaaatttaggtttaaatttagatgttcaaaagtagttgtgaaatttgagaatttgtaagactaattatggtaacttagcttagtattcaatataatgcattgtttggtttcttttaccaaattaagtgtctagttcttgctaaaatcaagtcattgcattgtgttctaattacaagtatgttgtatttgagatttgcttagattgttgtactgctgccatttttattggtgtttgattattggaatggtgccatattgtcactccttctacttgctttaaaaagcagagttagatttttgcacattaaaaaattcagtattaattaaacattacttattctaccctcttttttggcaaggaggacaaatacgcaatgttggaaaaccttggatggatatcttctctttaaaaaaatgtaaagataatttggtcttgagggtttaaacggttgataatgcctctacaacaacaagaaaaaagataaaatactaggatagaatcatggtgggcacagtggcttctcaggaggctgaggagggaggtttgcttgagtccaggagttggagaccagcccaggcaacatagcgtaaaccctatctctaaaacaatttttagccgggtgcggtggctcacgcctgtaatcccagcactctgggaggccgaggcgggtggatcatgaggtcaggagatcgagaccatcctgcctaacaaggtgaaaccccgtctctactaaaaatacaaaaaattagccgggcgcggtggcgggcgcctgtagtcccagctactcgggaggctgaggcaggagaatggcgtgaacccgggaagtggagcttgcagtgagccgagattgcgccactgcagtcggcagtccggcttgggcgacagagcgagactccgtctcaaaaaa

SEQ ID NO: 432674 - DNA, 1467 bp, Homo sapiens
aagcagtggtatcaacgcagagtcgccattacgccgggtccttgtccagtgaaacaccctcggctgggaagtcagttcgttctctcctctcctctcttcttgtttgaacatggtgcggactaaagcagacagtgttccaggcacttacagaaaagtggtggctgctcgagcccccagaaaggtgcttggttcttccacctctgccactaattcgacatcagtttcatcgaggaaagctgaaaataaatatgcaggagggaaccccgtttgcgtgcgcccaactcccaagtggcaaaaaggaattggagaattctttaggttgtcccctaaagattctgaaaaagagaatcagattcctgaagaggcaggaagcagtggcttaggaaaagcaaagagaaaagcatgtcctttgcaacctgatcacacaaatgatgaaaaagaatagaactttctcattcatctttgaataacgtctccttgtttaccctggtattctagaatgtaaatttacataaatgtgtttgttccaattagctttgttgaacaggcatttaattaaaaaatttaggtttaaatttagatgttcaaaagtagttgtgaaatttgagaatttgtaagactaattatggtaacttagcttagtattcaatataatgcattgtttggtttcttttaccaaattaagtgtctagttcttgctaaaatcaagtcattgcattgtgttctaattacaagtatgttgtatttgagatttgcttagattgttgtactgctgccatttttattggtgtttgattattggaatggtgccatattgtcactccttctacttgctttaaaaagcagagttagatttttgcacattaaaaaattcagtattaattaaacattacttattctaccctcttttttggcaaggaggacaaatacgcaatgttggaaaaccttggatggatatcttctctttaaaaaaatgtaaagataatttggtcttgagggtttaaacggttgataatgcctctacaacaacaagaaaaaagataaaatactaggatagaatcatggtgggcacagtggcttctcaggaggctgaggagggaggtttgcttgagtccaggagttggagaccagcccaggcaacatagcgtaaaccctatctctaaaacaatttttagccgggtgcggtggctcacgcctgtaatcccagcactctgggaggccgaggcgggtggatcatgaggtcaggagatcgagaccatcctgcctaacaaggtgaaaccccgtctctactaaaaatacaaaaaattagccgggcgcggtggcgggcgcctgtagtcccagctactcgggaggctgaggcaggagaatggcgtgaacccgggaagtggagcttgcagtgagccgagattgcgccactgcagtcggcagtccggcttgggcgacagagcgagactccgtctcaaaaaa

SEQ ID NO: 432675 - DNA, 955 bp, Homo sapiens
  misc_feature (828)..(828): n is a, c, g, or t
  misc_feature (881)..(882): n is a, c, g, or t
  misc_feature (894)..(894): n is a, c, g, or t
  misc_feature (899)..(899): n is a, c, g, or t
  misc_feature (902)..(902): n is a, c, g, or t
  misc_feature (905)..(905): n is a, c, g, or t
  misc_feature (910)..(910): n is a, c, g, or t
  misc_feature (917)..(917): n is a, c, g, or t
  misc_feature (955)..(955): n is a, c, g, or t
ggctcgggagagaccttggagcgcgcgggaaagagaccaatataaactgtggcgggatagttttcgggtccttgtccagtgaaacaccctcggctgggaagtcagttcgttctctcctctcctctcttcttgtttgaacatggtgcggactaaagcagacagtgttccaggcacttacagaaaagtggtggctgctcgagcccccagaaaggtgcttggttcttccacctctgccactaattcgacatcagtttcatcgaggaaagctgaaaataaatatgcaggagggaaccccgtttgcgtgcgcccaactcccaagtggcaaaaaggaattggagaattctttaggttgtcccctaaagattctgaaaaagagaatcagattcctgaagaggcaggaagcagtggcttaggaaaagcaaagagaaaagcatgtcctttgcaacctgatcacacaaatgatgaaaaagaatagaactttctcattcatctttgaataacgtctccttgtttaccctggtattctagaatgtaaatttacataaatgtgtttgttccaattagctttgttgaacaggcatttaattaaaaaatttaggtttaaatttagatgttcaaaagtagttgtgaaatttgagaatttgtaagactaattatggtaacttagcttagtattcaatataatgcattgtttggtttcttttaccaaattaagtgtctagttcttgctaaaatcaagtcattgcattgtgttctaattacaagtatgttgtatttgagaggttgggattgctagatggtggctgtgcatttatggggtggtatggnaggggcaatggaccttatggttaaaggaggtgatttgcctaaatcgttttttnnaaaaaaaaaaanggggngcnaanaaaanggggggnagaagagtagttaagcggagtagattggttatatcagn

SEQ ID NO: 432676 - DNA, 969 bp, Homo sapiens
  misc_feature (785)..(785): n is a, c, g, or t
ggctcgggagagaccttggagcgcgcgggaaagagaccaatataaactgtggcgggatagttttcgggtccttgtccagtgaaacaccctcggctgggaagtcagttcgttctctcctctcctctcttcttgtttgaacatggtgcggactaaagcagacagtgttccaggcacttacagaaaagtggtggctgctcgagcccccagaaaggtgcttggttcttccacctctgccactaattcgacatcagtttcatcgaggaaagctgaaaataaatatgcaggagggaaccccgtttgcgtgcgcccaactcccaagtggcaaaaaggaattggagaattctttaggttgtcccctaaagattctgaaaaagagaatcagattcctgaagaggcaggaagcagtggcttaggaaaagcaaagagaaaagcatgtcctttgcaacctgatcacacaaatgatgaaaaagaatagaactttctcattcatctttgaataacgtctccttgtttaccctggtattctagaatgtaaatttacataaatgtgtttgttccaattagctttgttgaacaggcatttaattaaaaaatttaggtttaaatttagatgttcaaaagtagttgtgaaatttgagaatttgtaagactaattatggtaacttagcttagtattcaatataatgcattgtttggtttcttttaccaaattaagtgtctagttcttgctaaaatcaagtcattgcattgtgttctaattacaagtatgttgtatttgagagtgnacgggcatttatgggtcgatatggagggcaattgggcgttatgtaaagcggtggtttgactcaaatggtttagtagagaaaaacaaaattgggggggcaaattaaacttgggcggccaagatgatattcaaagaagggtataaaacagaggggaaaggagtgagaaacaacgtcgaaaagaaaa

SEQ ID NO: 432677 - DNA, 1450 bp, Homo sapiens
ggctcgggagagaccttggagcgcgcgggaaagagaccaatataaactgtggcgggatagttttcgggtccttgtccagtgaaacaccctcggctgggaagtcagttcgttctctcctctcctctcttcttgtttgaacatggtgcggactaaagcagacagtgttccaggcacttacagaaaagtggtggctgctcgagcccccagaaaggtgcttggttcttccacctctgccactaattcgacatcagtttcatcgaggaaagctgaaaataaatatgcaggagggaaccccgtttgcgtgcgcccaactcccaagtggcaaaaaggaattggagaattctttaggttgtcccctaaagattctgaaaaagagaatcagattcctgaagaggcaggaagcagtggcttaggaaaagcaaagagaaaagcatgtcctttgcaacctgatcacacaaatgatgaaaaagaatagaactttctcattcatctttgaataacgtctccttgtttaccctggtattctagaatgtaaatttacataaatgtgtttgttccaattagctttgttgaacaggcatttaattaaaaaatttaggtttaaatttagatgttcaaaagtagttgtgaaatttgagaatttgtaagactaattatggtaacttagcttagtattcaatataatgcattgtttggtttcttttaccaaattaagtgtctagttcttgctaaaatttgcttagattgttgtactgctgccatttttattggtgtttgattattggaatggtgccatattgtcactccttctacttgctttaaaaagcagagttagatttttgcacattaaaaaattcagtattaattaaacattacttattctaccctcttttttggcaaggaggacaaatacgcaatgttggaaaaccttggatggatatcttctctttaaaaaaatgtaaagataatttggtcttgagggtttaaacggttgataatgcctctacaacaacaagaaaaaagataaaatactaggatagaatcatggtgggcacagtggcttctcaggaggctgaggagggaggtttgcttgagtccaggagttggagaccagcccaggcaacatagcgtaaaccctatctctaaaacaatttttagccgggtgcggtggctcacgcctgtaatcccagcactctgggaggccgaggcgggtggatcatgaggtcaggagatcgagaccatcctgcctaacaaggtgaaaccccgtctctactaaaaatacaaaaaattagccgggcgcggtggcgggcgcctgtagtcccagctactcgggaggctgaggcaggagaatggcgtgaacccgggaagtggagcttgcagtgagccgagattgcgccactgcagtcggcagtccggcttgggcgacagagcgagactccgtctcaaaaaa

SEQ ID NO: 432678 - DNA, 1279 bp, Homo sapiens
ggacgcgtgggtcgacccacgcgtccggttcgttctctcctctcctctcttcttgtttgaacatggtgcggactaaagcagacagtgttccaggcacttacagaaaagtggtggctgctcgagcccccagaaaggtgcttggttcttccacctctgccactaattcgacatcagtttcatcgaggaaagctgaaaataaatatgcaggagggaaccccgtttgcgtgcgcccaactcccaagtggcaaaaaggaattggagaattctttaggttgtcccctaaagattctgaaaaagagaatcagattcctgaagaggcaggaagcagtggcttaggaaaagcaaagagaaaagcatgtcctttgcaacctgatcacacaaatgatgaaaaagaatagaactttctcattcatctttgaataacgtctccttgtttaccctggtattctagaatgtaaatttacataaatgtgtttgttccaattagctttgttgaacaggcatttaattaaaaaatttaggtttaaatttagatgttcaaaagtagttgtgaaatttgagaatttgtaagactaattatggtaacttagcttagtattcaatataatgcattgtttggtttcttttaccaaattaagtgtctagttcttgctaaaatcaagtcattgcattgtgttctaattacaagtatgttgtatttgagatttgcttagattgttgtactgctgccatttttattggtgtttgattattggaatggtgccatattgtcactccttctacttgctttaaaaagcagagttagatttttgcacattaaaaaattcagtattaattaaacattacttattctaccctcttttttggcaaggaggacaaatacgcaatgttggaaaaccttggatggatatcttctctttaaaaaaatgtaaagataatttggtcttgagggtttaaacggttgataatgcctctacaacaacaagaaaaaagataaaatactaggatagaatcatggtgggcacagtggcttctcaggaggctgaggagggaggtttgcttgagtccaggagttggagaccagcccaggcaacatagcgtaaaccctatctctaaaacaatttttagccgggtgcgtgactcacacctgtactcccagcacttttggaggctgaggcgggaggatcgcttgagctcaggagttggagaccagcctgggcaacatagacctcatctctacaaataatcaaaaaattaactgggcatggtggctcacatc

SEQ ID NO: 432679 - DNA, 1290 bp, Homo sapiens
gtaaggttatcctgctgttctggatcgccaggctctcctctccaagctgctggggtccaggactcggtgtcggaaccctcctgccccttctgaacacccttttttgcctctcttcacagtggtggctgctcgagcccccagaaaggtgcttggttcttccacctctgccactaattcgacatcagtttcatcgaggaaagctgaaaataaatatgcaggagggaaccccgtttgcgtgcgcccaactcccaagtggcaaaaaggaattggagaattctttaggttgtcccctaaagattctgaaaaagagaatcagattcctgaagaggcaggaagcagtggcttaggaaaagcaaagagaaaagcatgtcctttgcaacctgatcacacaaatgatgaaaaagaatagaactttctcattcatctttgaataacgtctccttgtttaccctggtattctagaatgtaaatttacataaatgtgtttgttccaattagctttgttgaacaggcatttaattaaaaaatttaggtttaaatttagatgttcaaaagtagttgtgaaatttgagaatttgtaagactaattatggtaacttagcttagtattcaatataatgcattgtttggtttcttttaccaaattaagtgtctagttcttgctaaaatcaagtcattgcattgtgttctaattacaagtatgttgtatttgagatttgcttagattgttgtactgctgccatttttattggtgtttgattattggaatggtgccatattgtcactccttctacttgctttaaaaagcagagttagatttttgcacattaaaaaattcagtattaattaaacattacttattctaccctcttttttggcaaggaggacaaatacgcaatgttggaaaaccttggatggatatcttctctttaaaaaaatgtaaagataatttggtcttgagggtttaaacggttgataatgcctctacaacaacaagaaaaaagataaaatactaggatagaatcatggtgggcacagtggcttctcaggaggctgaggagggaggtttgcttgagtccaggagttggagaccagcccaggcaacatagcgtaaaccctatctctaaaacaatttttagccgggtgcgtgactcacacctgtactcccagcacttttggaggctgaggcgggaggatcgcttgagctcaggagttggagaccagcctgggcaacatagacctcatctctacaaataatcaaaaaattaactgggcatggtggctcacatc

SEQ ID NO: 432680 - DNA, 1418 bp, Homo sapiens
tgctttgttgtctacttccttgtgccctccggagtcgagctctgtcagtgcatgattcttgccaatcgctaaacgtaggactcgaggaaggccattggcaattctgctaagaagacagtgcaagtgcctataaaaacgacagtttagggggaaaacaaaccaatacccggaaagctgagaggccagctttttaatcgtcatggttttatgtaaaataaaacagcacgtggaaggtattgtaagcgcttggtggctgctcgagcccccagaaaggtgcttggttcttccacctctgccactaattcgacatcagtttcatcgaggaaagctgaaaataaatatgcaggagggaaccccgtttgcgtgcgcccaactcccaagtggcaaaaaggaattggagaattctttaggttgtcccctaaagattctgaaaaagagaatcagattcctgaagaggcaggaagcagtggcttaggaaaagcaaagagaaaagcatgtcctttgcaacctgatcacacaaatgatgaaaaagaatagaactttctcattcatctttgaataacgtctccttgtttaccctggtattctagaatgtaaatttacataaatgtgtttgttccaattagctttgttgaacaggcatttaattaaaaaatttaggtttaaatttagatgttcaaaagtagttgtgaaatttgagaatttgtaagactaattatggtaacttagcttagtattcaatataatgcattgtttggtttcttttaccaaattaagtgtctagttcttgctaaaatcaagtcattgcattgtgttctaattacaagtatgttgtatttgagatttgcttagattgttgtactgctgccatttttattggtgtttgattattggaatggtgccatattgtcactccttctacttgctttaaaaagcagagttagatttttgcacattaaaaaattcagtattaattaaacattacttattctaccctcttttttggcaaggaggacaaatacgcaatgttggaaaaccttggatggatatcttctctttaaaaaaatgtaaagataatttggtcttgagggtttaaacggttgataatgcctctacaacaacaagaaaaaagataaaatactaggatagaatcatggtgggcacagtggcttctcaggaggctgaggagggaggtttgcttgagtccaggagttggagaccagcccaggcaacatagcgtaaaccctatctctaaaacaatttttagccgggtgcgtgactcacacctgtactcccagcacttttggaggctgaggcgggaggatcgcttgagctcaggagttggagaccagcctgggcaacatagacctcatctctacaaataatcaaaaaattaactgggcatggtggctcacatc

SEQ ID NO: 432681 - DNA, 1245 bp, Homo sapiens
aagcagtggtatcaacgcagagtcgccattacgccgggtccttgtccagtgaaacaccctcggctgggaagtcagttcgttctctcctctcctctcttcttgtttgaacatggtgcggactaaagcagacagtgttccaggcacttacagaaaagctgaaaataaatatgcaggagggaaccccgtttgcgtgcgcccaactcccaagtggcaaaaaggaattggagaattctttaggttgtcccctaaagattctgaaaaagagaatcagattcctgaagaggcaggaagcagtggcttaggaaaagcaaagagaaaagcatgtcctttgcaacctgatcacacaaatgatgaaaaagaatagaactttctcattcatctttgaataacgtctccttgtttaccctggtattctagaatgtaaatttacataaatgtgtttgttccaattagctttgttgaacaggcatttaattaaaaaatttaggtttaaatttagatgttcaaaagtagttgtgaaatttgagaatttgtaagactaattatggtaacttagcttagtattcaatataatgcattgtttggtttcttttaccaaattaagtgtctagttcttgctaaaatcaagtcattgcattgtgttctaattacaagtatgttgtatttgagatttgcttagattgttgtactgctgccatttttattggtgtttgattattggaatggtgccatattgtcactccttctacttgctttaaaaagcagagttagatttttgcacattaaaaaattcagtattaattaaacattacttattctaccctcttttttggcaaggaggacaaatacgcaatgttggaaaaccttggatggatatcttctctttaaaaaaatgtaaagataatttggtcttgagggtttaaacggttgataatgcctctacaacaacaagaaaaaagataaaatactaggatagaatcatggtgggcacagtggcttctcaggaggctgaggagggaggtttgcttgagtccaggagttggagaccagcccaggcaacatagcgtaaaccctatctctaaaacaatttttagccgggtgcgtgactcacacctgtactcccagcacttttggaggctgaggcgggaggatcgcttgagctcaggagttggagaccagcctgggcaacatagacctcatctctacaaataatcaaaaaattaactgggcatggtggctcacatc

SEQ ID NO: 432682 - DNA, 1442 bp, Homo sapiens
ggctcgggagagaccttggagcgcgcgggaaagagaccaatataaactgtggcgggatagttttcgggtccttgtccagtgaaacaccctcggctgggaagtcagttcgttctctcctctcctctcttcttgtttgaacatggtgcggactaaagcagacagtgttccaggcacttacagaaaagtggtggctgctcgagcccccagaaaggtgcttggttcttccacctctgccactaattcgacatcagtttcatcgaggaaagctgaaaataaatatgcaggagggaaccccgtttgcgtgcgcccaactcccaagtggcaaaaaggaattggagaattctttaggttgtcccctaaagattctgaaaaagagaatcagattcctgaagaggcaggaagcagtggcttaggaaaagcaaagagaaaagcatgtcctttgcaacctgatcacacaaatgatgaaaaagaatagaactttctcattcatctttgaataacgtctccttgtttaccctggtattctagaatgtaaatttacataaatgtgtttgttccaattagctttgttgaacaggcatttaattaaaaaatttaggtttaaatttagatcttagtattcaatataatgcattgtttggtttcttttaccaaattaagtgtctagttcttgctaaaatcaagtcattgcattgtgttctaattacaagtatgttgtatttgagatttgcttagattgttgtactgctgccatttttattggtgtttgattattggaatggtgccatattgtcactccttctacttgctttaaaaagcagagttagatttttgcacattaaaaaattcagtattaattaaacattacttattctaccctcttttttggcaaggaggacaaatacgcaatgttggaaaaccttggatggatatcttctctttaaaaaaatgtaaagataatttggtcttgagggtttaaacggttgataatgcctctacaacaacaagaaaaaagataaaatactaggatagaatcatggtgggcacagtggcttctcaggaggctgaggagggaggtttgcttgagtccaggagttggagaccagcccaggcaacatagcgtaaaccctatctctaaaacaatttttagccgggtgcggtggctcacgcctgtaatcccagcactctgggaggccgaggcgggtggatcatgaggtcaggagatcgagaccatcctgcctaacaaggtgaaaccccgtctctactaaaaatacaaaaaattagccgggcgcggtggcgggcgcctgtagtcccagctactcgggaggctgaggcaggagaatggcgtgaacccgggaagtggagcttgcagtgagccgagattgcgccactgcagtcggcagtccggcttgggcgacagagcgagactccgtctcaaaaaa

SEQ ID NO: 432683 - DNA, 1302 bp, Homo sapiens
ggacgcgtgggtcgacccacgcgtccggttcgttctctcctctcctctcttcttgtttgaacatggtgcggactaaagcagacagtgttccaggcacttacagaaaagtggtggctgctcgagcccccagaaaggtgcttggttcttccacctctgccactaattcgacatcagtttcatcgaggaaagttccatctgtttatattttacagctgaaaataaatatgcaggagggaaccccgtttgcgtgcgcccaactcccaagtggcaaaaaggaattggagaattctttaggttgtcccctaaagattctgaaaaagagaatcagattcctgaagaggcaggaagcagtggcttaggaaaagcaaagagaaaagcatgtcctttgcaacctgatcacacaaatgatgaaaaagaatagaactttctcattcatctttgaataacgtctccttgtttaccctggtattctagaatgtaaatttacataaatgtgtttgttccaattagctttgttgaacaggcatttaattaaaaaatttaggtttaaatttagatgttcaaaagtagttgtgaaatttgagaatttgtaagactaattatggtaacttagcttagtattcaatataatgcattgtttggtttcttttaccaaattaagtgtctagttcttgctaaaatcaagtcattgcattgtgttctaattacaagtatgttgtatttgagatttgcttagattgttgtactgctgccatttttattggtgtttgattattggaatggtgccatattgtcactccttctacttgctttaaaaagcagagttagatttttgcacattaaaaaattcagtattaattaaacattacttattctaccctcttttttggcaaggaggacaaatacgcaatgttggaaaaccttggatggatatcttctctttaaaaaaatgtaaagataatttggtcttgagggtttaaacggttgataatgcctctacaacaacaagaaaaaagataaaatactaggatagaatcatggtgggcacagtggcttctcaggaggctgaggagggaggtttgcttgagtccaggagttggagaccagcccaggcaacatagcgtaaaccctatctctaaaacaatttttagccgggtgcgtgactcacacctgtactcccagcacttttggaggctgaggcgggaggatcgcttgagctcaggagttggagaccagcctgggcaacatagacctcatctctacaaataatcaaaaaattaactgggcatggtggctcacatc

SEQ ID NO: 432684 - DNA, 1935 bp, Homo sapiens
aagcagtggtatcaacgcagagtcgccattacgccgggtccttgtccagtgaaacaccctcggctgggaagtcagttcgttctctcctctcctctcttcttgtttgaacatggtgcggactaaagcagacagtgttccaggcacttacagaaaagtggtggctgctcgagcccccagaaaggtgcttggttcttccacctctgccactaattcgacatcagtttcatcgaggaaagctgaaaataaatatgcaggagggaaccccgtttgcgtgcgcccaactcccaagtggcaaaaaggaattggagaattctttaggttgtcccctaaagattctgaaaaagagaatcagattcctgaagaggcaggaagcagtggcttaggaaaagcaaagagaaaccaggagccacccatcctccagcacactgagcagcaagctggacacacggcacactgatccaaatgggtaaggggatggtggcgatgctcattctgggtctgctacttctggcgctgctcctacccgtgcaggtttcttcatttgttcctttaaccagtatgccggaagctactgcagccgaaaccacaaagccctccaacagtgccctacagcctacagccggtctccttgtggtcttgcttgcccttctacatctctaccattaagaggcaggtcaagaaacagctacagttctccaacccatacactaaaaccgaatccaaatggtgcctagaagttcaatgtggcaaggaaaaaaaccaggtcttcatcaaatctactaatttcactccttattaacagagaaacgcttgagagtctcaaactggactggtttaaagagcatctgaaggatttgactagatgataaatgccaatattaaatctgttggagtttcacgtataagacagaggagaaagagaacatcaaaaattacttagcaagctatggaatggagattcagttttcattttagtttgttaaatctacaaggctgtaaaatgattagagcatgtcctttgcaacctgatcacacaaatgatgaaaaagaatagaactttctcattcatctttgaataacgtctccttgtttaccctggtattctagaatgtaaatttacataaatgtgtttgttccaattagctttgttgaacaggcatttaattaaaaaatttaggtttaaatttagatgttcaaaagtagttgtgaaatttgagaatttgtaagactaattatggtaacttagcttagtattcaatataatgcattgtttggtttcttttaccaaattaagtgtctagttcttgctaaaatcaagtcattgcattgtgttctaattacaagtatgttgtatttgagatttgcttagattgttgtactgctgccatttttattggtgtttgattattggaatggtgccatattgtcactccttctacttgctttaaaaagcagagttagatttttgcacattaaaaaattcagtattaattaaacattacttattctaccctcttttttggcaaggaggacaaatacgcaatgttggaaaaccttggatggatatcttctctttaaaaaaatgtaaagataatttggtcttgagggtttaaacggttgataatgcctctacaacaacaagaaaaaagataaaatactaggatagaatcatggtgggcacagtggcttctcaggaggctgaggagggaggtttgcttgagtccaggagttggagaccagcccaggcaacatagcgtaaaccctatctctaaaacaatttttagccgggtgcgtgactcacacctgtactcccagcacttttggaggctgaggcgggaggatcgcttgagctcaggagttggagaccagcctgggcaacatagacctcatctctacaaataatcaaaaaattaactgggcatggtggctcacatc

SEQ ID NO: 432685 - DNA, 1393 bp, Homo sapiens
aagcagtggtatcaacgcagagtcgccattacgccgggtccttgtccagtgaaacaccctcggctgggaagtcagttcgttctctcctctcctctcttcttgtttgaacatggtgcggactaaagcagacagtgttccaggcacttacagaaaagtggtggctgctcgagcccccagaaaggtgcttggttcttccacctctgccactaattcgacatcagtttcatcgaggaaagctgaaaataaatatgcaggagggaaccccgtttgcgtgcgcccaactcccaagtggcaaaaaggaattggagaattctttaggttgtcccctaaagattctgaaaaagagaatcagattcctgaagaggcaggaagcagtggcttaggaaaagcaaagagaaaccaggagccacccatcctccagcacactgagcagcaagctggacacacggcacactgatccaaatggagcatgtcctttgcaacctgatcacacaaatgatgaaaaagaatagaactttctcattcatctttgaataacgtctccttgtttaccctggtattctagaatgtaaatttacataaatgtgtttgttccaattagctttgttgaacaggcatttaattaaaaaatttaggtttaaatttagatgttcaaaagtagttgtgaaatttgagaatttgtaagactaattatggtaacttagcttagtattcaatataatgcattgtttggtttcttttaccaaattaagtgtctagttcttgctaaaatcaagtcattgcattgtgttctaattacaagtatgttgtatttgagatttgcttagattgttgtactgctgccatttttattggtgtttgattattggaatggtgccatattgtcactccttctacttgctttaaaaagcagagttagatttttgcacattaaaaaattcagtattaattaaacattacttattctaccctcttttttggcaaggaggacaaatacgcaatgttggaaaaccttggatggatatcttctctttaaaaaaatgtaaagataatttggtcttgagggtttaaacggttgataatgcctctacaacaacaagaaaaaagataaaatactaggatagaatcatggtgggcacagtggcttctcaggaggctgaggagggaggtttgcttgagtccaggagttggagaccagcccaggcaacatagcgtaaaccctatctctaaaacaatttttagccgggtgcgtgactcacacctgtactcccagcacttttggaggctgaggcgggaggatcgcttgagctcaggagttggagaccagcctgggcaacatagacctcatctctacaaataatcaaaaaattaactgggcatggtggctcacatc

SEQ ID NO: 432686 - DNA, 1849 bp, Homo sapiens
cctcttctcataccctgtgctaacaacttttaacaaaaaatttgcatcacttttaagaatcaagaaaaatttctgaaggtcatatgggacagaaaaaaaaaccaagggaaaaatcacgccacttgggaaaaaaagattcgaaatctgcctttttatagatttgtaattaataaggtccaggctttctaagcaacttaaatgttttgtttcgaaacaaagtacttgtctggatgtaggaggaaagggagtgatgtcactgccattatgatgccccttgaatataagaccctacttgctatctcccctgcaccagccaggagccacccatcctccagcacactgagcagcaagctggacacacggcacactgatccaaatgggtaaggggatggtggcgatgctcattctgggtctgctacttctggcgctgctcctacccgtgcaggtttcttcatttgttcctttaaccagtatgccggaagctactgcagccgaaaccacaaagccctccaacagtgccctacagcctacagccggtctccttgtggtcttgcttgcccttctacatctctaccattaagaggcaggtcaagaaacagctacagttctccaacccatacactaaaaccgaatccaaatggtgcctagaagttcaatgtggcaaggaaaaaaaccaggtcttcatcaaatctactaatttcactccttattaacagagaaacgcttgagagtctcaaactggactggtttaaagagcatctgaaggatttgactagatgataaatgccaatattaaatctgttggagtttcacgtataagacagaggagaaagagaacatcaaaaattacttagcaagctatggaatggagattcagttttcattttagtttgttaaatctacaaggctgtaaaatgattagagcatgtcctttgcaacctgatcacacaaatgatgaaaaagaatagaactttctcattcatctttgaataacgtctccttgtttaccctggtattctagaatgtaaatttacataaatgtgtttgttccaattagctttgttgaacaggcatttaattaaaaaatttaggtttaaatttagatgttcaaaagtagttgtgaaatttgagaatttgtaagactaattatggtaacttagcttagtattcaatataatgcattgtttggtttcttttaccaaattaagtgtctagttcttgctaaaatcaagtcattgcattgtgttctaattacaagtatgttgtatttgagatttgcttagattgttgtactgctgccatttttattggtgtttgattattggaatggtgccatattgtcactccttctacttgctttaaaaagcagagttagatttttgcacattaaaaaattcagtattaattaaacattacttattctaccctcttttttggcaaggaggacaaatacgcaatgttggaaaaccttggatggatatcttctctttaaaaaaatgtaaagataatttggtcttgagggtttaaacggttgataatgcctctacaacaacaagaaaaaagataaaatactaggatagaatcatggtgggcacagtggcttctcaggaggctgaggagggaggtttgcttgagtccaggagttggagaccagcccaggcaacatagcgtaaaccctatctctaaaacaatttttagccgggtgcgtgactcacacctgtactcccagcacttttggaggctgaggcgggaggatcgcttgagctcaggagttggagaccagcctgggcaacatagacctcatctctacaaataatcaaaaaattaactgggcatggtggctcacatc

SEQ ID NO: 432687 - DNA, 1475 bp, Homo sapiens
aagcagtggtatcaacgcagagtcgccattacgccgggtccttgtccagtgaaacaccctcggctgggaagtcagttcgttctctcctctcctctcttcttgtttgaacatggtgcggactaaagcagacagtgttccaggcacttacagaaaagtggtggctgctcgagcccccagaaaggtgcttggttcttccacctctgccactaattcgacatcagtttcatcgaggaaagctgaaaataaatatgcaggagggaaccccgtttgcgtgcgcccaactcccaagtggcaaaaaggaattggagaattctttaggttgtcccctaaagattctgaaaaagagaatcagattcctgaagaggcaggaagcagtggcttaggaaaagcaaagagaaaccaggagccacccatcctccagcacactgagcagcaagctggacacacggcacactgatccaaatgggtaaggggatggtggcgatgctcattctgggtctgctacttctggcgctgctcctacccgtgcaggtttcttcatttgttcctttaaccagtatgccggaagctactgcagccgaaaccacaaagccctccaacagtgccctacagcctacagccggtctccttgtggtcttgcttgcccttctacatctctaccattaagaggcaggtcaagaaacagctacagttctccaacccatacactaaaaccgaatccaaatggtgcctagaagttcaatgtggcaaggaaaaaaaccaggtcttcatcaaatctactaatttcactccttattaacagagaaacgcttgagagtctcaaactggactggtttaaagagcatctgaaggatttgactagatgataaatgccaatattaaatctgttggagtttcacgtataagacagaggagaaagagaacatcaaaaattacttagcaagctatggaatggagattcagttttcattttagtttgttaaatctacaaggctgtaaaatgattaggtaatagaaaaagcttccatgattctatttattatatatgtgcattggaagaaactaccaggtgttactataaatattctatgtattgtttcagccatcctaatttaatgctgatatgctctagatttacattgctaagttttcactcttctcttgggcacttaactctgtttcttttgtttgtttgttttgagaaggagtctcactcttgcccaggctggcgtgcagtggtgctatcttggctcactgcaaccttcgcctcctgggttcaagcgatttttgtgcctttcttgagtaactgggattacaggcacgtgccaccacatccagctaatttttgtatttttagtagagatgggattcaccatgttggccaggatggtcttgatctcctgaccttgtgatctgcccgcctcggcctcccaaagtgctgggattacaggcatgagccactgcgcctggccaag

SEQ ID NO: 432688 - DNA, 1296 bp, Homo sapiens
aagcagtggtatcaacgcagagtcgccattacgccgggtccttgtccagtgaaacaccctcggctgggaagtcagttcgttctctcctctcctctcttcttgtttgaacatggtgcggactaaagcagacagtgttccaggcacttacagaaaagtggtggctgctcgagcccccagaaaggtgcttggttcttccacctctgccactaattcgacatcagtttcatcgaggaaagctgaaaataaatatgcaggagggaaccccgtttgcgtgcgcccaactcccaagtggcaaaaaggaattggagaattctttaggttgtcccctaaagattctgaaaaagagaatcagattcctgaagaggcaggaagcagtggcttaggaaaagcaaagagaaaccaggagccacccatcctccagcacactgagcagcaagctggacacacggcacactgatccaaatgggtaaggggatggtggcgatgctcattctgggtctgctacttctggcgctgctcctacccgtgcaggtttcttcatttgttcctttaaccagtatgccggaagctactgcagccgaaaccacaaagccctccaacagtgccctacagcctacagccggtctccttgtggtcttgcttgcccttctacatctctaccattaagaggcaggtcaagaaacagctacagttctccaacccatacactaaaaccgaatccaaatggtgcctagaagttcaatgtggcaaggaaaaaaaccaggtcttcatcaaatctactaatttcactccttattaacagagaaacgcttgagagtctcaaactggactggtttaaagagcatctgaaggatttgactagatgataaatgccaatattaaatctgttggagtttcacgtataagacagaggagaaagagaacatcaaaaattacttagcaagctatggaatggagattcagttttcattttagtttgttaaatctacaaggctgtaaaatgattaggttacaagatgttcacctaagattgagacctagtgactacatttcctacgggaacaaataaatggtttttcatctcccggagatacattacaaacaaatatggtgctaaaagaactccttacctttctctgactacaatttatttggacatacttttgtattgaagagaggtatacatactgaagctacttgctgtactataggagactctgtcctgtaggatcatggaccatcctagtagggaaaaggatgaaagacaacggacaactaaacccatggcacaaagga

SEQ ID NO: 432689 - DNA, 687 bp, Homo sapiens
aagcagtggtatcaacgcagagtcgccattacgccgggtccttgtccagtgaaacaccctcggctgggaagtcagttcgttctctcctctcctctcttcttgtttgaacatggtgcggactaaagcagacagtgttccaggcacttacagaaaagtggtggctgctcgagcccccagaaaggtgcttggttcttccacctctgccactaattcgacatcagtttcatcgaggaaagctgaaaataaatatgcaggagggaaccccgtttgcgtgcgcccaactcccaagtggcaaaaaggaattggagaattctttaggttgtcccctaaagattctgaaaaagagaatcagattcctgaagaggcaggaagcagtggcttaggaaaagcaaagagaaagttacaagatgttcacctaagattgagacctagtgactacatttcctacgggaacaaataaatggtttttcatctcccggagatacattacaaacaaatatggtgctaaaagaactccttacctttctctgactacaatttatttggacatacttttgtattgaagagaggtatacatactgaagctacttgctgtactataggagactctgtcctgtaggatcatggaccatcctagtagggaaaaggatgaaagacaacggacaactaaacccatggcacaaagga

SEQ ID NO: 432690 - DNA, 668 bp, Homo sapiens
aagcagtggtatcaacgcagagtcgccattacgccgggtccttgtccagtgaaacaccctcggctgggaagtcagttcgttctctcctctcctctcttcttgtttgaacatggtgcggactaaagcagacagtgttccaggcacttacagaaaagtggtggctgctcgagcccccagaaaggtgcttggttcttccacctctgccactaattcgacatcagtttcatcgaggaaagctgaaaataaatatgcaggagggaaccccgtttgcgtgcgcccaactcccaagtggcaaaaaggaattggagaattctttaggttgtcccctaaagattctgaaaaagagaatcagattcctgaagaggcaggaagcagtggcttaggaaaagcaaagagaaaccaggagccacccatcctccagcacactgagcagcaagctggacacacggcacactgatccaaatgggtaaggggatggtggcgatgctcattctgggtctgctacttctggcgctgctcctacccgtgcaggtttcttcatttgttcctttaaccagtatgccggaagctactgcagccgaaaccacttaactctttagggctttggatttgatttgccattgcactccagcctgggcaacagagcgataatccgtctgaaaaaaaaa

SEQ ID NO: 432691 - DNA, 416 bp, Homo sapiens
ggacgcgtgggtcgacccacgcgtccggttcgttctctcctctcctctcttcttgtttgaacatggtgcggactaaagcagacagtgttccaggcacttacagaaaagtggtggctgctcgagcccccagaaaggtgcttggttcttccacctctgccactaattcgacatcagtttcatcgaggaaagagatggggtttcatcacattgcccaggctggtctcgaactcctgggctgaagcaatcctcccgcctcagcctaccaaagtgctgggattacagacgtgagccaccacgcctggcctgatgaaatttcattagagccgcatctcatcgtctggtccactgttgaatcaccagagccaactaaataggcccttactgaatatatgttgaataaatgcatcctttaaggc

SEQ ID NO: 432692 - DNA, 1356 bp, Homo sapiens
ggctcgggagagaccttggagcgcgcgggaaagagaccaatataaactgtggcgggatagttttcgggtccttgtccagtgaaacaccctcggctgggaagtcagttcgttctctcctctcctctcttcttgtttgaacatggtgcggactaaagcagacagtgttccaggcacttacagaaaagtggtggctgctcgagcccccagaaaggtgcttggttcttccacctctgccactaattcgacatcagtttcatcgaggaaagctgaaaataaatatgcaggagggaaccccgtttgcgtgcgcccaactcccaagtggcaaaaaggaattggagaattctttaggttgtcccctaaagattctgaaaaagagaatcagattcctgaagaggcaggaagcagtggcttaggaaaagcaaagagaaaagcatgtcctttgcaacctgatcacacaaatgatgaaaaagaatagaactttctcattcatctttgaataacgtctccttgtttaccctggtattctagaatgtaaatttacataaatgtgtttgttccaattagctttgttgaacaggcatttaattaaaaaatttaggtttaaatttagatgttcaaaagtagttgtgaaatttgagaatttgtaagactaattatggtaacttagcttagtattcaatataatgcattgtttggtttcttttaccaaattaagtgtctagttcttgctaaaatcaagtcattgcattgtgttctaattacaagtatgttgtatttgagatttgcttagattgttgtactgctgccatttttattggtgtttgattattggaatggtgccatattgtcactccttctacttgctttaaaaagcagagttagatttttgcacattaaaaaattcagtattaattaaacattacttattctaccctcttttttggcaaggaggacaaatacgcaatgttggaaaaccttggatggatatcttctctttaaaaaaatgtaaagataatttggtcttgagggtttaaacggttgataatgcctctacaacaacaagaaaaaagataaaatactaggatagaatcatggtgggcacagtggcttctcaggaggctgaggagggaggtttgcttgagtccaggagttggagaccagcccaggcaacatagcgtaaaccctatctctaaaacaatttttagccgggtgcgtgactcacacctgtactcccagcacttttggaggctgaggcgggaggatcgcttgagctcaggagttggagaccagcctgggcaacatagacctcatctctacaaataatcaaaaaattaactgggcatggtggctcacatc

SEQ ID NO: 432693 - DNA, 2632 bp, Homo sapiens
aatgtggttcgccgtgggcggtgcagctgggtcagtcccgcgatagcttcaggcctggcggcggcttccaagctaaggaacggtttggggcagtgtcgttcccggaggtcggccgccgttacccgctcaccagctacgcggcgcgtcaggtccgcggaggcgcgggctcggggcgcctgcgggacggtgaggccctgctgaggactccggacactgcccatctctaagataagaacctggaaaggggactctgttggccattggaaattgcagaataatgtctcaggtgacatttagtgatgtggctatagacttctctcatgaagagtgggcatgcctagattctgctcagagggacttatacaaggatgtgatggtccagaattatgagaacctggtctctgtaggtctttccgtaactaagccatatgtgatcatgttattggaggatggaaaagagccctggatgatggagaaaaaactgtcaaaagattgggaatcaagatgggaaaacaaggaattatcaacaaagaaggatatttatgatgaagattcaccccaaccagtaacaatggaaaaagttgtaaaacaaagttatgaattttcaaattctaataagaatttggaatatacagaatgcgacacatttagaagcacctttcattcaaagtctactctttctgaaccacaaaacaattctgctgaagggaattcacacaaatatgatatattaaagaagaatttatcaaaaaagtcagttataaaaagtgagagaataaatggtggaaagaaacttttaaattctaataaaagtggggcagccttcaaccagagcaaatctcttacccttccccagacttgtaatagagagaaaatctatacatgcagtgaatgtgggaaagcctttggcaaacagtcaatcctcagtcgccactggagaattcatacaggagagaagccctatgaatgtcgtgaatgtgggaagacttttagccatggttcatcccttacacgacatcagataagccatagtggagagaaaccttacaaatgcattgaatgtgggaaggcctttagccatggctcatcacttactaaccatcagagcactcacacgggagagaaaccgtatgaatgtatgaactgtggaaagtcttttagtcgtgtgtcccttctcattcagcatctaagaattcatacgcaagaaaaacgctatgagtgtcgtatatgtggaaaggccttcattcatagttcgtctctcattcaccatcagaaaagccatactggagagaagccttatgaatgtagagaatgtgggaaagctttctgctgtagctcacaccttactcaacatcaaagaattcacagtatgaagaaaaaatatgaatgcaacaaatgtctcaaggtctttagtagcttctcatttcttgttcaacatcagagtattcatactgaagaaaaaccgtttgaagtttagaaatgcaggaaatccttcaaccagcttgaatcactgaatatgcatttgagaaatcacattagattgaaaccctacgaatgcagtatatgtgggaaagcctttagtcataggtcgtccctgcttcaacatcacagtattcatactggagagaaaccttacgaatgtattaaatgtgggaagaccttcagctgtagttcaaaccttactgtacatcagagaattcatactggagaaaagccatataaatgtagtgagtgtgggaaagcttttagcaaaggctcgaatcttactgcccatcaaagagtacataatggagagaaacccaatagtgtggtaagtgtggaaaagcctttagatcatatgaatccctatacatgtgagaaatcttacagaagagaagcagtgtttatcacggtaaacttcattcatagatcctcccttatttaacatcagaaaaatgtatactggggaaaagttgtatgaaggtggtgaacatgggagacttttagcaatgatgcagatttttttattagagtttatactgtagagaaatcatatgaagtcaataaatgtgggaaagcctttgtcagtattaatcccttaattgacctaagtatactcacactaggaaaaatctgtgtacatgtagcaaatgtgggaaagactataggcaataggaatctcctgcaaactcctacaggagaaaagttgtatgaatgtggaaactttagaaattgaaggaatttttcagttccaagtgcatcccttattctataggaaataaactggagacaaatctcatttaagagatgcagcaaagtgttcactaagagtgtttatcttgccagacataagaagatgaatggtagagcaacctgaaggatttagaaattacatataaatctttgcagttatgctatttgtaaacaggattatataggagagcaaataaacataagtatgcatttcttagagcagtagcttgcagtttcagttgagttctacttagaaattctttttagctagtgggcatgtgaagatatttagtcacccagaggagccagtaaatgttataatgttaaaaattaaagctgcaaaagaaataaaatggtgttaataaaaatttggcatctaataaaatcattttgtatatca

SEQ ID NO: 432694 - DNA, 578 bp, Homo sapiens
gttccttcccagggagagattgacgctccggcgagtgattaccagtgtgcttttccattaaggtgtgtgacaggtgccgcaagataagcccgatttttacatgacatgctttttcctgcctttctgtgccctcaggacactgcccatctctaagataagaacctggaaaggggactctgttggccattggaaattgcagaataatgtctcaggtaagtcggtgtgtccccaaatcttcctgaaacactttattaggcctctgtgtgtttgctttgcttctcctgcctgttcccacctaatcaagtccatttaagggactagatctatggttcctttcactataggaagaatggagcccacaggagagctccaaggtattgtcctcatcacccagtgttcctcttttctacagttttctgctagaagactttctagattgccaacattttaaaactgtaattcacaatgcaactttggaatgtaaggttattcggtttatggttgtcaaaactgtaccatgtggtctcaagtgaagagatgtttggagtcatccttgattcttccttttgacttataac

SEQ ID NO: 432695 - DNA, 4392 bp, Homo sapiens
aaataatgaaaattgacttctcatggttttggtgcctgggaagtccaagatcaagaggcaggcatctggcaagggccttcttgctgtgtccttttgtggtggatgggcaaagagacgagagagaggcaaaggggggccagaactcatttttttaaataaggaaccctcttccctgatgatgacattaatccattcatgagggcagagtcctcaaggcccaatagtctcctaaagatctaacctctcaatactattagaatggtgattaagttcaatacatgcttttttggggaacataatcaaaccatatgtctatcagtctttaatattaagatgtcttttttttctgaacccattttttgtgagatttagtgaatctttctgagtatcatatttgagagacaattgctttagccttatttttaattacttagctagcatgtaagctataaaagatataactaaatacttgactctgtgctgtcaaatgtcaaatgttgatttttaaaaattcatataattctaaacttttaacaaaattactgaagcaaagctctcatatttgtctctcattcttattgtataaaaattctaagcacataactgtcccctttattgtataattccaactacataactgtcctattattacttacctgacatcacattcccagtcattgtcacagctcctgaatcttgttccatttcttccacaagcaggctaattttaccccttcttcagtgacagaagaggcctgggctatggctgagcctaaatatatttgctatttcaggtgacatttagtgatgtggctatagacttctctcatgaagagtgggcatgcctagattctgctcagagggacttatacaaggatgtgatggtccagaattatgagaacctggtctctgtaggtaaggatatcaccccttccactccaataggggacacctttcttttgccaccctgaattgctggagattctcctaagtaaatggctgaattctgtaccatgctcccgaggaaatgtgcagctctgttgtgccctgcctaaagcttatctttccatttcagtgaacacccttcatccattcctgtggtccctcttgtgatggcctctcataatagaggaccacagcttaaacaattctatatttttcctgtaagcaggtctgtctttccgtaactaagccatatgtgatcatgttattggaggatggaaaagagccctggatgatggagaaaaaactgtcaaaaggtatgattccacatgagtcatggtgaacgagacaaaggaagattttgttaaagatgtttatagtgagtgtggaagcattttagggatactgtcttcaaagatctcagatagaaatgaaaaattgagggatatttagcttagattttcaaaacaattgttcctccctctcaaattattatctgtatcactcatgtcacctaatcaaggttagaggtttttgccatcataataattcaaattgttactatattcatgacaaagtaagacaatttattctttcttaattctacttaagaaaaatatactaatagttttaagctaagaaaagctgtcagttagatggaaaatcacttttctaaagctgagctttgtagatgaaatatgaacatattagaggaagtaagggacatataaatgtttctaggaataatattttctaatgttcaagaaaaatatgattcacacagtttcttcataacctcagaaagcctatatctttgtcagctataaagagcatttactttgtttttactgcagttgtttaatatagtagtatcaattctgtattttaagcttgataatccagcagcaaattgagattaatggaaggttggaaaaaaaggctatgaaacaaaatgcaacctttcccacatgaatataggcacaaaatgatgatttgtaatcctgaatgccttccacatcttatttctgatactttccttttttccatactattttatccatttcgtacagcttacccatttcctttatcacactctgttcctgcttctgtgaactttggattctctgctctatttgagcattgttcagaagtcactgaaatatttgagttgtcagaactatgtgttttctgggtgcttcatttcttatccaattctcctaattccactgtagaagcttttttcaagaagtaaaaaaaaaaaaaaaaaaaaaaaaaaaaggcagtgctttgctttcttgatatatttcagattgggaatcaagatgggaaaacaaggaattatcaacaaagaaggatatttatgatgaagattcaccccaaccagtaacaatggaaaaagttgtaaaacaaagttatgaattttcaaattctaataagaatttggaatatacagaatgcgacacatttagaagcacctttcattcaaagtctactctttctgaaccacaaaacaattctgctgaagggaattcacacaaatatgatatattaaagaagaatttatcaaaaaagtcagttataaaaagtgagagaataaatggtggaaagaaacttttaaattctaataaaagtggggcagccttcaaccagagcaaatctcttacccttccccagacttgtaatagagagaaaatctatacatgcagtgaatgtgggaaagcctttggcaaacagtcaatcctcagtcgccactggagaattcatacaggagagaagccctatgaatgtcgtgaatgtgggaagacttttagccatggttcatcccttacacgacatcagataagccatagtggagagaaaccttacaaatgcattgaatgtgggaaggcctttagccatggctcatcacttactaaccatcagagcactcacacgggagagaaaccgtatgaatgtatgaactgtggaaagtcttttagtcgtgtgtcccttctcattcagcatctaagaattcatacgcaagaaaaacgctatgagtgtcgtatatgtggaaaggccttcattcatagttcgtctctcattcaccatcagaaaagccatactggagagaagccttatgaatgtagagaatgtgggaaagctttctgctgtagctcacaccttactcaacatcaaagaattcacagtatgaagaaaaaatatgaatgcaacaaatgtctcaaggtctttagtagcttctcatttcttgttcaacatcagagtattcatactgaagaaaaaccgtttgaagtttagaaatgcaggaaatccttcaaccagcttgaatcactgaatatgcatttgagaaatcacattagattgaaaccctacgaatgcagtatatgtgggaaagcctttagtcataggtcgtccctgcttcaacatcacagtattcatactggagagaaaccttacgaatgtattaaatgtgggaagaccttcagctgtagttcaaaccttactgtacatcagagaattcatactggagaaaagccatataaatgtagtgagtgtgggaaagcttttagcaaaggctcgaatcttactgcccatcaaagagtacataatggagagaaacccaatagtgtggtaagtgtggaaaagcctttagatcatatgaatccctatacatgtgagaaatcttacagaagagaagcagtgtttatcacggtaaacttcattcatagatcctcccttatttaacatcagaaaaatgtatactggggaaaagttgtatgaaggtggtgaacatgggagacttttagcaatgatgcagatttttttattagagtttatactgtagagaaatcatatgaagtcaataaatgtgggaaagcctttgtcagtattaatcccttaattgacctaagtatactcacactaggaaaaatctgtgtacatgtagcaaatgtgggaaagactataggcaataggaatctcctgcaaactcctacaggagaaaagttgtatgaatgtggaaactttagaaattgaaggaatttttcagttccaagtgcatcccttattctataggaaataaactggagacaaatctcatttaagagatgcagcaaagtgttcactaagagtgtttatcttgccagacataagaagatgaatggtagagcaacctgaaggatttagaaattacatataaatctttgcagttatgctatttgtaaacaggattatataggagagcaaataaacataagtatgcatttcttagagcagtagcttgcagtttcagttgagttctacttagaaattctttttagctagtgggcatgtgaagatatttagtcacccagaggagccagtaaatgttataatgttaaaaattaaagctgcaaaagaaataaaatggtgttaataaaaatttggcatctaataaaatcattttgtatatca

SEQ ID NO: 432696 - DNA, 2878 bp, Homo sapiens
aatgtggttcgccgtgggcggtgcagctgggtcagtcccgcgatagcttcaggcctggcggcggcttccaagctaaggaacggtttggggcagtgtcgttcccggaggtcggccgccgttacccgctcaccagctacgcggcgcgtcaggtccgcggaggcgcgggctcggggcgcctgcgggacggtgaggccctgctgaggactccggcaagtgtgggtcgcggcgacggcggggctaaggccctgggtccgcgcgcggtttgaccacggccggggccttgggcatttcctggccttcctgttgagccgtgtaaacgcggggtgatgacggcgccgacctcttggcactgttgtgagagcgaagtgggcgcgagagcagacgccagctacagtttttttgggttatgtcgtcatgaagccggcgctttcagttgtgcaaccttgaacaaatgggacactgcccatctctaagataagaacctggaaaggggactctgttggccattggaaattgcagaataatgtctcaggtgacatttagtgatgtggctatagacttctctcatgaagagtgggcatgcctagattctgctcagagggacttatacaaggatgtgatggtccagaattatgagaacctggtctctgtaggtctttccgtaactaagccatatgtgatcatgttattggaggatggaaaagagccctggatgatggagaaaaaactgtcaaaagattgggaatcaagatgggaaaacaaggaattatcaacaaagaaggatatttatgatgaagattcaccccaaccagtaacaatggaaaaagttgtaaaacaaagttatgaattttcaaattctaataagaatttggaatatacagaatgcgacacatttagaagcacctttcattcaaagtctactctttctgaaccacaaaacaattctgctgaagggaattcacacaaatatgatatattaaagaagaatttatcaaaaaagtcagttataaaaagtgagagaataaatggtggaaagaaacttttaaattctaataaaagtggggcagccttcaaccagagcaaatctcttacccttccccagacttgtaatagagagaaaatctatacatgcagtgaatgtgggaaagcctttggcaaacagtcaatcctcagtcgccactggagaattcatacaggagagaagccctatgaatgtcgtgaatgtgggaagacttttagccatggttcatcccttacacgacatcagataagccatagtggagagaaaccttacaaatgcattgaatgtgggaaggcctttagccatggctcatcacttactaaccatcagagcactcacacgggagagaaaccgtatgaatgtatgaactgtggaaagtcttttagtcgtgtgtcccttctcattcagcatctaagaattcatacgcaagaaaaacgctatgagtgtcgtatatgtggaaaggccttcattcatagttcgtctctcattcaccatcagaaaagccatactggagagaagccttatgaatgtagagaatgtgggaaagctttctgctgtagctcacaccttactcaacatcaaagaattcacagtatgaagaaaaaatatgaatgcaacaaatgtctcaaggtctttagtagcttctcatttcttgttcaacatcagagtattcatactgaagaaaaaccgtttgaagtttagaaatgcaggaaatccttcaaccagcttgaatcactgaatatgcatttgagaaatcacattagattgaaaccctacgaatgcagtatatgtgggaaagcctttagtcataggtcgtccctgcttcaacatcacagtattcatactggagagaaaccttacgaatgtattaaatgtgggaagaccttcagctgtagttcaaaccttactgtacatcagagaattcatactggagaaaagccatataaatgtagtgagtgtgggaaagcttttagcaaaggctcgaatcttactgcccatcaaagagtacataatggagagaaacccaatagtgtggtaagtgtggaaaagcctttagatcatatgaatccctatacatgtgagaaatcttacagaagagaagcagtgtttatcacggtaaacttcattcatagatcctcccttatttaacatcagaaaaatgtatactggggaaaagttgtatgaaggtggtgaacatgggagacttttagcaatgatgcagatttttttattagagtttatactgtagagaaatcatatgaagtcaataaatgtgggaaagcctttgtcagtattaatcccttaattgacctaagtatactcacactaggaaaaatctgtgtacatgtagcaaatgtgggaaagactataggcaataggaatctcctgcaaactcctacaggagaaaagttgtatgaatgtggaaactttagaaattgaaggaatttttcagttccaagtgcatcccttattctataggaaataaactggagacaaatctcatttaagagatgcagcaaagtgttcactaagagtgtttatcttgccagacataagaagatgaatggtagagcaacctgaaggatttagaaattacatataaatctttgcagttatgctatttgtaaacaggattatataggagagcaaataaacataagtatgcatttcttagagcagtagcttgcagtttcagttgagttctacttagaaattctttttagctagtgggcatgtgaagatatttagtcacccagaggagccagtaaatgttataatgttaaaaattaaagctgcaaaagaaataaaatggtgttaataaaaatttggcatctaataaaatcattttgtatatca

SEQ ID NO: 432697 - DNA, 4747 bp, Homo sapiens
aaataatgaaaattgacttctcatggttttggtgcctgggaagtccaagatcaagaggcaggcatctggcaagggccttcttgctgtgtccttttgtggtggatgggcaaagagacgagagagaggcaaaggggggccagaactcatttttttaaataaggaaccctcttccctgatgatgacattaatccattcatgagggcagagtcctcaaggcccaatagtctcctaaagatctaacctctcaatactattagaatggtgattaagttcaatacatgcttttttggggaacataatcaaaccatatgtctatcagtctttaatattaagatgtcttttttttctgaacccattttttgtgagatttagtgaatctttctgagtatcatatttgagagacaattgctttagccttatttttaattacttagctagcatgtaagctataaaagatataactaaatacttgactctgtgctgtcaaatgtcaaatgttgatttttaaaaattcatataattctaaacttttaacaaaattactgaagcaaagctctcatatttgtctctcattcttattgtataaaaattctaagcacataactgtcccctttattgtataattccaactacataactgtcctattattacttacctgacatcacattcccagtcattgtcacagctcctgaatcttgttccatttcttccacaagcaggctaattttaccccttcttcagtgacagaagaggcctgggctatggctgagcctaaatatatttgctatttcaggtgacatttagtgatgtggctatagacttctctcatgaagagtgggcatgcctagattctgctcagagggacttatacaaggatgtgatggtccagaattatgagaacctggtctctgtaggtaaggatatcaccccttccactccaataggggacacctttcttttgccaccctgaattgctggagattctcctaagtaaatggctgaattctgtaccatgctcccgaggaaatgtgcagctctgttgtgccctgcctaaagcttatctttccatttcagtgaacacccttcatccattcctgtggtccctcttgtgatggcctctcataatagaggaccacagcttaaacaattctatatttttcctgtaagcaggtctgtctttccgtaactaagccatatgtgatcatgttattggaggatggaaaagagccctggatgatggagaaaaaactgtcaaaaggtatgattccacatgagtcatggtgaacgagacaaaggaagattttgttaaagatgtttatagtgagtgtggaagcattttagggatactgtcttcaaagatctcagatagaaatgaaaaattgagggatatttagcttagattttcaaaacaattgttcctccctctcaaattattatctgtatcactcatgtcacctaatcaaggttagaggtttttgccatcataataattcaaattgttactatattcatgacaaagtaagacaatttattctttcttaattctacttaagaaaaatatactaatagttttaagctaagaaaagctgtcagttagatggaaaatcacttttctaaagctgagctttgtagatgaaatatgaacatattagaggaagtaagggacatataaatgtttctaggaataatattttctaatgttcaagaaaaatatgattcacacagtttcttcataacctcagaaagcctatatctttgtcagctataaagagcatttactttgtttttactgcagttgtttaatatagtagtatcaattctgtattttaagcttgataatccagcagcaaattgagattaatggaaggttggaaaaaaaggctatgaaacaaaatgcaacctttcccacatgaatataggcacaaaatgatgatttgtaatcctgaatgccttccacatcttatttctgatactttccttttttccatactattttatccatttcgtacagcttacccatttcctttatcacactctgttcctgcttctgtgaactttggattctctgctctatttgagcattgttcagaagtcactgaaatatttgagttgtcagaactatgtgttttctgggtgcttcatttcttatccaattctcctaattccactgtagaagcttttttcaagaagtaaaaaaaaaaaaaaaaaaaaaaaaaaaaggcagtgctttgctttcttgatatatttcagattgggaatcaagatgggaaaacaaggaattatcaacaaagaaggatatttatgatgaagattcaccccaaccagtaacaatggaaaaagttgtaaaacaaagttatgaattttcaaattctaataagaatttggaatatacagaatgcgacacatttagaagcacctttcattcaaagtctactctttctgaaccacaaaacaattctgctgaagggaattcacacaaatatgatatattaaagaagaatttatcaaaaaagtcagttataaaaagtgagagaataaatggtggaaagaaacttttaaattctaataaaagtggggcagccttcaaccagagcaaatctcttacccttccccagacttgtaatagagagaaaatctatacatgcagtgaatgtgggaaagcctttggcaaacagtcaatcctcagtcgccactggagaattcatacaggagagaagccctatgaatgtcgtgaatgtgggaagacttttagccatggttcatcccttacacgacatcagataagccatagtggagagaaaccttacaaatgcattgaatgtgggaaggcctttagccatggctcatcacttactaaccatcagagcactcacacgggagagaaaccgtatgaatgtatgaactgtggaaagtcttttagtcgtgtgtcccttctcattcagcatctaagaattcatacgcaagaaaaacgctatgagtgtcgtatatgtggaaaggccttcattcatagttcgtctctcattcaccatcagaaaagccatactggagagaagccttatgaatgtagagaatgtgggaaagctttctgctgtagctcacaccttactcaacatcaaagaattcacagtatgaagaaaaaatatgaatgcaacaaatgtctcaaggtctttagtagcttctcatttcttgttcaacatcagagtattcatactgaagaaaaaccgtttgaagtttagaaatgcaggaaatccttcaaccagcttgaatcactgaatatgcatttgagaaatcacattagattgaaaccctacgaatgcagtatatgtgggaaagcctttagtcataggtcgtccctgcttcaacatcacagtattcatactggagagaaaccttacgaatgtattaaatgtgggaagaccttcagctgtagttcaaaccttactgtacatcagagaattcatactggagaaaagccatataaatgtagtgagtgtgggaaagcttttagcaaaggctcgaatcttactgcccatcaaagagtacataatggagagaaacccaatagtgtggtaagtgtggaaaagcctttagatcatatgaatccctatacatgtgagaaatcttacagaagagaagcagtgtttatcacggtaaacttcattcatagatcctcccttatttaacatcagaaaaatgtatactggggaaaagttgtatgaaggtggtgaacatgggagacttttagcaatgatgcagatttttttattagagtttatactgtagagaaatcatatgaagtcaataaatgtgggaaagcctttgtcagtattaatcccttaattgacctaagtatactcacactaggaaaaatctgtgtacatgtagcaaatgtgggaaagactataggcaataggaatctcctgcaaactcctacaggagaaaagttgtatgaatgtggaaactttagaaattgaaggaatttttcagttccaagtgcatcccttattctataggaaataaactggagacaaatctcatttaagagatgcagcaaagtgttcactaagagtgtttatcttgccagacataagaagatgaatggtagagcaacctgaaggatttagaaattacatataaatctttgcagttatgctatttgtaaacaggattatataggagagcaaataaacataagtatgcatttcttagagcagtagcttgcagtttcagttgagttctacttagaaattctttttagctagtgggcatgtgaagatatttagtcacccagaggagccagtaaatgttataatgttaaaaattaaagctgcaaaagaaataaaatggtgttaataaaaatttggcatctaataaaatcattttgtatatcaaaaaaaaaaaacacacaaaccaaaaaaaacagaacaacaaaagacacaacaacaaacaccaacaaacactcaacgcacaacaacaaacacaaaaaacaaaaggcgcggcaaaataaccacacaagcaaaacaccccaatatcaaacgcgacacaggagaaaaagagaagcgccgccacaaacaccacaggagacacacaccgcaaaaagagacacacacgagagaaaaacgaacacaacaaaaaaaccgagaaccacaaggaggagacatagcggcgaggagacaatacaacacacacacagaccaacgcacgcaccaccaagcaacaaaggaaacagagacaccacacaccaac

SEQ ID NO: 432698 - DNA, 2893 bp, Homo sapiens
aatgtggttcgccgtgggcggtgcagctgggtcagtcccgcgatagcttcaggcctggcggcggcttccaagctaaggaacggtttggggcagtgtcgttcccggaggtcggccgccgttacccgctcaccagctacgcggcgcgtcaggtccgcggaggcgcgggctcggggcgcctgcgggacggtgaggccctgctgaggactccggacactgcccatctctaagataagaacctggaaaggggactctgttggccattggaaattgcagaataatgtctcaggtgacatttagtgatgtggctatagacttctctcatgaagagtgggcatgcctagattctgctcagagggacttatacaaggatgtgatggtccagaattatgagaacctggtctctgtaggtctttccgtaactaagccatatgtgatcatgttattggaggatggaaaagagccctggatgatggagaaaaaactgtcaaaagcttacccatttcctttatcacactctgttcctgcttctgtgaactttggattctctgctctatttgagcattgttcagaagtcactgaaatatttgagttgtcagaactatgtgttttctgggtgcttcatttcttatccaattctcctaattccactgtagaagcttttttcaagaagtaaaaaaaaaaaaaaaaaaaaaaaaaaaaaaaaaaaaaaaaaaaaaaaaaaggcagtgctttgctttcttgatatatttcagattgggaatcaagatgggaaaacaaggaattatcaacaaagaaggatatttatgatgaagattcaccccaaccagtaacaatggaaaaagttgtaaaacaaagttatgaattttcaaattctaataagaatttggaatatacagaatgcgacacatttagaagcacctttcattcaaagtctactctttctgaaccacaaaacaattctgctgaagggaattcacacaaatatgatatattaaagaagaatttatcaaaaaagtcagttataaaaagtgagagaataaatggtggaaagaaacttttaaattctaataaaagtggggcagccttcaaccagagcaaatctcttacccttccccagacttgtaatagagagaaaatctatacatgcagtgaatgtgggaaagcctttggcaaacagtcaatcctcagtcgccactggagaattcatacaggagagaagccctatgaatgtcgtgaatgtgggaagacttttagccatggttcatcccttacacgacatcagataagccatagtggagagaaaccttacaaatgcattgaatgtgggaaggcctttagccatggctcatcacttactaaccatcagagcactcacacgggagagaaaccgtatgaatgtatgaactgtggaaagtcttttagtcgtgtgtcccttctcattcagcatctaagaattcatacgcaagaaaaacgctatgagtgtcgtatatgtggaaaggccttcattcatagttcgtctctcattcaccatcagaaaagccatactggagagaagccttatgaatgtagagaatgtgggaaagctttctgctgtagctcacaccttactcaacatcaaagaattcacagtatgaagaaaaaatatgaatgcaacaaatgtctcaaggtctttagtagcttctcatttcttgttcaacatcagagtattcatactgaagaaaaaccgtttgaagtttagaaatgcaggaaatccttcaaccagcttgaatcactgaatatgcatttgagaaatcacattagattgaaaccctacgaatgcagtatatgtgggaaagcctttagtcataggtcgtccctgcttcaacatcacagtattcatactggagagaaaccttacgaatgtattaaatgtgggaagaccttcagctgtagttcaaaccttactgtacatcagagaattcatactggagaaaagccatataaatgtagtgagtgtgggaaagcttttagcaaaggctcgaatcttactgcccatcaaagagtacataatggagagaaacccaatagtgtggtaagtgtggaaaagcctttagatcatatgaatccctatacatgtgagaaatcttacagaagagaagcagtgtttatcacggtaaacttcattcatagatcctcccttatttaacatcagaaaaatgtatactggggaaaagttgtatgaaggtggtgaacatgggagacttttagcaatgatgcagatttttttattagagtttatactgtagagaaatcatatgaagtcaataaatgtgggaaagcctttgtcagtattaatcccttaattgacctaagtatactcacactaggaaaaatctgtgtacatgtagcaaatgtgggaaagactataggcaataggaatctcctgcaaactcctacaggagaaaagttgtatgaatgtggaaactttagaaattgaaggaatttttcagttccaagtgcatcccttattctataggaaataaactggagacaaatctcatttaagagatgcagcaaagtgttcactaagagtgtttatcttgccagacataagaagatgaatggtagagcaacctgaaggatttagaaattacatataaatctttgcagttatgctatttgtaaacaggattatataggagagcaaataaacataagtatgcatttcttagagcagtagcttgcagtttcagttgagttctacttagaaattctttttagctagtgggcatgtgaagatatttagtcacccagaggagccagtaaatgttataatgttaaaaattaaagctgcaaaagaaataaaatggtgttaataaaaatttggcatctaataaaatcattttgtatatca

SEQ ID NO: 432699 - DNA, 2870 bp, Homo sapiens
aatgtggttcgccgtgggcggtgcagctgggtcagtcccgcgatagcttcaggcctggcggcggcttccaagctaaggaacggtttggggcagtgtcgttcccggaggtcggccgccgttacccgctcaccagctacgcggcgcgtcaggtccgcggaggcgcgggctcggggcgcctgcgggacggacactgcccatctctaagataagaacctggaaaggggactctgttggccattggaaattgcagaataatgtctcaggtgacatttagtgatgtggctatagacttctctcatgaagagtgggcatgcctagattctgctcagagggacttatacaaggatgtgatggtccagaattatgagaacctggtctctgtaggtctttccgtaactaagccatatgtgatcatgttattggaggatggaaaagagccctggatgatggagaaaaaactgtcaaaagcttacccatttcctttatcacactctgttcctgcttctgtgaactttggattctctgctctatttgagcattgttcagaagtcactgaaatatttgagttgtcagaactatgtgttttctgggtgcttcatttcttatccaattctcctaattccactgtagaagcttttttcaagaagtaaaaaaaaaaaaaaaaaaaaaaaaaaaaaaaaaaaaaaaaaaaaaaaaaaggcagtgctttgctttcttgatatatttcagattgggaatcaagatgggaaaacaaggaattatcaacaaagaaggatatttatgatgaagattcaccccaaccagtaacaatggaaaaagttgtaaaacaaagttatgaattttcaaattctaataagaatttggaatatacagaatgcgacacatttagaagcacctttcattcaaagtctactctttctgaaccacaaaacaattctgctgaagggaattcacacaaatatgatatattaaagaagaatttatcaaaaaagtcagttataaaaagtgagagaataaatggtggaaagaaacttttaaattctaataaaagtggggcagccttcaaccagagcaaatctcttacccttccccagacttgtaatagagagaaaatctatacatgcagtgaatgtgggaaagcctttggcaaacagtcaatcctcagtcgccactggagaattcatacaggagagaagccctatgaatgtcgtgaatgtgggaagacttttagccatggttcatcccttacacgacatcagataagccatagtggagagaaaccttacaaatgcattgaatgtgggaaggcctttagccatggctcatcacttactaaccatcagagcactcacacgggagagaaaccgtatgaatgtatgaactgtggaaagtcttttagtcgtgtgtcccttctcattcagcatctaagaattcatacgcaagaaaaacgctatgagtgtcgtatatgtggaaaggccttcattcatagttcgtctctcattcaccatcagaaaagccatactggagagaagccttatgaatgtagagaatgtgggaaagctttctgctgtagctcacaccttactcaacatcaaagaattcacagtatgaagaaaaaatatgaatgcaacaaatgtctcaaggtctttagtagcttctcatttcttgttcaacatcagagtattcatactgaagaaaaaccgtttgaagtttagaaatgcaggaaatccttcaaccagcttgaatcactgaatatgcatttgagaaatcacattagattgaaaccctacgaatgcagtatatgtgggaaagcctttagtcataggtcgtccctgcttcaacatcacagtattcatactggagagaaaccttacgaatgtattaaatgtgggaagaccttcagctgtagttcaaaccttactgtacatcagagaattcatactggagaaaagccatataaatgtagtgagtgtgggaaagcttttagcaaaggctcgaatcttactgcccatcaaagagtacataatggagagaaacccaatagtgtggtaagtgtggaaaagcctttagatcatatgaatccctatacatgtgagaaatcttacagaagagaagcagtgtttatcacggtaaacttcattcatagatcctcccttatttaacatcagaaaaatgtatactggggaaaagttgtatgaaggtggtgaacatgggagacttttagcaatgatgcagatttttttattagagtttatactgtagagaaatcatatgaagtcaataaatgtgggaaagcctttgtcagtattaatcccttaattgacctaagtatactcacactaggaaaaatctgtgtacatgtagcaaatgtgggaaagactataggcaataggaatctcctgcaaactcctacaggagaaaagttgtatgaatgtggaaactttagaaattgaaggaatttttcagttccaagtgcatcccttattctataggaaataaactggagacaaatctcatttaagagatgcagcaaagtgttcactaagagtgtttatcttgccagacataagaagatgaatggtagagcaacctgaaggatttagaaattacatataaatctttgcagttatgctatttgtaaacaggattatataggagagcaaataaacataagtatgcatttcttagagcagtagcttgcagtttcagttgagttctacttagaaattctttttagctagtgggcatgtgaagatatttagtcacccagaggagccagtaaatgttataatgttaaaaattaaagctgcaaaagaaataaaatggtgttaataaaaatttggcatctaataaaatcattttgtatatca

SEQ ID NO: 432700 - DNA, 3947 bp, Homo sapiens
aaataatgaaaattgacttctcatggttttggtgcctgggaagtccaagatcaagaggcaggcatctggcaagggccttcttgctgtgtccttttgtggtggatgggcaaagagacgagagagaggcaaaggggggccagaactcatttttttaaataaggaaccctcttccctgatgatgacattaatccattcatgagggcagagtcctcaaggcccaatagtctcctaaagatctaacctctcaatactattagaatggtgattaagttcaatacatgcttttttggggaacataatcaaaccatatgtctatcagtctttaatattaagatgtcttttttttctgaacccattttttgtgagatttagtgaatctttctgagtatcatatttgagagacaattgctttagccttatttttaattacttagctagcatgtaagctataaaagatataactaaatacttgactctgtgctgtcaaatgtcaaatgttgatttttaaaaattcatataattctaaacttttaacaaaattactgaagcaaagctctcatatttgtctctcattcttattgtataaaaattctaagcacataactgtcccctttattgtataattccaactacataactgtcctattattacttacctgacatcacattcccagtcattgtcacagctcctgaatcttgttccatttcttccacaagcaggctaattttaccccttcttcagtgacagaagaggcctgggctatggctgagcctaaatatatttgctatttcaggtgacatttagtgatgtggctatagacttctctcatgaagagtgggcatgcctagattctgctcagagggacttatacaaggatgtgatggtccagaattatgagaacctggtctctgtaggtaaggatatcaccccttccactccaataggggacacctttcttttgccaccctgaattgctggagattctcctaagtaaatggctgaattctgtaccatgctcccgaggaaatgtgcagctctgttgtgccctgcctaaagcttatctttccatttcagtgaacacccttcatccattcctgtggtccctcttgtgatggcctctcataatagaggaccacagcttaaacaattctatatttttcctgtaagcaggtctgtctttccgtaactaagccatatgtgatcatgttattggaggatggaaaagagccctggatgatggagaaaaaactgtcaaaaggtatgattccacatgagtcatggtgaacgagacaaaggaagattttgttaaagatgtttatagtgagtgtggaagcattttagggatactgtcttcaaagatctcagatagaaatgaaaaattgagggatatttagcttagattttcaaaacaattgttcctccctctcaaattattatctgtatcactcatgtcacctaatcaaggttagaggtttttgccatcataataattcaaattgttactatattcatgacaaagtaagacaatttattctttcttaattctacttaagaaaaatatactaatagttttaagctaagaaaagctgtcagttagatggaaaatcacttttctaaagctgagctttgtagatgaaatatgaacatattagaggaagtaagggacatataaatgtttctaggaataatattttctaatgttcaagaaaaatatgattcacacagtttcttcataacctcagaaagcctatatctttgtcagctataaagagcatttactttgtttttactgcagttgtttaatatagtagtatcaattctgtattttaagcttgataatccagcagcaaattgagattaatggaaggttggaaaaaaaggctatgaaacaaaatgcaacctttcccacatgaatataggcacaaaatgatgatttgtaatcctgaatgccttccacatcttatttctgatactttccttttttccatactattttatccatttcgtacagcttacccatttcctttatcacactctgttcctgcttctgtgaactttggattctctgctctatttgagcattgttcagaagtcactgaaatatttgagttgtcagaactatgtgttttctgggtgcttcatttcttatccaattctcctaattccactgtagaagcttttttcaagaagtaaaaaaaaaaaaaaaaaaaaaaaaaaaaggcagtgctttgctttcttgatatatttcagattgggaatcaagatgggaaaacaaggaattatcaacaaagaaggatatttatgatgaagattcaccccaaccagtaacaatggaaaaagttgtaaaacaaagttatgaattttcaaattctaataagaatttggaatatacagaatgcgacacatttagaagcacctttcattcaaagtctactctttctgaaccacaaaacaattctgctgaagggaattcacacaaatatgatatattaaagaagaatttatcaaaaaagtcagttataaaaagtgagagaataaatggtggaaagaaacttttaaattctaataaaagtggggcagccttcaaccagagcaaatctcttacccttccccagacttgtaatagagagaaaatctatacatgcagtgaatgtgggaaagcctttggcaaacagtcaatcctcagtcgccactggagaattcatacaggagagaagccctatgaatgtcgtgaatgtgggaagacttttagccatggttcatcccttacacgacatcagataagccatagtggagagaaaccttacaaatgcattgaatgtgggaaggcctttagccatggctcatcacttactaaccatcagagcactcacacgggagagaaaccgtatgaatgtatgaactgtggaaagtcttttagtcgtgtgtcccttctcattcagcatctaagaattcatacgcaagaaaaacgctatgagtgtcgtatatgtggaaaggccttcattcatagttcgtctctcattcaccatcagaaaagccatactggagagaagccttatgaatgtagagaatgtgggaaagctttctgctgtagctcacaccttactcaacatcaaagaattcacagtatgaagaaaaaatatgaatgcaacaaatgtctcaaggtctttagtagcttctcatttcttgttcaacatcagagtattcatactgaagaaaaaccgtttgaagtttagaaatgcaggaaatccttcaaccagcttgaatcactgaatatgcatttgagaaatcacattagattgaaaccctacgaatgcagtatatgtgggaaagcctttagtcataggtcgtccctgcttcaacatcacagtattcatactggagagaaaccttacgaatgtattaaatgtgggaagaccttcagctgtagttcaaaccttactgtacatcagagaattcatactggagaaaagccatataaatgtagtgagtgtgggaaagcttttagcaaaggctcgaatcttactgcccatcaaagagtacataatggagagaaacccaatagtgtggtaagtgtggaaaagcctttagatcatatgaatccctatacatgtgagaaatcttacagaagagaagcagtgtttatcacggtaaacttcattcatagatcctcccttatttaacatcagaaaaatgtatactggggaaaagttgtatgaaggtggtgaacatgggagacttttagcaatgatgcagatttttttattagagtttatactgtagagaaatcatatgaagtcaataaatgtgggaaagcctttgtcagtattaatcccttaattgacctaagtatactcacactaggaaaaatctgtgtacatgtaggagtttgcaggagattcctattgcctatagtctttcccacatatgctacatgtagtcgacg

SEQ ID NO: 432701 - DNA, 2535 bp, Homo sapiens
aatgtggttcgccgtgggcggtgcagctgggtcagtcccgcgatagcttcaggcctggcggcggcttccaagctaaggaacggtttggggcagtgtcgttcccggaggtcggccgccgttacccgctcaccagctacgcggcgcgtcaggacactgcccatctctaagataagaacctggaaaggggactctgttggccattggaaattgcagaataatgtctcaggtgacatttagtgatgtggctatagacttctctcatgaagagtgggcatgcctagattctgctcagagggacttatacaaggatgtctttccgtaactaagccatatgtgatcatgttattggaggatggaaaagagccctggatgatggagaaaaaactgtcaaaagattgggaatcaagatgggaaaacaaggaattatcaacaaagaaggatatttatgatgaagattcaccccaaccagtaacaatggaaaaagttgtaaaacaaagttatgaattttcaaattctaataagaatttggaatatacagaatgcgacacatttagaagcacctttcattcaaagtctactctttctgaaccacaaaacaattctgctgaagggaattcacacaaatatgatatattaaagaagaatttatcaaaaaagtcagttataaaaagtgagagaataaatggtggaaagaaacttttaaattctaataaaagtggggcagccttcaaccagagcaaatctcttacccttccccagacttgtaatagagagaaaatctatacatgcagtgaatgtgggaaagcctttggcaaacagtcaatcctcagtcgccactggagaattcatacaggagagaagccctatgaatgtcgtgaatgtgggaagacttttagccatggttcatcccttacacgacatcagataagccatagtggagagaaaccttacaaatgcattgaatgtgggaaggcctttagccatggctcatcacttactaaccatcagagcactcacacgggagagaaaccgtatgaatgtatgaactgtggaaagtcttttagtcgtgtgtcccttctcattcagcatctaagaattcatacgcaagaaaaacgctatgagtgtcgtatatgtggaaaggccttcattcatagttcgtctctcattcaccatcagaaaagccatactggagagaagccttatgaatgtagagaatgtgggaaagctttctgctgtagctcacaccttactcaacatcaaagaattcacagtatgaagaaaaaatatgaatgcaacaaatgtctcaaggtctttagtagcttctcatttcttgttcaacatcagagtattcatactgaagaaaaaccgtttgaagtttagaaatgcaggaaatccttcaaccagcttgaatcactgaatatgcatttgagaaatcacattagattgaaaccctacgaatgcagtatatgtgggaaagcctttagtcataggtcgtccctgcttcaacatcacagtattcatactggagagaaaccttacgaatgtattaaatgtgggaagaccttcagctgtagttcaaaccttactgtacatcagagaattcatactggagaaaagccatataaatgtagtgagtgtgggaaagcttttagcaaaggctcgaatcttactgcccatcaaagagtacataatggagagaaacccaatagtgtggtaagtgtggaaaagcctttagatcatatgaatccctatacatgtgagaaatcttacagaagagaagcagtgtttatcacggtaaacttcattcatagatcctcccttatttaacatcagaaaaatgtatactggggaaaagttgtatgaaggtggtgaacatgggagacttttagcaatgatgcagatttttttattagagtttatactgtagagaaatcatatgaagtcaataaatgtgggaaagcctttgtcagtattaatcccttaattgacctaagtatactcacactaggaaaaatctgtgtacatgtagcaaatgtgggaaagactataggcaataggaatctcctgcaaactcctacaggagaaaagttgtatgaatgtggaaactttagaaattgaaggaatttttcagttccaagtgcatcccttattctataggaaataaactggagacaaatctcatttaagagatgcagcaaagtgttcactaagagtgtttatcttgccagacataagaagatgaatggtagagcaacctgaaggatttagaaattacatataaatctttgcagttatgctatttgtaaacaggattatataggagagcaaataaacataagtatgcatttcttagagcagtagcttgcagtttcagttgagttctacttagaaattctttttagctagtgggcatgtgaagatatttagtcacccagaggagccagtaaatgttataatgttaaaaattaaagctgcaaaagaaataaaatggtgttaataaaaatttggcatctaataaaatcattttgtatatca

SEQ ID NO: 432702 - DNA, 1657 bp, Homo sapiens
aaataatgaaaattgacttctcatggttttggtgcctgggaagtccaagatcaagaggcaggcatctggcaagggccttcttgctgtgtccttttgtggtggatgggcaaagagacgagagagaggcaaaggggggccagaactcatttttttaaataaggaaccctcttccctgatgatgacattaatccattcatgagggcagagtcctcaaggcccaatagtctcctaaagatctaacctctcaatactattagaatggtgattaagttcaatacatgcttttttggggaacataatcaaaccatatgtctatcagtctttaatattaagatgtcttttttttctgaacccattttttgtgagatttagtgaatctttctgagtatcatatttgagagacaattgctttagccttatttttaattacttagctagcatgtaagctataaaagatataactaaatacttgactctgtgctgtcaaatgtcaaatgttgatttttaaaaattcatataattctaaacttttaacaaaattactgaagcaaagctctcatatttgtctctcattcttattgtataaaaattctaagcacataactgtcccctttattgtataattccaactacataactgtcctattattacttacctgacatcacattcccagtcattgtcacagctcctgaatcttgttccatttcttccacaagcaggctaattttaccccttcttcagtgacagaagaggcctgggctatggctgagcctaaatatatttgctatttcaggtgacatttagtgatgtggctatagacttctctcatgaagagtgggcatgcctagattctgctcagagggacttatacaaggatgtgatggtccagaattatgagaacctggtctctgtaggtaaggatatcaccccttccactccaataggggacacctttcttttgccaccctgaattgctggagattctcctaagtaaatggctgaattctgtaccatgctcccgaggaaatgtgcagctctgttgtgccctgcctaaagcttatctttccatttcagtgaacacccttcatccattcctgtggtccctcttgtgatggcctctcataatagaggaccacagcttaaacaattctatatttttcctgtaagcaggtctgtctttccgtaactaagccatatgtgatcatgttattggaggatggaaaagagccctggatgatggagaaaaaactgtcaaaagattgggaatcaagatgggaaaacaaggaattatcaacaaagaaggatatttatgatgaagattcaccccaaccagtaacaatggaaaaagttgtaaaacaaagtgctgggattacaggcatgagccaccacgcctggctaattttttgtatttttagtagagacagggtttcaccatgttggcctggctggtcttgaacttttgacctcacgtgaccgcccgcctcagcctcccatagtgctgggattacaggtgtgagccaccgcacccggccttggttgacttttgaggcccgaacattcttagttgtgggggaggaggtggaggttgcagtgagccgagatggcgctaccgcactccagactgggtgacaccccaaacctccatctcaaaaaaaa

SEQ ID NO: 432703 - DNA, 789 bp, Homo sapiens
aatgtggttcgccgtgggcggtgcagctgggtcagtcccgcgatagcttcaggcctggcggcggcttccaagctaaggaacggtttggggcagtgtcgttcccggaggtcggccgccgttacccgctcaccagctacgcggcgcgtcaggtccgcggaggcgcgggctcggggcgcctgcgggacggtgaggccctgctgaggactccggcaagtgtgggtcgcggcgacggcggggctaaggccctgggtccgcgcgcggtttgaccacggccggggccttgggcatttcctggccttcctgttgagccgtgtaaacgcggggtgatgacggcgccgacctcttggcactgttgtgagagcgaagtgggcgcgagagcagacgccagctacagtttttttgggttatgtcgtcatgaagccggcgctttcagttgtgcaaccttgaacaaatgggttcagtatctcggaatttcagttttgtcttcattttaaaaaataaatctggtttagaactcgacctcaagcgatccgcccgcctccgccttccgaagtgctgggattaaaggcgtaagccaccgcaccagcctaacgaacatggcgaaacgccgtctctactaaaaatacaaaaaaaaattagctgggcgtggtggcacgtgtctataatcccagctattcgagaggttgaggtaggagaatcgcttcaacccgggaggcagaggttgcagtgagtcgaggtcgctccattgcactccagcctggagacagaacgagactccgtctcaaaaaa

SEQ ID NO: 432704 - DNA, 3117 bp, Homo sapiens
aatgtggttcgccgtgggcggtgcagctgggtcagtcccgcgatagcttcaggcctggcggcggcttccaagctaaggaacggtttggggcagtgtcgttcccggaggtcggccgccgttacccgctcaccagctacgcggcgcgtcaggtccgcggaggcgcgggctcggggcgcctgcgggacggtgaggccctgctgaggactccggcaagtgtgggtcgcggcgacggcggggctaaggccctgggtccgcgcgcggtttgaccacggccggggccttgggcatttcctggccttcctgttgagccgtgtaaacgcggggtgatgacggcgccgacctcttggcactgttgtgagagcgaagtgggcgcgagagcagacgccagctacagtttttttgggttatgtcgtcatgaagccggcgctttcagttgtgcaaccttgaacaaatgggacactgcccatctctaagataagaacctggaaaggggactctgttggccattggaaattgcagaataatgtctcaggtgacatttagtgatgtggctatagacttctctcatgaagagtgggcatgcctagattctgctcagagggacttatacaaggatgtgatggtccagaattatgagaacctggtctctgtaggtctttccgtaactaagccatatgtgatcatgttattggaggatggaaaagagccctggatgatggagaaaaaactgtcaaaagcttacccatttcctttatcacactctgttcctgcttctgtgaactttggattctctgctctatttgagcattgttcagaagtcactgaaatatttgagttgtcagaactatgtgttttctgggtgcttcatttcttatccaattctcctaattccactgtagaagcttttttcaagaagtaaaaaaaaaaaaaaaaaaaaaaaaaaaaggcagtgctttgctttcttgatatatttcagattgggaatcaagatgggaaaacaaggaattatcaacaaagaaggatatttatgatgaagattcaccccaaccagtaacaatggaaaaagttgtaaaacaaagttatgaattttcaaattctaataagaatttggaatatacagaatgcgacacatttagaagcacctttcattcaaagtctactctttctgaaccacaaaacaattctgctgaagggaattcacacaaatatgatatattaaagaagaatttatcaaaaaagtcagttataaaaagtgagagaataaatggtggaaagaaacttttaaattctaataaaagtggggcagccttcaaccagagcaaatctcttacccttccccagacttgtaatagagagaaaatctatacatgcagtgaatgtgggaaagcctttggcaaacagtcaatcctcagtcgccactggagaattcatacaggagagaagccctatgaatgtcgtgaatgtgggaagacttttagccatggttcatcccttacacgacatcagataagccatagtggagagaaaccttacaaatgcattgaatgtgggaaggcctttagccatggctcatcacttactaaccatcagagcactcacacgggagagaaaccgtatgaatgtatgaactgtggaaagtcttttagtcgtgtgtcccttctcattcagcatctaagaattcatacgcaagaaaaacgctatgagtgtcgtatatgtggaaaggccttcattcatagttcgtctctcattcaccatcagaaaagccatactggagagaagccttatgaatgtagagaatgtgggaaagctttctgctgtagctcacaccttactcaacatcaaagaattcacagtatgaagaaaaaatatgaatgcaacaaatgtctcaaggtctttagtagcttctcatttcttgttcaacatcagagtattcatactgaagaaaaaccgtttgaagtttagaaatgcaggaaatccttcaaccagcttgaatcactgaatatgcatttgagaaatcacattagattgaaaccctacgaatgcagtatatgtgggaaagcctttagtcataggtcgtccctgcttcaacatcacagtattcatactggagagaaaccttacgaatgtattaaatgtgggaagaccttcagctgtagttcaaaccttactgtacatcagagaattcatactggagaaaagccatataaatgtagtgagtgtgggaaagcttttagcaaaggctcgaatcttactgcccatcaaagagtacataatggagagaaacccaatagtgtggtaagtgtggaaaagcctttagatcatatgaatccctatacatgtgagaaatcttacagaagagaagcagtgtttatcacggtaaacttcattcatagatcctcccttatttaacatcagaaaaatgtatactggggaaaagttgtatgaaggtggtgaacatgggagacttttagcaatgatgcagatttttttattagagtttatactgtagagaaatcatatgaagtcaataaatgtgggaaagcctttgtcagtattaatcccttaattgacctaagtatactcacactaggaaaaatctgtgtacatgtagcaaatgtgggaaagactataggcaataggaatctcctgcaaactcctacaggagaaaagttgtatgaatgtggaaactttagaaattgaaggaatttttcagttccaagtgcatcccttattctataggaaataaactggagacaaatctcatttaagagatgcagcaaagtgttcactaagagtgtttatcttgccagacataagaagatgaatggtagagcaacctgaaggatttagaaattacatataaatctttgcagttatgctatttgtaaacaggattatataggagagcaaataaacataagtatgcatttcttagagcagtagcttgcagtttcagttgagttctacttagaaattctttttagctagtgggcatgtgaagatatttagtcacccagaggagccagtaaatgttataatgttaaaaattaaagctgcaaaagaaataaaatggtgttaataaaaatttggcatctaataaaatcattttgtatatca

SEQ ID NO: 432705 - DNA, 4262 bp, Homo sapiens
aatgtggttcgccgtgggcggtgcagctgggtcagtcccgcgatagcttcaggcctggcggcggcttccaagctaaggaacggtttggggcagtgtcgttcccggaggtcggccgccgttacccgctcaccagctacgcggcgcgtcaggtccgcggaggcgcgggctcggggcgcctgcgggacggtgaggccctgctgaggactccggcaagtgtgggtcgcggcgacggcggggctaaggccctgggtccgcgcgcggtttgaccacggccggggccttgggcatttcctggccttcctgttgagccgtgtaaacgcggggtgatgacggcgccgacctcttggcactgttgtgagagcgaagtgggcgcgagagcagacgccagctacagtttttttgggttatgtcgtcatgaagccggcgctttcagttgtgcaaccttgaacaaatgggacactgcccatctctaagataagaacctggaaaggggactctgttggccattggaaattgcagaataatgtctcagcgtcagtacccagagtgttacctggcaccaaatggatgcttagtaagtaattgtggagtgaataagatgagtaatgaagaactggtggggcagaatcatggcatggaaggtgaagcttgcacaggaggggatgtgacatttagtgatgtggctatagacttctctcatgaagagtgggcatgcctagattctgctcagagggacttatacaaggatgtgatggtccagaattatgagaacctggtctctgtaggtaaggatatcaccccttccactccaataggggacacctttcttttgccaccctgaattgctggagattctcctaagtaaatggctgaattctgtaccatgctcccgaggaaatgtgcagctctgttgtgccctgcctaaagcttatctttccatttcagtgaacacccttcatccattcctgtggtccctcttgtgatggcctctcataatagaggaccacagcttaaacaattctatatttttcctgtaagcaggtctgtctttccgtaactaagccatatgtgatcatgttattggaggatggaaaagagccctggatgatggagaaaaaactgtcaaaaggtatgattccacatgagtcatggtgaacgagacaaaggaagattttgttaaagatgtttatagtgagtgtggaagcattttagggatactgtcttcaaagatctcagatagaaatgaaaaattgagggatatttagcttagattttcaaaacaattgttcctccctctcaaattattatctgtatcactcatgtcacctaatcaaggttagaggtttttgccatcataataattcaaattgttactatattcatgacaaagtaagacaatttattctttcttaattctacttaagaaaaatatactaatagttttaagctaagaaaagctgtcagttagatggaaaatcacttttctaaagctgagctttgtagatgaaatatgaacatattagaggaagtaagggacatataaatgtttctaggaataatattttctaatgttcaagaaaaatatgattcacacagtttcttcataacctcagaaagcctatatctttgtcagctataaagagcatttactttgtttttactgcagttgtttaatatagtagtatcaattctgtattttaagcttgataatccagcagcaaattgagattaatggaaggttggaaaaaaaggctatgaaacaaaatgcaacctttcccacatgaatataggcacaaaatgatgatttgtaatcctgaatgccttccacatcttatttctgatactttccttttttccatactattttatccatttcgtacagcttacccatttcctttatcacactctgttcctgcttctgtgaactttggattctctgctctatttgagcattgttcagaagtcactgaaatatttgagttgtcagaactatgtgttttctgggtgcttcatttcttatccaattctcctaattccactgtagaagcttttttcaagaagtaaaaaaaaaaaaaaaaaaaaaaaaaaaaggcagtgctttgctttcttgatatatttcagattgggaatcaagatgggaaaacaaggaattatcaacaaagaaggatatttatgatgaagattcaccccaaccagtaacaatggaaaaagttgtaaaacaaagttatgaattttcaaattctaataagaatttggaatatacagaatgcgacacatttagaagcacctttcattcaaagtctactctttctgaaccacaaaacaattctgctgaagggaattcacacaaatatgatatattaaagaagaatttatcaaaaaagtcagttataaaaagtgagagaataaatggtggaaagaaacttttaaattctaataaaagtggggcagccttcaaccagagcaaatctcttacccttccccagacttgtaatagagagaaaatctatacatgcagtgaatgtgggaaagcctttggcaaacagtcaatcctcagtcgccactggagaattcatacaggagagaagccctatgaatgtcgtgaatgtgggaagacttttagccatggttcatcccttacacgacatcagataagccatagtggagagaaaccttacaaatgcattgaatgtgggaaggcctttagccatggctcatcacttactaaccatcagagcactcacacgggagagaaaccgtatgaatgtatgaactgtggaaagtcttttagtcgtgtgtcccttctcattcagcatctaagaattcatacgcaagaaaaacgctatgagtgtcgtatatgtggaaaggccttcattcatagttcgtctctcattcaccatcagaaaagccatactggagagaagccttatgaatgtagagaatgtgggaaagctttctgctgtagctcacaccttactcaacatcaaagaattcacagtatgaagaaaaaatatgaatgcaacaaatgtctcaaggtctttagtagcttctcatttcttgttcaacatcagagtattcatactgaagaaaaaccgtttgaagtttagaaatgcaggaaatccttcaaccagcttgaatcactgaatatgcatttgagaaatcacattagattgaaaccctacgaatgcagtatatgtgggaaagcctttagtcataggtcgtccctgcttcaacatcacagtattcatactggagagaaaccttacgaatgtattaaatgtgggaagaccttcagctgtagttcaaaccttactgtacatcagagaattcatactggagaaaagccatataaatgtagtgagtgtgggaaagcttttagcaaaggctcgaatcttactgcccatcaaagagtacataatggagagaaacccaatagtgtggtaagtgtggaaaagcctttagatcatatgaatccctatacatgtgagaaatcttacagaagagaagcagtgtttatcacggtaaacttcattcatagatcctcccttatttaacatcagaaaaatgtatactggggaaaagttgtatgaaggtggtgaacatgggagacttttagcaatgatgcagatttttttattagagtttatactgtagagaaatcatatgaagtcaataaatgtgggaaagcctttgtcagtattaatcccttaattgacctaagtatactcacactaggaaaaatctgtgtacatgtagcaaatgtgggaaagactataggcaataggaatctcctgcaaactcctacaggagaaaagttgtatgaatgtggaaactttagaaattgaaggaatttttcagttccaagtgcatcccttattctataggaaataaactggagacaaatctcatttaagagatgcagcaaagtgttcactaagagtgtttatcttgccagacataagaagatgaatggtagagcaacctgaaggatttagaaattacatataaatctttgcagttatgctatttgtaaacaggattatataggagagcaaataaacataagtatgcatttcttagagcagtagcttgcagtttcagttgagttctacttagaaattctttttagctagtgggcatgtgaagatatttagtcacccagaggagccagtaaatgttataatgttaaaaattaaagctgcaaaagaaataaaatggtgttaataaaaatttggcatctaataaaatcattttgtatatca

SEQ ID NO: 432706 - DNA, 2609 bp, Homo sapiens
aatgtggttcgccgtgggcggtgcagctgggtcagtcccgcgatagcttcaggcctggcggcggcttccaagctaaggaacggtttggggcagtgtcgttcccggaggtcggccgccgttacccgctcaccagctacgcggcgcgtcaggtccgcggaggcgcgggctcggggcgcctgcgggacggacactgcccatctctaagataagaacctggaaaggggactctgttggccattggaaattgcagaataatgtctcaggtgacatttagtgatgtggctatagacttctctcatgaagagtgggcatgcctagattctgctcagagggacttatacaaggatgtgatggtccagaattatgagaacctggtctctgtaggtctttccgtaactaagccatatgtgatcatgttattggaggatggaaaagagccctggatgatggagaaaaaactgtcaaaagattgggaatcaagatgggaaaacaaggaattatcaacaaagaaggatatttatgatgaagattcaccccaaccagtaacaatggaaaaagttgtaaaacaaagttatgaattttcaaattctaataagaatttggaatatacagaatgcgacacatttagaagcacctttcattcaaagtctactctttctgaaccacaaaacaattctgctgaagggaattcacacaaatatgatatattaaagaagaatttatcaaaaaagtcagttataaaaagtgagagaataaatggtggaaagaaacttttaaattctaataaaagtggggcagccttcaaccagagcaaatctcttacccttccccagacttgtaatagagagaaaatctatacatgcagtgaatgtgggaaagcctttggcaaacagtcaatcctcagtcgccactggagaattcatacaggagagaagccctatgaatgtcgtgaatgtgggaagacttttagccatggttcatcccttacacgacatcagataagccatagtggagagaaaccttacaaatgcattgaatgtgggaaggcctttagccatggctcatcacttactaaccatcagagcactcacacgggagagaaaccgtatgaatgtatgaactgtggaaagtcttttagtcgtgtgtcccttctcattcagcatctaagaattcatacgcaagaaaaacgctatgagtgtcgtatatgtggaaaggccttcattcatagttcgtctctcattcaccatcagaaaagccatactggagagaagccttatgaatgtagagaatgtgggaaagctttctgctgtagctcacaccttactcaacatcaaagaattcacagtatgaagaaaaaatatgaatgcaacaaatgtctcaaggtctttagtagcttctcatttcttgttcaacatcagagtattcatactgaagaaaaaccgtttgaagtttagaaatgcaggaaatccttcaaccagcttgaatcactgaatatgcatttgagaaatcacattagattgaaaccctacgaatgcagtatatgtgggaaagcctttagtcataggtcgtccctgcttcaacatcacagtattcatactggagagaaaccttacgaatgtattaaatgtgggaagaccttcagctgtagttcaaaccttactgtacatcagagaattcatactggagaaaagccatataaatgtagtgagtgtgggaaagcttttagcaaaggctcgaatcttactgcccatcaaagagtacataatggagagaaacccaatagtgtggtaagtgtggaaaagcctttagatcatatgaatccctatacatgtgagaaatcttacagaagagaagcagtgtttatcacggtaaacttcattcatagatcctcccttatttaacatcagaaaaatgtatactggggaaaagttgtatgaaggtggtgaacatgggagacttttagcaatgatgcagatttttttattagagtttatactgtagagaaatcatatgaagtcaataaatgtgggaaagcctttgtcagtattaatcccttaattgacctaagtatactcacactaggaaaaatctgtgtacatgtagcaaatgtgggaaagactataggcaataggaatctcctgcaaactcctacaggagaaaagttgtatgaatgtggaaactttagaaattgaaggaatttttcagttccaagtgcatcccttattctataggaaataaactggagacaaatctcatttaagagatgcagcaaagtgttcactaagagtgtttatcttgccagacataagaagatgaatggtagagcaacctgaaggatttagaaattacatataaatctttgcagttatgctatttgtaaacaggattatataggagagcaaataaacataagtatgcatttcttagagcagtagcttgcagtttcagttgagttctacttagaaattctttttagctagtgggcatgtgaagatatttagtcacccagaggagccagtaaatgttataatgttaaaaattaaagctgcaaaagaaataaaatggtgttaataaaaatttggcatctaataaaatcattttgtatatca

SEQ ID NO: 432707 - DNA, 1005 bp, Homo sapiens
  misc_feature (874)..(874): n is a, c, g, or t
  misc_feature (880)..(880): n is a, c, g, or t
aatgtggttcgccgtgggcggtgcagctgggtcagtcccgcgatagcttcaggcctggcggcggcttccaagctaaggaacggtttggggcagtgtcgttcccggaggtcggccgccgttacccgctcaccagctacgcggcgcgtcaggtccgcggaggcgcgggctcggggcgcctgcgggacggtgaggccctgctgaggactccggacactgcccatctctaagataagaacctggaaaggggactctgttggccattggaaattgcagaataatgtctcaggtgacatttagtgatgtggctatagacttctctcatgaagagtgggcatgcctagattctgctcagagggacttatacaaggatgtgatggtccagaattatgagaacctggtctctgtaggtctttccgtaactaagccatatgtgatcatgttattggaggatggaaaagagccctggatgatggagaaaaaactgtcaaaagattgggaatcaagatgggaaaacaaggaattatcaacaaagaaggatatttatgatgaagattcaccccaaccagtaacaatggaaaaagttgtaaaacaaagttatgaattttcaaattctaataagaatttggaatatacagaatgcgacacatttagaagcacctttcattcaaagtctactctttctgaaccacaaaacaattctgctgaagggaattcacacaaatatgatatattaaagaagaatttatcaaaaaagtcagttataaaaagtgagagaataaatggtggaaagaaacttttaaattctaataaaagtggggcagccttcaaccagagcaaatctcttacccttccccagacttgtaatagagagaantgagantcatacagagagaagcctatgatgtctgaatgtggaagactttagcatggtcatccttcacgacttcgataagccatatgagagaacctacaatgcttgatgttggaagccttacccttgttata

SEQ ID NO: 432708 - DNA, 3380 bp, Homo sapiens
  misc_feature (1557)..(1557): n is a, c, g, or t
gcttaggcgccgctgagcgctgactgggtgcgagtggggaagctgctaacccgacccggattggcgctgaggtggcccgtggggcagggcagatgattctggaccagatgaagcctgaggagccttccagctctaagatagcaggataggagacttctaagattggagctgcagaagacttgccagcccaccagcacaatgtcaggaagccatacacctgcctgtggccctttctcagccctgactccgagcatatggccccaggagatcttggccaagtacacgcagaaggaagagtcagcagagcaaccagagttctactacgatgagtttggtttccgtgtgtacaaggaagaaggtgatgagcctggctccagtctgctggcgaactcccctctgatggaggatgctccacagaggctgcggtggcaggcccacctggagttcacccataaccacgatgtgggggatctcacctgggacaagattgccgtctccctaccccgctctgagaagctccgctccctggtgctggccggcatcccacatggcatgaggccacaggtaaggtggccacagggacccacagggtgttgagagggtcctggccccatgatcaggtgtcacgagaaagactgagtgcccttgcggctcccttccctcagctgtggatgcggctctctggggccctgcagaagaagaggaactctgagctgtcctaccgcgagattgtgaagaacagctccaacgatgagaccatcgctgccaagcagatcgagaaggacctgctccgcaccatgcccagcaacgcctgcttcgccagcatgggtagcatcggggtgccccgcctgcgcagggtgctccgggccctggcctggctctacccagagatcggctactgccagggcaccggcatggtggccgcctgcctcctgctgttcctggaggaggaggacgccttctggatgatgtctgccatcatcgaggacctgctccccgcctcctacttcagcaccaccctgctgggtgtccagactgaccagcgggtcctgcgccacctcattgtccagtacctgcctcgcctggacaagctgctccaggagcatgacattgagctgtccctgatcacactgcactggttcctcacggccttcgccagcgtggtggacatcaagctgctcctgcgcatctgggacctgtttttctacgagggctcccgggtgctgttccagctcacgctgggcatgctgcacctcaaggaggaagagctgatccagtcagagaactcggcctccatcttcaacacgctatcggatatcccgtcgcagatggaggacgcggagctgcttctgggggtggccatgcggctggccggctccctcaccgatgtggccgtggagactcagcgccgcaagcacctggcctatctcattgcagaccagggccagctcctgggggccggcaccctcaccaacctctctcaggtggcccaggatggggggccgcaccttgacccacagcacacggggaggaggggtcaccttgaagttcagagcncgggggctgcggaaaacaaaccagcccttcctgctctgccccccagcctggcccagtcagaccacagctgtggggtgatccaggcctcctcaggctttgtgcacctcaggttctgatcctggcacggtttgggaggaaggcagacccagctctgattatctgttttcaattcttggagccagcgtcagaggctatttcagatgagacagtataagccaagggctggtgggttctcttcctcccggggccaggaccaccctgacccactcctcttggtgcaggttgttcgccgcaggacccagcggaggaagtccaccatcactgctctgctcttcggtgagagctctgcgagtgccaggcagtgtgggcatgcgggagtctgtcctcacgctcatgtggacgtggagcttcctcctcgggggcctggagtgggctgtggtcaccatggttctctgggcctcctaggggaggatgacctggaggcactcaaggccaagaacatcaagcagacggaactggtggctgacctccgggaagccatcctgcgcgtggcacgccacttccagtgcacagaccccaaaaactgcagcgtggagctgactccagactatagcatggagagccaccagcgggaccacgagaactacgtggcgtgctcacgcagccaccggcgccgagccaaggccctgctggactttgagcggcacgacgacgacgagctgggcttccgcaagaacgacatcatcacaatcgtgtctcagaaggacgagcactgctgggtgggggagctcaacggcctgcgaggctggtttccagccaagttcgtggaagtcctggatgagcgcagcaaagagtactccatcgcgggggatgactcggtgacggagggggtcacagacctcgtgcgagggaccctctgcccggcccttaaggccctgttcgaacatggactgaagaagccatccctgcttgggggcgcctgccacccctggctgtttatcgaggaggctgcaggccgggaggtcgagagagactttgcctccgtgtattcccgtctggtgctctgtaagaccttcaggttggatgaagatggcaaagtcctgaccccggaggagctgctctaccgggctgtgcagtctgtgaacgtgacccacgatgcagtgcatgcacaaatggatgtgaagctccgctcactgatctgcgtggggctcaatgagcaggtgctgcacctgtggctggaggtgctctgctccagcctgcccaccgtggagaagtggtaccagccctggtccttcctgcgcagcccgggctgggtccagatcaagtgtgagctccgagtcctctgctgctttgccttcagcctctcccaggactgggagctccctgcgaagagagaggcgcagcagcccctgaaggagggcgtccgggacatgctggtgaagcaccacctcttcagctgggatgtggacgggtgaccccctcctccccagcccaacctcgggcctgcgtctgaggtggcccaggaccccaagctgcagagcccagggaagagcagctccagagccctggccggggccgcgggatatcaatatcaggctgccccactccacgttccccagcacatcccaggtggtgggagcagagggtaccctgccccaccagggtccttagggatgctctaggccaaaccacagtttgtaccaaaaaccttgtgaggaggtgggggagccatgtctgtgctcaggaagagggaaggggatgggggtggctagtaggctcctggcctctttggtttataaataaactgtgtctgtctttgaaaa

SEQ ID NO: 432709 - DNA, 3467 bp, Homo sapiens
  misc_feature (1557)..(1557): n is a, c, g, or t
gcttaggcgccgctgagcgctgactgggtgcgagtggggaagctgctaacccgacccggattggcgctgaggtggcccgtggggcagggcagatgattctggaccagatgaagcctgaggagccttccagctctaagatagcaggataggagacttctaagattggagctgcagaagacttgccagcccaccagcacaatgtcaggaagccatacacctgcctgtggccctttctcagccctgactccgagcatatggccccaggagatcttggccaagtacacgcagaaggaagagtcagcagagcaaccagagttctactacgatgagtttggtttccgtgtgtacaaggaagaaggtgatgagcctggctccagtctgctggcgaactcccctctgatggaggatgctccacagaggctgcggtggcaggcccacctggagttcacccataaccacgatgtgggggatctcacctgggacaagattgccgtctccctaccccgctctgagaagctccgctccctggtgctggccggcatcccacatggcatgaggccacaggtaaggtggccacagggacccacagggtgttgagagggtcctggccccatgatcaggtgtcacgagaaagactgagtgcccttgcggctcccttccctcagctgtggatgcggctctctggggccctgcagaagaagaggaactctgagctgtcctaccgcgagattgtgaagaacagctccaacgatgagaccatcgctgccaagcagatcgagaaggacctgctccgcaccatgcccagcaacgcctgcttcgccagcatgggtagcatcggggtgccccgcctgcgcagggtgctccgggccctggcctggctctacccagagatcggctactgccagggcaccggcatggtggccgcctgcctcctgctgttcctggaggaggaggacgccttctggatgatgtctgccatcatcgaggacctgctccccgcctcctacttcagcaccaccctgctgggtgtccagactgaccagcgggtcctgcgccacctcattgtccagtacctgcctcgcctggacaagctgctccaggagcatgacattgagctgtccctgatcacactgcactggttcctcacggccttcgccagcgtggtggacatcaagctgctcctgcgcatctgggacctgtttttctacgagggctcccgggtgctgttccagctcacgctgggcatgctgcacctcaaggaggaagagctgatccagtcagagaactcggcctccatcttcaacacgctatcggatatcccgtcgcagatggaggacgcggagctgcttctgggggtggccatgcggctggccggctccctcaccgatgtggccgtggagactcagcgccgcaagcacctggcctatctcattgcagaccagggccagctcctgggggccggcaccctcaccaacctctctcaggtggcccaggatggggggccgcaccttgacccacagcacacggggaggaggggtcaccttgaagttcagagcncgggggctgcggaaaacaaaccagcccttcctgctctgccccccagcctggcccagtcagaccacagctgtggggtgatccaggcctcctcaggctttgtgcacctcaggttctgatcctggcacggtttgggaggaaggcagacccagctctgattatctgttttcaattcttggagccagcgtcagaggctatttcagatgagacagtataagccaagggctggtgggttctcttcctcccggggccaggaccaccctgacccactcctcttggtgcaggttgttcgccgcaggacccagcggaggaagtccaccatcactgctctgctcttcggtgagagctctgcgagtgccaggcagtgtgggcatgcgggagtctgtcctcacgctcatgtggacgtggagcttcctcctcgggggcctggagtgggctgtggtcaccatggttctctgggcctcctaggggaggatgacctggaggcactcaaggccaagaacatcaagcagacggaactggtggctgacctccgggaagccatcctgcgcgtggcacgccacttccagtgcacagaccccaaaaactgcagcgtggtggtgagtcgccagctccctgggctgctaccaaacacggccctaactcctccaacccccttggtgggcctgtgttcactgtggcaggagctgactccagactatagcatggagagccaccagcgggaccacgagaactacgtggcgtgctcacgcagccaccggcgccgagccaaggccctgctggactttgagcggcacgacgacgacgagctgggcttccgcaagaacgacatcatcacaatcgtgtctcagaaggacgagcactgctgggtgggggagctcaacggcctgcgaggctggtttccagccaagttcgtggaagtcctggatgagcgcagcaaagagtactccatcgcgggggatgactcggtgacggagggggtcacagacctcgtgcgagggaccctctgcccggcccttaaggccctgttcgaacatggactgaagaagccatccctgcttgggggcgcctgccacccctggctgtttatcgaggaggctgcaggccgggaggtcgagagagactttgcctccgtgtattcccgtctggtgctctgtaagaccttcaggttggatgaagatggcaaagtcctgaccccggaggagctgctctaccgggctgtgcagtctgtgaacgtgacccacgatgcagtgcatgcacaaatggatgtgaagctccgctcactgatctgcgtggggctcaatgagcaggtgctgcacctgtggctggaggtgctctgctccagcctgcccaccgtggagaagtggtaccagccctggtccttcctgcgcagcccgggctgggtccagatcaagtgtgagctccgagtcctctgctgctttgccttcagcctctcccaggactgggagctccctgcgaagagagaggcgcagcagcccctgaaggagggcgtccgggacatgctggtgaagcaccacctcttcagctgggatgtggacgggtgaccccctcctccccagcccaacctcgggcctgcgtctgaggtggcccaggaccccaagctgcagagcccagggaagagcagctccagagccctggccggggccgcgggatatcaatatcaggctgccccactccacgttccccagcacatcccaggtggtgggagcagagggtaccctgccccaccagggtccttagggatgctctaggccaaaccacagtttgtaccaaaaaccttgtgaggaggtgggggagccatgtctgtgctcaggaagagggaaggggatgggggtggctagtaggctcctggcctctttggtttataaataaactgtgtctgtctttgaaaa

SEQ ID NO: 432710 - DNA, 3600 bp, Homo sapiens
  misc_feature (1557)..(1557): n is a, c, g, or t
gcttaggcgccgctgagcgctgactgggtgcgagtggggaagctgctaacccgacccggattggcgctgaggtggcccgtggggcagggcagatgattctggaccagatgaagcctgaggagccttccagctctaagatagcaggataggagacttctaagattggagctgcagaagacttgccagcccaccagcacaatgtcaggaagccatacacctgcctgtggccctttctcagccctgactccgagcatatggccccaggagatcttggccaagtacacgcagaaggaagagtcagcagagcaaccagagttctactacgatgagtttggtttccgtgtgtacaaggaagaaggtgatgagcctggctccagtctgctggcgaactcccctctgatggaggatgctccacagaggctgcggtggcaggcccacctggagttcacccataaccacgatgtgggggatctcacctgggacaagattgccgtctccctaccccgctctgagaagctccgctccctggtgctggccggcatcccacatggcatgaggccacaggtaaggtggccacagggacccacagggtgttgagagggtcctggccccatgatcaggtgtcacgagaaagactgagtgcccttgcggctcccttccctcagctgtggatgcggctctctggggccctgcagaagaagaggaactctgagctgtcctaccgcgagattgtgaagaacagctccaacgatgagaccatcgctgccaagcagatcgagaaggacctgctccgcaccatgcccagcaacgcctgcttcgccagcatgggtagcatcggggtgccccgcctgcgcagggtgctccgggccctggcctggctctacccagagatcggctactgccagggcaccggcatggtggccgcctgcctcctgctgttcctggaggaggaggacgccttctggatgatgtctgccatcatcgaggacctgctccccgcctcctacttcagcaccaccctgctgggtgtccagactgaccagcgggtcctgcgccacctcattgtccagtacctgcctcgcctggacaagctgctccaggagcatgacattgagctgtccctgatcacactgcactggttcctcacggccttcgccagcgtggtggacatcaagctgctcctgcgcatctgggacctgtttttctacgagggctcccgggtgctgttccagctcacgctgggcatgctgcacctcaaggaggaagagctgatccagtcagagaactcggcctccatcttcaacacgctatcggatatcccgtcgcagatggaggacgcggagctgcttctgggggtggccatgcggctggccggctccctcaccgatgtggccgtggagactcagcgccgcaagcacctggcctatctcattgcagaccagggccagctcctgggggccggcaccctcaccaacctctctcaggtggcccaggatggggggccgcaccttgacccacagcacacggggaggaggggtcaccttgaagttcagagcncgggggctgcggaaaacaaaccagcccttcctgctctgccccccagcctggcccagtcagaccacagctgtggggtgatccaggcctcctcaggctttgtgcacctcaggttctgatcctggcacggtttgggaggaaggcagacccagctctgattatctgttttcaattcttggagccagcgtcagaggctatttcagatgagacagtataagccaagggctggtgggttctcttcctcccggggccaggaccaccctgacccactcctcttggtgcaggttgttcgccgcaggacccagcggaggaagtccaccatcactgctctgctcttcggtgagagctctgcgagtgccaggcagtgtgggcatgcgggagtctgtcctcacgctcatgtggacgtggagcttcctcctcgggggcctggagtgggctgtggtcaccatggttctctgggcctcctaggggaggatgacctggaggcactcaaggccaagaacatcaagcagacggaactggtggctgacctccgggaagccatcctgcgcgtggcacgccacttccagtgcacagaccccaaaaactgcagcgtggagctgactccagactatagcatggagagccaccagcgggaccacgagaactacgtggcgtgctcacgcagccaccggcgccgagccaaggccctgctggactttgagcggcacgacgacgacgagctgggcttccgcaagaacgacatcatcacagtgcgtgggggcgctggactaccaggtcctcaggctgtggcgggttccccagactccctccaccaagccccaccccaacccctttccctgccaagagcttctcttgtgaagatgtaggggtcttggcctggcctagttgctgaggagtcatatcgggggtgcaggaggcgctggcccagggcacccagctttggttcctgctgtttttcctcctgtgcagatcgtgtctcagaaggacgagcactgctgggtgggggagctcaacggcctgcgaggctggtttccagccaagttcgtggaagtcctggatgagcgcagcaaagagtactccatcgcgggggatgactcggtgacggagggggtcacagacctcgtgcgagggaccctctgcccggcccttaaggccctgttcgaacatggactgaagaagccatccctgcttgggggcgcctgccacccctggctgtttatcgaggaggctgcaggccgggaggtcgagagagactttgcctccgtgtattcccgtctggtgctctgtaagaccttcaggttggatgaagatggcaaagtcctgaccccggaggagctgctctaccgggctgtgcagtctgtgaacgtgacccacgatgcagtgcatgcacaaatggatgtgaagctccgctcactgatctgcgtggggctcaatgagcaggtgctgcacctgtggctggaggtgctctgctccagcctgcccaccgtggagaagtggtaccagccctggtccttcctgcgcagcccgggctgggtccagatcaagtgtgagctccgagtcctctgctgctttgccttcagcctctcccaggactgggagctccctgcgaagagagaggcgcagcagcccctgaaggagggcgtccgggacatgctggtgaagcaccacctcttcagctgggatgtggacgggtgaccccctcctccccagcccaacctcgggcctgcgtctgaggtggcccaggaccccaagctgcagagcccagggaagagcagctccagagccctggccggggccgcgggatatcaatatcaggctgccccactccacgttccccagcacatcccaggtggtgggagcagagggtaccctgccccaccagggtccttagggatgctctaggccaaaccacagtttgtaccaaaaaccttgtgaggaggtgggggagccatgtctgtgctcaggaagagggaaggggatgggggtggctagtaggctcctggcctctttggtttataaataaactgtgtctgtctttgaaaa

SEQ ID NO: 432711 - DNA, 3687 bp, Homo sapiens
  misc_feature (1557)..(1557): n is a, c, g, or t
gcttaggcgccgctgagcgctgactgggtgcgagtggggaagctgctaacccgacccggattggcgctgaggtggcccgtggggcagggcagatgattctggaccagatgaagcctgaggagccttccagctctaagatagcaggataggagacttctaagattggagctgcagaagacttgccagcccaccagcacaatgtcaggaagccatacacctgcctgtggccctttctcagccctgactccgagcatatggccccaggagatcttggccaagtacacgcagaaggaagagtcagcagagcaaccagagttctactacgatgagtttggtttccgtgtgtacaaggaagaaggtgatgagcctggctccagtctgctggcgaactcccctctgatggaggatgctccacagaggctgcggtggcaggcccacctggagttcacccataaccacgatgtgggggatctcacctgggacaagattgccgtctccctaccccgctctgagaagctccgctccctggtgctggccggcatcccacatggcatgaggccacaggtaaggtggccacagggacccacagggtgttgagagggtcctggccccatgatcaggtgtcacgagaaagactgagtgcccttgcggctcccttccctcagctgtggatgcggctctctggggccctgcagaagaagaggaactctgagctgtcctaccgcgagattgtgaagaacagctccaacgatgagaccatcgctgccaagcagatcgagaaggacctgctccgcaccatgcccagcaacgcctgcttcgccagcatgggtagcatcggggtgccccgcctgcgcagggtgctccgggccctggcctggctctacccagagatcggctactgccagggcaccggcatggtggccgcctgcctcctgctgttcctggaggaggaggacgccttctggatgatgtctgccatcatcgaggacctgctccccgcctcctacttcagcaccaccctgctgggtgtccagactgaccagcgggtcctgcgccacctcattgtccagtacctgcctcgcctggacaagctgctccaggagcatgacattgagctgtccctgatcacactgcactggttcctcacggccttcgccagcgtggtggacatcaagctgctcctgcgcatctgggacctgtttttctacgagggctcccgggtgctgttccagctcacgctgggcatgctgcacctcaaggaggaagagctgatccagtcagagaactcggcctccatcttcaacacgctatcggatatcccgtcgcagatggaggacgcggagctgcttctgggggtggccatgcggctggccggctccctcaccgatgtggccgtggagactcagcgccgcaagcacctggcctatctcattgcagaccagggccagctcctgggggccggcaccctcaccaacctctctcaggtggcccaggatggggggccgcaccttgacccacagcacacggggaggaggggtcaccttgaagttcagagcncgggggctgcggaaaacaaaccagcccttcctgctctgccccccagcctggcccagtcagaccacagctgtggggtgatccaggcctcctcaggctttgtgcacctcaggttctgatcctggcacggtttgggaggaaggcagacccagctctgattatctgttttcaattcttggagccagcgtcagaggctatttcagatgagacagtataagccaagggctggtgggttctcttcctcccggggccaggaccaccctgacccactcctcttggtgcaggttgttcgccgcaggacccagcggaggaagtccaccatcactgctctgctcttcggtgagagctctgcgagtgccaggcagtgtgggcatgcgggagtctgtcctcacgctcatgtggacgtggagcttcctcctcgggggcctggagtgggctgtggtcaccatggttctctgggcctcctaggggaggatgacctggaggcactcaaggccaagaacatcaagcagacggaactggtggctgacctccgggaagccatcctgcgcgtggcacgccacttccagtgcacagaccccaaaaactgcagcgtggtggtgagtcgccagctccctgggctgctaccaaacacggccctaactcctccaacccccttggtgggcctgtgttcactgtggcaggagctgactccagactatagcatggagagccaccagcgggaccacgagaactacgtggcgtgctcacgcagccaccggcgccgagccaaggccctgctggactttgagcggcacgacgacgacgagctgggcttccgcaagaacgacatcatcacagtgcgtgggggcgctggactaccaggtcctcaggctgtggcgggttccccagactccctccaccaagccccaccccaacccctttccctgccaagagcttctcttgtgaagatgtaggggtcttggcctggcctagttgctgaggagtcatatcgggggtgcaggaggcgctggcccagggcacccagctttggttcctgctgtttttcctcctgtgcagatcgtgtctcagaaggacgagcactgctgggtgggggagctcaacggcctgcgaggctggtttccagccaagttcgtggaagtcctggatgagcgcagcaaagagtactccatcgcgggggatgactcggtgacggagggggtcacagacctcgtgcgagggaccctctgcccggcccttaaggccctgttcgaacatggactgaagaagccatccctgcttgggggcgcctgccacccctggctgtttatcgaggaggctgcaggccgggaggtcgagagagactttgcctccgtgtattcccgtctggtgctctgtaagaccttcaggttggatgaagatggcaaagtcctgaccccggaggagctgctctaccgggctgtgcagtctgtgaacgtgacccacgatgcagtgcatgcacaaatggatgtgaagctccgctcactgatctgcgtggggctcaatgagcaggtgctgcacctgtggctggaggtgctctgctccagcctgcccaccgtggagaagtggtaccagccctggtccttcctgcgcagcccgggctgggtccagatcaagtgtgagctccgagtcctctgctgctttgccttcagcctctcccaggactgggagctccctgcgaagagagaggcgcagcagcccctgaaggagggcgtccgggacatgctggtgaagcaccacctcttcagctgggatgtggacgggtgaccccctcctccccagcccaacctcgggcctgcgtctgaggtggcccaggaccccaagctgcagagcccagggaagagcagctccagagccctggccggggccgcgggatatcaatatcaggctgccccactccacgttccccagcacatcccaggtggtgggagcagagggtaccctgccccaccagggtccttagggatgctctaggccaaaccacagtttgtaccaaaaaccttgtgaggaggtgggggagccatgtctgtgctcaggaagagggaaggggatgggggtggctagtaggctcctggcctctttggtttataaataaactgtgtctgtctttgaaaa

SEQ ID NO: 432712 - DNA, 3512 bp, Homo sapiens
  misc_feature (1557)..(1557): n is a, c, g, or t
gcttaggcgccgctgagcgctgactgggtgcgagtggggaagctgctaacccgacccggattggcgctgaggtggcccgtggggcagggcagatgattctggaccagatgaagcctgaggagccttccagctctaagatagcaggataggagacttctaagattggagctgcagaagacttgccagcccaccagcacaatgtcaggaagccatacacctgcctgtggccctttctcagccctgactccgagcatatggccccaggagatcttggccaagtacacgcagaaggaagagtcagcagagcaaccagagttctactacgatgagtttggtttccgtgtgtacaaggaagaaggtgatgagcctggctccagtctgctggcgaactcccctctgatggaggatgctccacagaggctgcggtggcaggcccacctggagttcacccataaccacgatgtgggggatctcacctgggacaagattgccgtctccctaccccgctctgagaagctccgctccctggtgctggccggcatcccacatggcatgaggccacaggtaaggtggccacagggacccacagggtgttgagagggtcctggccccatgatcaggtgtcacgagaaagactgagtgcccttgcggctcccttccctcagctgtggatgcggctctctggggccctgcagaagaagaggaactctgagctgtcctaccgcgagattgtgaagaacagctccaacgatgagaccatcgctgccaagcagatcgagaaggacctgctccgcaccatgcccagcaacgcctgcttcgccagcatgggtagcatcggggtgccccgcctgcgcagggtgctccgggccctggcctggctctacccagagatcggctactgccagggcaccggcatggtggccgcctgcctcctgctgttcctggaggaggaggacgccttctggatgatgtctgccatcatcgaggacctgctccccgcctcctacttcagcaccaccctgctgggtgtccagactgaccagcgggtcctgcgccacctcattgtccagtacctgcctcgcctggacaagctgctccaggagcatgacattgagctgtccctgatcacactgcactggttcctcacggccttcgccagcgtggtggacatcaagctgctcctgcgcatctgggacctgtttttctacgagggctcccgggtgctgttccagctcacgctgggcatgctgcacctcaaggaggaagagctgatccagtcagagaactcggcctccatcttcaacacgctatcggatatcccgtcgcagatggaggacgcggagctgcttctgggggtggccatgcggctggccggctccctcaccgatgtggccgtggagactcagcgccgcaagcacctggcctatctcattgcagaccagggccagctcctgggggccggcaccctcaccaacctctctcaggtggcccaggatggggggccgcaccttgacccacagcacacggggaggaggggtcaccttgaagttcagagcncgggggctgcggaaaacaaaccagcccttcctgctctgccccccagcctggcccagtcagaccacagctgtggggtgatccaggcctcctcaggctttgtgcacctcaggttctgatcctggcacggtttgggaggaaggcagacccagctctgattatctgttttcaattcttggagccagcgtcagaggctatttcagatgagacagtataagccaagggctggtgggttctcttcctcccggggccaggaccaccctgacccactcctcttggtgcaggttgttcgccgcaggacccagcggaggaagtccaccatcactgctctgctcttcggtgagagctctgcgagtgccaggcagtgtgggcatgcgggagtctgtcctcacgctcatgtggacgtggagcttcctcctcgggggcctggagtgggctgtggtcaccatggttctctgggcctcctaggggaggatgacctggaggcactcaaggccaagaacatcaagcagacggaactggtggctgacctccgggaagccatcctgcgcgtggcacgccacttccagtgcacagaccccaaaaactgcagcgtggtggtgagtcgccagctccctgggctgctaccaaacacggccctaactcctccaacccccttggtgggcctgtgttcactgtggcaggagctgactccagactatagcatggagagccaccagcgggaccacgagaactacgtggcgtgctcacgcagccaccggcgccgagccaaggccctgctggactttgagcggcacgacgacgacgagctgggcttccgcaagaacgacatcatcacagtgcgtgggggcgctggactaccagatcgtgtctcagaaggacgagcactgctgggtgggggagctcaacggcctgcgaggctggtttccagccaagttcgtggaagtcctggatgagcgcagcaaagagtactccatcgcgggggatgactcggtgacggagggggtcacagacctcgtgcgagggaccctctgcccggcccttaaggccctgttcgaacatggactgaagaagccatccctgcttgggggcgcctgccacccctggctgtttatcgaggaggctgcaggccgggaggtcgagagagactttgcctccgtgtattcccgtctggtgctctgtaagaccttcaggagctttggtgtcccctcaggttggatgaagatggcaaagtcctgaccccggaggagctgctctaccgggctgtgcagtctgtgaacgtgacccacgatgcagtgcatgcacaaatggatgtgaagctccgctcactgatctgcgtggggctcaatgagcaggtgctgcacctgtggctggaggtgctctgctccagcctgcccaccgtggagaagtggtaccagccctggtccttcctgcgcagcccgggctgggtccagatcaagtgtgagctccgagtcctctgctgctttgccttcagcctctcccaggactgggagctccctgcgaagagagaggcgcagcagcccctgaaggagggcgtccgggacatgctggtgaagcaccacctcttcagctgggatgtggacgggtgaccccctcctccccagcccaacctcgggcctgcgtctgaggtggcccaggaccccaagctgcagagcccagggaagagcagctccagagccctggccggggccgcgggatatcaatatcaggctgccccactccacgttccccagcacatcccaggtggtgggagcagagggtaccctgccccaccagggtccttagggatgctctaggccaaaccacagtttgtaccaaaaaccttgtgaggaggtgggggagccatgtctgtgctcaggaagagggaaggggatgggggtggctagtaggctcctggcctctttggtttataaataaactgtgtctgtctttgaaaa

SEQ ID NO: 432713 - DNA, 3612 bp, Homo sapiens
  misc_feature (1557)..(1557): n is a, c, g, or t
gcttaggcgccgctgagcgctgactgggtgcgagtggggaagctgctaacccgacccggattggcgctgaggtggcccgtggggcagggcagatgattctggaccagatgaagcctgaggagccttccagctctaagatagcaggataggagacttctaagattggagctgcagaagacttgccagcccaccagcacaatgtcaggaagccatacacctgcctgtggccctttctcagccctgactccgagcatatggccccaggagatcttggccaagtacacgcagaaggaagagtcagcagagcaaccagagttctactacgatgagtttggtttccgtgtgtacaaggaagaaggtgatgagcctggctccagtctgctggcgaactcccctctgatggaggatgctccacagaggctgcggtggcaggcccacctggagttcacccataaccacgatgtgggggatctcacctgggacaagattgccgtctccctaccccgctctgagaagctccgctccctggtgctggccggcatcccacatggcatgaggccacaggtaaggtggccacagggacccacagggtgttgagagggtcctggccccatgatcaggtgtcacgagaaagactgagtgcccttgcggctcccttccctcagctgtggatgcggctctctggggccctgcagaagaagaggaactctgagctgtcctaccgcgagattgtgaagaacagctccaacgatgagaccatcgctgccaagcagatcgagaaggacctgctccgcaccatgcccagcaacgcctgcttcgccagcatgggtagcatcggggtgccccgcctgcgcagggtgctccgggccctggcctggctctacccagagatcggctactgccagggcaccggcatggtggccgcctgcctcctgctgttcctggaggaggaggacgccttctggatgatgtctgccatcatcgaggacctgctccccgcctcctacttcagcaccaccctgctgggtgtccagactgaccagcgggtcctgcgccacctcattgtccagtacctgcctcgcctggacaagctgctccaggagcatgacattgagctgtccctgatcacactgcactggttcctcacggccttcgccagcgtggtggacatcaagctgctcctgcgcatctgggacctgtttttctacgagggctcccgggtgctgttccagctcacgctgggcatgctgcacctcaaggaggaagagctgatccagtcagagaactcggcctccatcttcaacacgctatcggatatcccgtcgcagatggaggacgcggagctgcttctgggggtggccatgcggctggccggctccctcaccgatgtggccgtggagactcagcgccgcaagcacctggcctatctcattgcagaccagggccagctcctgggggccggcaccctcaccaacctctctcaggtggcccaggatggggggccgcaccttgacccacagcacacggggaggaggggtcaccttgaagttcagagcncgggggctgcggaaaacaaaccagcccttcctgctctgccccccagcctggcccagtcagaccacagctgtggggtgatccaggcctcctcaggctttgtgcacctcaggttctgatcctggcacggtttgggaggaaggcagacccagctctgattatctgttttcaattcttggagccagcgtcagaggctatttcagatgagacagtataagccaagggctggtgggttctcttcctcccggggccaggaccaccctgacccactcctcttggtgcaggttgttcgccgcaggacccagcggaggaagtccaccatcactgctctgctcttcggtgagagctctgcgagtgccaggcagtgtgggcatgcgggagtctgtcctcacgctcatgtggacgtggagcttcctcctcgggggcctggagtgggctgtggtcaccatggttctctgggcctcctaggggaggatgacctggaggcactcaaggccaagaacatcaagcagacggaactggtggctgacctccgggaagccatcctgcgcgtggcacgccacttccagtgcacagaccccaaaaactgcagcgtggagctgactccagactatagcatggagagccaccagcgggaccacgagaactacgtggcgtgctcacgcagccaccggcgccgagccaaggccctgctggactttgagcggcacgacgacgacgagctgggcttccgcaagaacgacatcatcacaatcgtgtctcagaaggacgagcactgctgggtgggggagctcaacggcctgcgaggctggtttccagccaagttcgtggaagtcctggatgagcgcagcaaagagtactccatcgcgggggatgactcggtgacggagggggtcacagacctcgtgcgagggaccctctgcccggcccttaaggccctgttcgaacatggactgaagaagccatccctgcttgggggcgcctgccacccctggctgtttatcgaggaggctgcaggccgggaggtcgagagagactttgcctccgtgtattcccgtctggtgctctgtaagaccttcaggttggatgaagatggcaaagtcctgaccccggaggagctgctctaccgggctgtgcagtctgtgaacgtgacccacgatgcagtgcatgcacaaatggatgtgaagctccgctcactgatctgcgtggggctcaagtgagtgtggaaaaggggttggaggagagccctggagtggggggacccagcccagcatcagggggggtccttacagggaaccctaaaggacaaagaacctcaggggctcaggtccttccccaaagagggtggtctgggagctgctgagagacaggtcagaggcttccaccgtggctgcagccagaagggcctggagctgcccctgctccccactcctggccatgtccccagttgagcaggtgctgcacctgtggctggaggtgctctgctccagcctgcccaccgtggagaagtggtaccagccctggtccttcctgcgcagcccgggctgggtccagatcaagtgtgagctccgagtcctctgctgctttgccttcagcctctcccaggactgggagctccctgcgaagagagaggcgcagcagcccctgaaggagggcgtccgggacatgctggtgaagcaccacctcttcagctgggatgtggacgggtgaccccctcctccccagcccaacctcgggcctgcgtctgaggtggcccaggaccccaagctgcagagcccagggaagagcagctccagagccctggccggggccgcgggatatcaatatcaggctgccccactccacgttccccagcacatcccaggtggtgggagcagagggtaccctgccccaccagggtccttagggatgctctaggccaaaccacagtttgtaccaaaaaccttgtgaggaggtgggggagccatgtctgtgctcaggaagagggaaggggatgggggtggctagtaggctcctggcctctttggtttataaataaactgtgtctgtctttgaaaa

SEQ ID NO: 432714 - DNA, 3537 bp, Homo sapiens
  misc_feature (1557)..(1557): n is a, c, g, or t
gcttaggcgccgctgagcgctgactgggtgcgagtggggaagctgctaacccgacccggattggcgctgaggtggcccgtggggcagggcagatgattctggaccagatgaagcctgaggagccttccagctctaagatagcaggataggagacttctaagattggagctgcagaagacttgccagcccaccagcacaatgtcaggaagccatacacctgcctgtggccctttctcagccctgactccgagcatatggccccaggagatcttggccaagtacacgcagaaggaagagtcagcagagcaaccagagttctactacgatgagtttggtttccgtgtgtacaaggaagaaggtgatgagcctggctccagtctgctggcgaactcccctctgatggaggatgctccacagaggctgcggtggcaggcccacctggagttcacccataaccacgatgtgggggatctcacctgggacaagattgccgtctccctaccccgctctgagaagctccgctccctggtgctggccggcatcccacatggcatgaggccacaggtaaggtggccacagggacccacagggtgttgagagggtcctggccccatgatcaggtgtcacgagaaagactgagtgcccttgcggctcccttccctcagctgtggatgcggctctctggggccctgcagaagaagaggaactctgagctgtcctaccgcgagattgtgaagaacagctccaacgatgagaccatcgctgccaagcagatcgagaaggacctgctccgcaccatgcccagcaacgcctgcttcgccagcatgggtagcatcggggtgccccgcctgcgcagggtgctccgggccctggcctggctctacccagagatcggctactgccagggcaccggcatggtggccgcctgcctcctgctgttcctggaggaggaggacgccttctggatgatgtctgccatcatcgaggacctgctccccgcctcctacttcagcaccaccctgctgggtgtccagactgaccagcgggtcctgcgccacctcattgtccagtacctgcctcgcctggacaagctgctccaggagcatgacattgagctgtccctgatcacactgcactggttcctcacggccttcgccagcgtggtggacatcaagctgctcctgcgcatctgggacctgtttttctacgagggctcccgggtgctgttccagctcacgctgggcatgctgcacctcaaggaggaagagctgatccagtcagagaactcggcctccatcttcaacacgctatcggatatcccgtcgcagatggaggacgcggagctgcttctgggggtggccatgcggctggccggctccctcaccgatgtggccgtggagactcagcgccgcaagcacctggcctatctcattgcagaccagggccagctcctgggggccggcaccctcaccaacctctctcaggtggcccaggatggggggccgcaccttgacccacagcacacggggaggaggggtcaccttgaagttcagagcncgggggctgcggaaaacaaaccagcccttcctgctctgccccccagcctggcccagtcagaccacagctgtggggtgatccaggcctcctcaggctttgtgcacctcaggttctgatcctggcacggtttgggaggaaggcagacccagctctgattatctgttttcaattcttggagccagcgtcagaggctatttcagatgagacagtataagccaagggctggtgggttctcttcctcccggggccaggaccaccctgacccactcctcttggtgcaggttgttcgccgcaggacccagcggaggaagtccaccatcactgctctgctcttcggtgagagctctgcgagtgccaggcagtgtgggcatgcgggagtctgtcctcacgctcatgtggacgtggagcttcctcctcgggggcctggagtgggctgtggtcaccatggttctctgggcctcctaggggaggatgacctggaggcactcaaggccaagaacatcaagcagacggaactggtggctgacctccgggaagccatcctgcgcgtggcacgccacttccagtgcacagaccccaaaaactgcagcgtggagctgactccagactatagcatggagagccaccagcgggaccacgagaactacgtggcgtgctcacgcagccaccggcgccgagccaaggccctgctggactttgagcggcacgacgacgacgagctgggcttccgcaagaacgacatcatcacaatcgtgtctcagaaggacgagcactgctgggtgggggagctcaacggcctgcgaggctggtttccagccaagttcgtggaagtcctggatgagcgcagcaaagagtactccatcgcgggggatgactcggtgacggagggggtcacagacctcgtgcgagggaccctctgcccggcccttaaggccctgttcgaacatggactgaagaagccatccctgcttgggggcgcctgccacccctggctgtttatcgaggaggctgcaggccgggaggtcgagagagactttgcctccgtgtattcccgtctggtgctctgtaagaccttcaggttggatgaagatggcaaagtcctgaccccggaggagctgctctaccgggctgtgcagtctgtgaacgtgacccacgatgcagtgcatgcacaaatggatgtgaagctccgctcactgatctgcgtggggctcaatgagcaggtgctgcacctgtggctggaggtgctctgctccagcctgcccaccgtggagaagtggtaccagccctggtccttcctgcgcagcccgggctgggtccagatcaagtgtgagctccgagtcctctgctgctttgccttcagcctctcccaggactgggagctccctgcgaagagagagggtgggtggtgtgggcctcgtagggcctgcactgatggagctgcccaaaccgttcgcggggtggctaaggtgggaacccgaagtgctggtgtcagcggttaggaactaccccagccatgcccaaggcctgtgaggtgaggggctgccctgtttgcaggcgcagcagcccctgaaggagggcgtccgggacatgctggtgaagcaccacctcttcagctgggatgtggacgggtgaccccctcctccccagcccaacctcgggcctgcgtctgaggtggcccaggaccccaagctgcagagcccagggaagagcagctccagagccctggccggggccgcgggatatcaatatcaggctgccccactccacgttccccagcacatcccaggtggtgggagcagagggtaccctgccccaccagggtccttagggatgctctaggccaaaccacagtttgtaccaaaaaccttgtgaggaggtgggggagccatgtctgtgctcaggaagagggaaggggatgggggtggctagtaggctcctggcctctttggtttataaataaactgtgtctgtctttgaaaa

SEQ ID NO: 432715 - DNA, 3310 bp, Homo sapiens
  misc_feature (1557)..(1557): n is a, c, g, or t
gcttaggcgccgctgagcgctgactgggtgcgagtggggaagctgctaacccgacccggattggcgctgaggtggcccgtggggcagggcagatgattctggaccagatgaagcctgaggagccttccagctctaagatagcaggataggagacttctaagattggagctgcagaagacttgccagcccaccagcacaatgtcaggaagccatacacctgcctgtggccctttctcagccctgactccgagcatatggccccaggagatcttggccaagtacacgcagaaggaagagtcagcagagcaaccagagttctactacgatgagtttggtttccgtgtgtacaaggaagaaggtgatgagcctggctccagtctgctggcgaactcccctctgatggaggatgctccacagaggctgcggtggcaggcccacctggagttcacccataaccacgatgtgggggatctcacctgggacaagattgccgtctccctaccccgctctgagaagctccgctccctggtgctggccggcatcccacatggcatgaggccacaggtaaggtggccacagggacccacagggtgttgagagggtcctggccccatgatcaggtgtcacgagaaagactgagtgcccttgcggctcccttccctcagctgtggatgcggctctctggggccctgcagaagaagaggaactctgagctgtcctaccgcgagattgtgaagaacagctccaacgatgagaccatcgctgccaagcagatcgagaaggacctgctccgcaccatgcccagcaacgcctgcttcgccagcatgggtagcatcggggtgccccgcctgcgcagggtgctccgggccctggcctggctctacccagagatcggctactgccagggcaccggcatggtggccgcctgcctcctgctgttcctggaggaggaggacgccttctggatgatgtctgccatcatcgaggacctgctccccgcctcctacttcagcaccaccctgctgggtgtccagactgaccagcgggtcctgcgccacctcattgtccagtacctgcctcgcctggacaagctgctccaggagcatgacattgagctgtccctgatcacactgcactggttcctcacggccttcgccagcgtggtggacatcaagctgctcctgcgcatctgggacctgtttttctacgagggctcccgggtgctgttccagctcacgctgggcatgctgcacctcaaggaggaagagctgatccagtcagagaactcggcctccatcttcaacacgctatcggatatcccgtcgcagatggaggacgcggagctgcttctgggggtggccatgcggctggccggctccctcaccgatgtggccgtggagactcagcgccgcaagcacctggcctatctcattgcagaccagggccagctcctgggggccggcaccctcaccaacctctctcaggtggcccaggatggggggccgcaccttgacccacagcacacggggaggaggggtcaccttgaagttcagagcncgggggctgcggaaaacaaaccagcccttcctgctctgccccccagcctggcccagtcagaccacagctgtggggtgatccaggcctcctcaggctttgtgcacctcaggttctgatcctggcacggtttgggaggaaggcagacccagctctgattatctgttttcaattcttggagccagcgtcagaggctatttcagatgagacagtataagccaagggctggtgggttctcttcctcccggggccaggaccaccctgacccactcctcttggtgcaggttgttcgccgcaggacccagcggaggaagtccaccatcactgctctgctcttcggtgagagctctgcgagtgccaggcagtgtgggcatgcgggagtctgtcctcacgctcatgtggacgtggagcttcctcctcgggggcctggagtgggctgtggtcaccatggttctctgggcctcctaggggaggatgacctggaggcactcaaggccaagaacatcaagcagacggaactggtggctgacctccgggaagccatcctgcgcgtggcacgccacttccagtgcacagaccccaaaaactgcagcgtggagctgactccagactatagcatggagagccaccagcgggaccacgagaactacgtggcgtgctcacgcagccaccggcgccgagccaaggccctgctggactttgagcggcacgacgacgacgagctgggcttccgcaagaacgacatcatcacaatcgtgtctcagaaggacgagcactgctgggtgggggagctcaacggcctgcgaggctggtttccagccaagttcgtggaagtcctggatgagcgcagcaaagagtactccatcgcgggggatgactcggtgacggagggggtcacagacctcgtgcgagggaccctctgcccggcccttaaggccctgttcgaacatggactgaagaagccatccctgcttgggggcgcctgccacccctggctgtttatcgaggaggctgcaggccgggaggtcgagagagactttgcctccgtgtattcccgtctggtgctctgtaagaccttcaggagctttggtgtcccctcaggttggatgaagatggcaaagtcctgaccccggaggagctgctctaccgggctgtgcagtctgtgaacgtgacccacgatgcagtgcatgcacaaatggatgtgaagctccgctcactgatctgcgtggggctcaacccgggctgggtccagatcaagtgtgagctccgagtcctctgctgctttgccttcagcctctcccaggactgggagctccctgcgaagagagaggcgcagcagcccctgaaggagggcgtccgggacatgctggtgaagcaccacctcttcagctgggatgtggacgggtgaccccctcctccccagcccaacctcgggcctgcgtctgaggtggcccaggaccccaagctgcagagcccagggaagagcagctccagagccctggccggggccgcgggatatcaatatcaggctgccccactccacgttccccagcacatcccaggtggtgggagcagagggtaccctgccccaccagggtccttagggatgctctaggccaaaccacagtttgtaccaaaaaccttgtgaggaggtgggggagccatgtctgtgctcaggaagagggaaggggatgggggtggctagtaggctcctggcctctttggtttataaataaactgtgtctgtctttgaaaa

SEQ ID NO: 432716 - DNA, 3536 bp, Homo sapiens
  misc_feature (1557)..(1557): n is a, c, g, or t
  misc_feature (3403)..(3403): n is a, c, g, or t
gcttaggcgccgctgagcgctgactgggtgcgagtggggaagctgctaacccgacccggattggcgctgaggtggcccgtggggcagggcagatgattctggaccagatgaagcctgaggagccttccagctctaagatagcaggataggagacttctaagattggagctgcagaagacttgccagcccaccagcacaatgtcaggaagccatacacctgcctgtggccctttctcagccctgactccgagcatatggccccaggagatcttggccaagtacacgcagaaggaagagtcagcagagcaaccagagttctactacgatgagtttggtttccgtgtgtacaaggaagaaggtgatgagcctggctccagtctgctggcgaactcccctctgatggaggatgctccacagaggctgcggtggcaggcccacctggagttcacccataaccacgatgtgggggatctcacctgggacaagattgccgtctccctaccccgctctgagaagctccgctccctggtgctggccggcatcccacatggcatgaggccacaggtaaggtggccacagggacccacagggtgttgagagggtcctggccccatgatcaggtgtcacgagaaagactgagtgcccttgcggctcccttccctcagctgtggatgcggctctctggggccctgcagaagaagaggaactctgagctgtcctaccgcgagattgtgaagaacagctccaacgatgagaccatcgctgccaagcagatcgagaaggacctgctccgcaccatgcccagcaacgcctgcttcgccagcatgggtagcatcggggtgccccgcctgcgcagggtgctccgggccctggcctggctctacccagagatcggctactgccagggcaccggcatggtggccgcctgcctcctgctgttcctggaggaggaggacgccttctggatgatgtctgccatcatcgaggacctgctccccgcctcctacttcagcaccaccctgctgggtgtccagactgaccagcgggtcctgcgccacctcattgtccagtacctgcctcgcctggacaagctgctccaggagcatgacattgagctgtccctgatcacactgcactggttcctcacggccttcgccagcgtggtggacatcaagctgctcctgcgcatctgggacctgtttttctacgagggctcccgggtgctgttccagctcacgctgggcatgctgcacctcaaggaggaagagctgatccagtcagagaactcggcctccatcttcaacacgctatcggatatcccgtcgcagatggaggacgcggagctgcttctgggggtggccatgcggctggccggctccctcaccgatgtggccgtggagactcagcgccgcaagcacctggcctatctcattgcagaccagggccagctcctgggggccggcaccctcaccaacctctctcaggtggcccaggatggggggccgcaccttgacccacagcacacggggaggaggggtcaccttgaagttcagagcncgggggctgcggaaaacaaaccagcccttcctgctctgccccccagcctggcccagtcagaccacagctgtggggtgatccaggcctcctcaggctttgtgcacctcaggttctgatcctggcacggtttgggaggaaggcagacccagctctgattatctgttttcaattcttggagccagcgtcagaggctatttcagatgagacagtataagccaagggctggtgggttctcttcctcccggggccaggaccaccctgacccactcctcttggtgcaggttgttcgccgcaggacccagcggaggaagtccaccatcactgctctgctcttcggtgagagctctgcgagtgccaggcagtgtgggcatgcgggagtctgtcctcacgctcatgtggacgtggagcttcctcctcgggggcctggagtgggctgtggtcaccatggttctctgggcctcctaggggaggatgacctggaggcactcaaggccaagaacatcaagcagacggaactggtggctgacctccgggaagccatcctgcgcgtggcacgccacttccagtgcacagaccccaaaaactgcagcgtggagctgactccagactatagcatggagagccaccagcgggaccacgagaactacgtggcgtgctcacgcagccaccggcgccgagccaaggccctgctggactttgagcggcacgacgacgacgagctgggcttccgcaagaacgacatcatcacaatcgtgtctcagaaggacgagcactgctgggtgggggagctcaacggcctgcgaggctggtttccagccaagttcgtggaagtcctggatgagcgcagcaaagagtactccatcgcgggggatgactcggtgacggagggggtcacagacctcgtgcgagggaccctctgcccggcccttaaggccctgttcgaacatggactgaagaagccatccctgcttgggggcgcctgccacccctggctgtttatcgaggaggctgcaggccgggaggtcgagagagactttgcctccgtgtattcccgtctggtgctctgtaagaccttcaggttggatgaagatggcaaagtcctgaccccggaggagctgctctaccgggctgtgcagtctgtgaacgtgacccacgatgcagtgcatgcacaaatggatgtgaagctccgctcactgatctgcgtggggctcaatgagcaggtgctgcacctgtggctggaggtgctctgctccagcctgcccaccgtggagaagtggtaccagccctggtccttcctgcgcagcccgggctgggtccagatcaagtgtgagctccgagtcctctgctgctttgccttcagcctctcccaggactgggagctccctgcgaagagagaggcgcagcagcccctgaaggagggcgtccgggacatgctggtgaagcaccacctcttcagctgggatgtggacgggtgaccccctcctccccagcccaacctcgggcctgcgtctgaggtggcccaggaccccaagctgcagagcccagggaagagcagctccagagccctggccggggccgcgggatatcaatatcaggctgccccactccacgttccccagcacatcccaggtggtgggagcagagggtaccctgccccaccagggtccttagggatgctctaggccaaaccacagtttgtaccaaaaaccttgtgaggaggtgggggagccatgtctgtgctcaggaagagggaaggggatgggggtggctagtaggctcctggcctctttggtttataaataaactgtgtctgtctttgaaaaaaaaaaaaaaaataaataaattnaaataatttttatttaaaaatcctcgggggggggcccggcacccaattcccctttagtgagtggttttacccgccctcactggccgtcgtttaacaacttttggatgggaaaaccctgggtgtccccaactta

SEQ ID NO: 432717 - DNA, 3752 bp, Homo sapiens
  misc_feature (1557)..(1557): n is a, c, g, or t
  misc_feature (3748)..(3748): n is a, c, g, or t
gcttaggcgccgctgagcgctgactgggtgcgagtggggaagctgctaacccgacccggattggcgctgaggtggcccgtggggcagggcagatgattctggaccagatgaagcctgaggagccttccagctctaagatagcaggataggagacttctaagattggagctgcagaagacttgccagcccaccagcacaatgtcaggaagccatacacctgcctgtggccctttctcagccctgactccgagcatatggccccaggagatcttggccaagtacacgcagaaggaagagtcagcagagcaaccagagttctactacgatgagtttggtttccgtgtgtacaaggaagaaggtgatgagcctggctccagtctgctggcgaactcccctctgatggaggatgctccacagaggctgcggtggcaggcccacctggagttcacccataaccacgatgtgggggatctcacctgggacaagattgccgtctccctaccccgctctgagaagctccgctccctggtgctggccggcatcccacatggcatgaggccacaggtaaggtggccacagggacccacagggtgttgagagggtcctggccccatgatcaggtgtcacgagaaagactgagtgcccttgcggctcccttccctcagctgtggatgcggctctctggggccctgcagaagaagaggaactctgagctgtcctaccgcgagattgtgaagaacagctccaacgatgagaccatcgctgccaagcagatcgagaaggacctgctccgcaccatgcccagcaacgcctgcttcgccagcatgggtagcatcggggtgccccgcctgcgcagggtgctccgggccctggcctggctctacccagagatcggctactgccagggcaccggcatggtggccgcctgcctcctgctgttcctggaggaggaggacgccttctggatgatgtctgccatcatcgaggacctgctccccgcctcctacttcagcaccaccctgctgggtgtccagactgaccagcgggtcctgcgccacctcattgtccagtacctgcctcgcctggacaagctgctccaggagcatgacattgagctgtccctgatcacactgcactggttcctcacggccttcgccagcgtggtggacatcaagctgctcctgcgcatctgggacctgtttttctacgagggctcccgggtgctgttccagctcacgctgggcatgctgcacctcaaggaggaagagctgatccagtcagagaactcggcctccatcttcaacacgctatcggatatcccgtcgcagatggaggacgcggagctgcttctgggggtggccatgcggctggccggctccctcaccgatgtggccgtggagactcagcgccgcaagcacctggcctatctcattgcagaccagggccagctcctgggggccggcaccctcaccaacctctctcaggtggcccaggatggggggccgcaccttgacccacagcacacggggaggaggggtcaccttgaagttcagagcncgggggctgcggaaaacaaaccagcccttcctgctctgccccccagcctggcccagtcagaccacagctgtggggtgatccaggcctcctcaggctttgtgcacctcaggttctgatcctggcacggtttgggaggaaggcagacccagctctgattatctgttttcaattcttggagccagcgtcagaggctatttcagatgagacagtataagccaagggctggtgggttctcttcctcccggggccaggaccaccctgacccactcctcttggtgcaggttgttcgccgcaggacccagcggaggaagtccaccatcactgctctgctcttcggtgagagctctgcgagtgccaggcagtgtgggcatgcgggagtctgtcctcacgctcatgtggacgtggagcttcctcctcgggggcctggagtgggctgtggtcaccatggttctctgggcctcctaggggaggatgacctggaggcactcaaggccaagaacatcaagcagacggaactggtggctgacctccgggaagccatcctgcgcgtggcacgccacttccagtgcacagaccccaaaaactgcagcgtggagctgactccagactatagcatggagagccaccagcgggaccacgagaactacgtggcgtgctcacgcagccaccggcgccgagccaaggccctgctggactttgagcggcacgacgacgacgagctgggcttccgcaagaacgacatcatcacaatcgtgtctcagaaggacgagcactgctgggtgggggagctcaacggcctgcgaggctggtttccagccaagttcgtggaagtcctggatgagcgcagcaaagagtactccatcgcgggggatgactcggtgacggagggggtcacagacctcgtgcgagggaccctctgcccggcccttaaggccctgttcgaacatggactgaagaagccatccctgcttgggggcgcctgccacccctggctgtttatcgaggaggctgcaggccgggaggtcgagagagactttgcctccgtgtattcccgtctggtgctctgtaagaccttcaggttggatgaagatggcaaagtcctgaccccggaggagctgctctaccgggctgtgcagtctgtgaacgtgacccacgatgcagtgcatgcacaaatggatgtgaagctccgctcactgatctgcgtggggctcaatgagcaggtgctgcacctgtggctggaggtgctctgctccagcctgcccaccgtggagaagtggtaccagccctggtccttcctgcgcagcccgggctgggtccagatcaagtgtgagctccgagtcctctgctgctttgccttcagcctctcccaggactgggagctccctgcgaagagagagggtgggtggtgtgggcctcgtagggcctgcactgatggagctgcccaaaccgttcgcggggtggctaaggtgggaacccgaagtgctggtgtcagcggttaggaactaccccagccatgcccaaggcctgtgaggtgaggggctgccctgtttgcaggcgcagcagcccctgaaggagggcgtccgggacatgctggtgaagcaccacctcttcagctgggatgtggacgggtgaccccctcctccccagcccaacctcgggcctgcgtctgaggtggcccaggaccccaagctgcagagcccagggaagagcagctccagagccctggccggggccgcgggatatcaatatcaggctgccccactccacgttccccagcacatcccaggtggtgggagcagagggtaccctgccccaccagggtccttagggatgctctaggccaaaccacagtttgtaccaaaaaccttgtgaggaggtgggggagccatgtctgtgctcaggaagagggaaggggatgggggtggctagtaggctcctggcctctttggtttataaataaactgtgtctgtctttgaaaattgagaaagcacctacctgtcttctgtgcagctagggctgcagagctgtattcaggtccaaggttctgcccttccttgagtggtctagaaggcactgcgtggcccctcagatgctgggacacaacagacccgggacccagctgtgctacccaccccttccatggactgaataagatggactaacagaaaaaaaaaaaacaaaaaacaaaanaaaa

SEQ ID NO: 432718 - DNA, 3626 bp, Homo sapiens
  misc_feature (1557)..(1557): n is a, c, g, or t
  misc_feature (3622)..(3622): n is a, c, g, or t
gcttaggcgccgctgagcgctgactgggtgcgagtggggaagctgctaacccgacccggattggcgctgaggtggcccgtggggcagggcagatgattctggaccagatgaagcctgaggagccttccagctctaagatagcaggataggagacttctaagattggagctgcagaagacttgccagcccaccagcacaatgtcaggaagccatacacctgcctgtggccctttctcagccctgactccgagcatatggccccaggagatcttggccaagtacacgcagaaggaagagtcagcagagcaaccagagttctactacgatgagtttggtttccgtgtgtacaaggaagaaggtgatgagcctggctccagtctgctggcgaactcccctctgatggaggatgctccacagaggctgcggtggcaggcccacctggagttcacccataaccacgatgtgggggatctcacctgggacaagattgccgtctccctaccccgctctgagaagctccgctccctggtgctggccggcatcccacatggcatgaggccacaggtaaggtggccacagggacccacagggtgttgagagggtcctggccccatgatcaggtgtcacgagaaagactgagtgcccttgcggctcccttccctcagctgtggatgcggctctctggggccctgcagaagaagaggaactctgagctgtcctaccgcgagattgtgaagaacagctccaacgatgagaccatcgctgccaagcagatcgagaaggacctgctccgcaccatgcccagcaacgcctgcttcgccagcatgggtagcatcggggtgccccgcctgcgcagggtgctccgggccctggcctggctctacccagagatcggctactgccagggcaccggcatggtggccgcctgcctcctgctgttcctggaggaggaggacgccttctggatgatgtctgccatcatcgaggacctgctccccgcctcctacttcagcaccaccctgctgggtgtccagactgaccagcgggtcctgcgccacctcattgtccagtacctgcctcgcctggacaagctgctccaggagcatgacattgagctgtccctgatcacactgcactggttcctcacggccttcgccagcgtggtggacatcaagctgctcctgcgcatctgggacctgtttttctacgagggctcccgggtgctgttccagctcacgctgggcatgctgcacctcaaggaggaagagctgatccagtcagagaactcggcctccatcttcaacacgctatcggatatcccgtcgcagatggaggacgcggagctgcttctgggggtggccatgcggctggccggctccctcaccgatgtggccgtggagactcagcgccgcaagcacctggcctatctcattgcagaccagggccagctcctgggggccggcaccctcaccaacctctctcaggtggcccaggatggggggccgcaccttgacccacagcacacggggaggaggggtcaccttgaagttcagagcncgggggctgcggaaaacaaaccagcccttcctgctctgccccccagcctggcccagtcagaccacagctgtggggtgatccaggcctcctcaggctttgtgcacctcaggttctgatcctggcacggtttgggaggaaggcagacccagctctgattatctgttttcaattcttggagccagcgtcagaggctatttcagatgagacagtataagccaagggctggtgggttctcttcctcccggggccaggaccaccctgacccactcctcttggtgcaggttgttcgccgcaggacccagcggaggaagtccaccatcactgctctgctcttcggtgagagctctgcgagtgccaggcagtgtgggcatgcgggagtctgtcctcacgctcatgtggacgtggagcttcctcctcgggggcctggagtgggctgtggtcaccatggttctctgggcctcctaggggaggatgacctggaggcactcaaggccaagaacatcaagcagacggaactggtggctgacctccgggaagccatcctgcgcgtggcacgccacttccagtgcacagaccccaaaaactgcagcgtggagctgactccagactatagcatggagagccaccagcgggaccacgagaactacgtggcgtgctcacgcagccaccggcgccgagccaaggccctgctggactttgagcggcacgacgacgacgagctgggcttccgcaagaacgacatcatcacaatcgtgtctcagaaggacgagcactgctgggtgggggagctcaacggcctgcgaggctggtttccagccaagttcgtggaagtcctggatgagcgcagcaaagagtactccatcgcgggggatgactcggtgacggagggggtcacagacctcgtgcgagggaccctctgcccggcccttaaggccctgttcgaacatggactgaagaagccatccctgcttgggggcgcctgccacccctggctgtttatcgaggaggctgcaggccgggaggtcgagagagactttgcctccgtgtattcccgtctggtgctctgtaagaccttcaggttggatgaagatggcaaagtcctgaccccggaggagctgctctaccgggctgtgcagtctgtgaacgtgacccacgatgcagtgcatgcacaaatggatgtgaagctccgctcactgatctgcgtggggctcaatgagcaggtgctgcacctgtggctggaggtgctctgctccagcctgcccaccgtggagaagtggtaccagccctggtccttcctgcgcagcccgggctgggtccagatcaagtgtgagctccgagtcctctgctgctttgccttcagcctctcccaggactgggagctccctgcgaagagagagggtgggtggtgtgggcctcgtagggcctgcactgatggagctgcccaaaccgttcgcggggtggctaaggtgggaacccgaagtgctggtgtcagcggttaggaactaccccagccatgcccaaggcctgtgaggtgaggggctgccctgtttgcaggcgcagcagcccctgaaggagggcgtccgggacatgctggtgaagcaccacctcttcagctgggatgtggacgggtgaccccctcctccccagcccaacctcgggcctgcgtctgaggtggcccaggaccccaagctgcagagcccagggaagagcagctccagagccctggccggggccgcgggatatcaatatcaggctgccccactccacgttccccagcacatcccaggtggtgggagcagagggtaccctgccccaccagggtccttagggatgctctaggccaaaccacagtttgtaccaaaaaccttgtgaggaggtgggggagccatgtctgtgctcaggaagagggaaggggatgggggtggctagtaggctcctggcctctttggtttataaataaactgtgtctgtctttgaaaagtctttgacgaacaaacaaacaaaacaacacaaaaacacacaaaaacacacaaaacaacaaaaaaaaaaaaacaaaaaacaaaanaaaa

SEQ ID NO: 432719 - DNA, 3292 bp, Homo sapiens
  misc_feature (1557)..(1557): n is a, c, g, or t
gcttaggcgccgctgagcgctgactgggtgcgagtggggaagctgctaacccgacccggattggcgctgaggtggcccgtggggcagggcagatgattctggaccagatgaagcctgaggagccttccagctctaagatagcaggataggagacttctaagattggagctgcagaagacttgccagcccaccagcacaatgtcaggaagccatacacctgcctgtggccctttctcagccctgactccgagcatatggccccaggagatcttggccaagtacacgcagaaggaagagtcagcagagcaaccagagttctactacgatgagtttggtttccgtgtgtacaaggaagaaggtgatgagcctggctccagtctgctggcgaactcccctctgatggaggatgctccacagaggctgcggtggcaggcccacctggagttcacccataaccacgatgtgggggatctcacctgggacaagattgccgtctccctaccccgctctgagaagctccgctccctggtgctggccggcatcccacatggcatgaggccacaggtaaggtggccacagggacccacagggtgttgagagggtcctggccccatgatcaggtgtcacgagaaagactgagtgcccttgcggctcccttccctcagctgtggatgcggctctctggggccctgcagaagaagaggaactctgagctgtcctaccgcgagattgtgaagaacagctccaacgatgagaccatcgctgccaagcagatcgagaaggacctgctccgcaccatgcccagcaacgcctgcttcgccagcatgggtagcatcggggtgccccgcctgcgcagggtgctccgggccctggcctggctctacccagagatcggctactgccagggcaccggcatggtggccgcctgcctcctgctgttcctggaggaggaggacgccttctggatgatgtctgccatcatcgaggacctgctccccgcctcctacttcagcaccaccctgctgggtgtccagactgaccagcgggtcctgcgccacctcattgtccagtacctgcctcgcctggacaagctgctccaggagcatgacattgagctgtccctgatcacactgcactggttcctcacggccttcgccagcgtggtggacatcaagctgctcctgcgcatctgggacctgtttttctacgagggctcccgggtgctgttccagctcacgctgggcatgctgcacctcaaggaggaagagctgatccagtcagagaactcggcctccatcttcaacacgctatcggatatcccgtcgcagatggaggacgcggagctgcttctgggggtggccatgcggctggccggctccctcaccgatgtggccgtggagactcagcgccgcaagcacctggcctatctcattgcagaccagggccagctcctgggggccggcaccctcaccaacctctctcaggtggcccaggatggggggccgcaccttgacccacagcacacggggaggaggggtcaccttgaagttcagagcncgggggctgcggaaaacaaaccagcccttcctgctctgccccccagcctggcccagtcagaccacagctgtggggtgatccaggcctcctcaggctttgtgcacctcaggttctgatcctggcacggtttgggaggaaggcagacccagctctgattatctgttttcaattcttggagccagcgtcagaggctatttcagatgagacagtataagccaagggctggtgggttctcttcctcccggggccaggaccaccctgacccactcctcttggtgcaggttgttcgccgcaggacccagcggaggaagtccaccatcactgctctgctcttcggtgagagctctgcgagtgccaggcagtgtgggcatgcgggagtctgtcctcacgctcatgtggacgtggagcttcctcctcgggggcctggagtgggctgtggtcaccatggttctctgggcctcctaggggaggatgacctggaggcactcaaggccaagaacatcaagcagacggaactggtggctgacctccgggaagccatcctgcgcgtggcacgccacttccagtgcacagaccccaaaaactgcagcgtggagctgactccagactatagcatggagagccaccagcgggaccacgagaactacgtggcgtgctcacgcagccaccggcgccgagccaaggccctgctggactttgagcggcacgacgacgacgagctgggcttccgcaagaacgacatcatcacaatcgtgtctcagaaggacgagcactgctgggtgggggagctcaacggcctgcgaggctggtttccagccaagttcgtggaagtcctggatgagcgcagcaaagagtactccatcgcgggggatgactcggtgacggagggggtcacagacctcgtgcgagggaccctctgcccggcccttaaggccctgttcgaacatggactgaagaagccatccctgcttgggggcgcctgccacccctggctgtttatcgaggaggctgcaggccgggaggtcgagagagactttgcctccgtgtattcccgtctggtgctctgtaagaccttcaggttggatgaagatggcaaagtcctgaccccggaggagctgctctaccgggctgtgcagtctgtgaacgtgacccacgatgcagtgcatgcacaaatggatgtgaagctccgctcactgatctgcgtggggctcaatgagcaggtgctgcacctgtggctggaggtgctctgctccagcctgcccaccgtggagaagtggtaccagccctggtccttcctgcgcagcccgggctgggtccagatcaagtgtgagctccgagtcctctgctgctttgccttcagcctctcccaggactgggagctccctgcgaagagagaggcgcagcagcccctgaaggagggcgtccgggacatgctggtgaagcaccacctcttcagctgggatgtggacgggtgaccccctcctccccagcccaacctcgggcctgcgtctgaggtggcccaggaccccaagctgcagagcccagggaagagcagctccagagccctggccggggccgcgggatatcaatatcaggctgccccaagtttgtaccaaaaaccttgtgaggaggtgggggagccatgtctgtgctcaggaagagggaaggggatgggggtggctagtaggctcctggcctctttggtttataaataaactgtgtctgtctttgaaaa

SEQ ID NO: 432720 - DNA, 3138 bp, Homo sapiens
  misc_feature (1557)..(1557): n is a, c, g, or t
  misc_feature (3134)..(3134): n is a, c, g, or t
gcttaggcgccgctgagcgctgactgggtgcgagtggggaagctgctaacccgacccggattggcgctgaggtggcccgtggggcagggcagatgattctggaccagatgaagcctgaggagccttccagctctaagatagcaggataggagacttctaagattggagctgcagaagacttgccagcccaccagcacaatgtcaggaagccatacacctgcctgtggccctttctcagccctgactccgagcatatggccccaggagatcttggccaagtacacgcagaaggaagagtcagcagagcaaccagagttctactacgatgagtttggtttccgtgtgtacaaggaagaaggtgatgagcctggctccagtctgctggcgaactcccctctgatggaggatgctccacagaggctgcggtggcaggcccacctggagttcacccataaccacgatgtgggggatctcacctgggacaagattgccgtctccctaccccgctctgagaagctccgctccctggtgctggccggcatcccacatggcatgaggccacaggtaaggtggccacagggacccacagggtgttgagagggtcctggccccatgatcaggtgtcacgagaaagactgagtgcccttgcggctcccttccctcagctgtggatgcggctctctggggccctgcagaagaagaggaactctgagctgtcctaccgcgagattgtgaagaacagctccaacgatgagaccatcgctgccaagcagatcgagaaggacctgctccgcaccatgcccagcaacgcctgcttcgccagcatgggtagcatcggggtgccccgcctgcgcagggtgctccgggccctggcctggctctacccagagatcggctactgccagggcaccggcatggtggccgcctgcctcctgctgttcctggaggaggaggacgccttctggatgatgtctgccatcatcgaggacctgctccccgcctcctacttcagcaccaccctgctgggtgtccagactgaccagcgggtcctgcgccacctcattgtccagtacctgcctcgcctggacaagctgctccaggagcatgacattgagctgtccctgatcacactgcactggttcctcacggccttcgccagcgtggtggacatcaagctgctcctgcgcatctgggacctgtttttctacgagggctcccgggtgctgttccagctcacgctgggcatgctgcacctcaaggaggaagagctgatccagtcagagaactcggcctccatcttcaacacgctatcggatatcccgtcgcagatggaggacgcggagctgcttctgggggtggccatgcggctggccggctccctcaccgatgtggccgtggagactcagcgccgcaagcacctggcctatctcattgcagaccagggccagctcctgggggccggcaccctcaccaacctctctcaggtggcccaggatggggggccgcaccttgacccacagcacacggggaggaggggtcaccttgaagttcagagcncgggggctgcggaaaacaaaccagcccttcctgctctgccccccagcctggcccagtcagaccacagctgtggggtgatccaggcctcctcaggctttgtgcacctcaggttctgatcctggcacggtttgggaggaaggcagacccagctctgattatctgttttcaattcttggagccagcgtcagaggctatttcagatgagacagtataagccaagggctggtgggttctcttcctcccggggccaggaccaccctgacccactcctcttggtgcaggttgttcgccgcaggacccagcggaggaagtccaccatcactgctctgctcttcggtgagagctctgcgagtgccaggcagtgtgggcatgcgggagtctgtcctcacgctcatgtggacgtggagcttcctcctcgggggcctggagtgggctgtggtcaccatggttctctgggcctcctaggggaggatgacctggaggcactcaaggccaagaacatcaagcagacggaactggtggctgacctccgggaagccatcctgcgcgtggcacgccacttccagtgcacagaccccaaaaactgcagcgtggagctgactccagactatagcatggagagccaccagcgggaccacgagaactacgtggcgtgctcacgcagccaccggcgccgagccaaggccctgctggactttgagcggcacgacgacgacgagctgggcttccgcaagaacgacatcatcacaatcgtgtctcagaaggacgagcactgctgggtgggggagctcaacggcctgcgaggctggtttccagccaagttcgtggaagtcctggatgagcgcagcaaagagtactccatcgcgggggatgactcggtgacggagggggtcacagacctcgtgcgagggaccctctgcccggcccttaaggccctgttcgaacatggactgaagaagccatccctgcttgggggcgcctgccacccctggctgtttatcgaggaggctgcaggccgggaggtcgagagagactttgcctccgtgtattcccgtctggtgctctgtaagaccttcaggttggatgaagatggcaaagtcctgaccccggaggagctgctctaccgggctgtgcagtctgtgaacgtgacccacgatgcagtgcatgcacaaatggatgtgaagctccgctcactgatctgcgtggggctcaatgagcaggtgctgcacctgtggctggaggtgctctgctccagcctgcccaccgtggagaagtggtaccagccctggtccttcctgcgcagcccgggctgggtccagatcaagtgtgagctccgagtcctctgctgctttgccttcagcctctcccaggactgggagctccctgcgaagagagagctagggctgcagagctgtattcaggtccaaggttctgcccttccttgagtggtctagaaggcactgcgtggcccctcagatgctgggacacaacagacccgggacccagctgtgctacccaccccttccatggactgaataagatggactaacagaaaaaaaaaaaacaaaaaacaaaanaaaa

SEQ ID NO: 432721 - DNA, 3340 bp, Homo sapiens
  misc_feature (1557)..(1557): n is a, c, g, or t
  misc_feature (3336)..(3336): n is a, c, g, or t
gcttaggcgccgctgagcgctgactgggtgcgagtggggaagctgctaacccgacccggattggcgctgaggtggcccgtggggcagggcagatgattctggaccagatgaagcctgaggagccttccagctctaagatagcaggataggagacttctaagattggagctgcagaagacttgccagcccaccagcacaatgtcaggaagccatacacctgcctgtggccctttctcagccctgactccgagcatatggccccaggagatcttggccaagtacacgcagaaggaagagtcagcagagcaaccagagttctactacgatgagtttggtttccgtgtgtacaaggaagaaggtgatgagcctggctccagtctgctggcgaactcccctctgatggaggatgctccacagaggctgcggtggcaggcccacctggagttcacccataaccacgatgtgggggatctcacctgggacaagattgccgtctccctaccccgctctgagaagctccgctccctggtgctggccggcatcccacatggcatgaggccacaggtaaggtggccacagggacccacagggtgttgagagggtcctggccccatgatcaggtgtcacgagaaagactgagtgcccttgcggctcccttccctcagctgtggatgcggctctctggggccctgcagaagaagaggaactctgagctgtcctaccgcgagattgtgaagaacagctccaacgatgagaccatcgctgccaagcagatcgagaaggacctgctccgcaccatgcccagcaacgcctgcttcgccagcatgggtagcatcggggtgccccgcctgcgcagggtgctccgggccctggcctggctctacccagagatcggctactgccagggcaccggcatggtggccgcctgcctcctgctgttcctggaggaggaggacgccttctggatgatgtctgccatcatcgaggacctgctccccgcctcctacttcagcaccaccctgctgggtgtccagactgaccagcgggtcctgcgccacctcattgtccagtacctgcctcgcctggacaagctgctccaggagcatgacattgagctgtccctgatcacactgcactggttcctcacggccttcgccagcgtggtggacatcaagctgctcctgcgcatctgggacctgtttttctacgagggctcccgggtgctgttccagctcacgctgggcatgctgcacctcaaggaggaagagctgatccagtcagagaactcggcctccatcttcaacacgctatcggatatcccgtcgcagatggaggacgcggagctgcttctgggggtggccatgcggctggccggctccctcaccgatgtggccgtggagactcagcgccgcaagcacctggcctatctcattgcagaccagggccagctcctgggggccggcaccctcaccaacctctctcaggtggcccaggatggggggccgcaccttgacccacagcacacggggaggaggggtcaccttgaagttcagagcncgggggctgcggaaaacaaaccagcccttcctgctctgccccccagcctggcccagtcagaccacagctgtggggtgatccaggcctcctcaggctttgtgcacctcaggttctgatcctggcacggtttgggaggaaggcagacccagctctgattatctgttttcaattcttggagccagcgtcagaggctatttcagatgagacagtataagccaagggctggtgggttctcttcctcccggggccaggaccaccctgacccactcctcttggtgcaggttgttcgccgcaggacccagcggaggaagtccaccatcactgctctgctcttcggtgagagctctgcgagtgccaggcagtgtgggcatgcgggagtctgtcctcacgctcatgtggacgtggagcttcctcctcgggggcctggagtgggctgtggtcaccatggttctctgggcctcctaggggaggatgacctggaggcactcaaggccaagaacatcaagcagacggaactggtggctgacctccgggaagccatcctgcgcgtggcacgccacttccagtgcacagaccccaaaaactgcagcgtggagctgactccagactatagcatggagagccaccagcgggaccacgagaactacgtggcgtgctcacgcagccaccggcgccgagccaaggccctgctggactttgagcggcacgacgacgacgagctgggcttccgcaagaacgacatcatcacagtgcgtgggggcgctggactaccaggtcctcaggctgtggcgggttccccagactccctccaccaagccccaccccaacccctttccctgccaagagcttctcttgtgaagatgtaggggtcttggcctggcctagttgctgaggagtcatatcgggggtgcaggaggcgctggcccagggcacccagctttggttcctgctgtttttcctcctgtgcagatcgtgtctcagaaggacgagcactgctgggtgggggagctcaacggcctgcgaggtggggtccttggtctgctcttgagctgggagagggaggagggggtgggcacagaagacttgggtgaccctggccgccaccaagctgttctcctctatacacctgcctggcttgaggtccctgaagcagctgagccggcttcccactgcctcagcctgcctgcaggctgtgtctgctctgtcctcggccctcgtggttgctccttacagggcctgtttttcccacaggctggtttccagccaagttcgtggaagtcctggatgagcgcagcaaagagtccagagccctggccggggccgcgggatatcaatatcaggctgccccactccacgttccccagcacatcccaggtggtgggagcagagggtaccctgccccaccagggtccttagggatgctctaggccaaaccacagtttgtaccaaaaaccttgtgaggaggtgggggagccatgtctgtgctcaggaagagggaaggggatgggggtggctagtaggctcctggcctctttggtttataaataaactgtgtctgtctttgaaaattgagaaagcacctacctgtcttctgtgcagctagggctgcagagctgtattcaggtccaaggttctgcccttccttgagtggtctagaaggcactgcgtggcccctcagatgctgggacacaacagacccgggacccagctgtgctacccaccccttccatggactgaataagatggactaacagaaaaaaaaaaaacaaaaaacaaaanaaaa

SEQ ID NO: 432722 - DNA, 3040 bp, Homo sapiens
  misc_feature (1557)..(1557): n is a, c, g, or t
  misc_feature (3036)..(3036): n is a, c, g, or t
gcttaggcgccgctgagcgctgactgggtgcgagtggggaagctgctaacccgacccggattggcgctgaggtggcccgtggggcagggcagatgattctggaccagatgaagcctgaggagccttccagctctaagatagcaggataggagacttctaagattggagctgcagaagacttgccagcccaccagcacaatgtcaggaagccatacacctgcctgtggccctttctcagccctgactccgagcatatggccccaggagatcttggccaagtacacgcagaaggaagagtcagcagagcaaccagagttctactacgatgagtttggtttccgtgtgtacaaggaagaaggtgatgagcctggctccagtctgctggcgaactcccctctgatggaggatgctccacagaggctgcggtggcaggcccacctggagttcacccataaccacgatgtgggggatctcacctgggacaagattgccgtctccctaccccgctctgagaagctccgctccctggtgctggccggcatcccacatggcatgaggccacaggtaaggtggccacagggacccacagggtgttgagagggtcctggccccatgatcaggtgtcacgagaaagactgagtgcccttgcggctcccttccctcagctgtggatgcggctctctggggccctgcagaagaagaggaactctgagctgtcctaccgcgagattgtgaagaacagctccaacgatgagaccatcgctgccaagcagatcgagaaggacctgctccgcaccatgcccagcaacgcctgcttcgccagcatgggtagcatcggggtgccccgcctgcgcagggtgctccgggccctggcctggctctacccagagatcggctactgccagggcaccggcatggtggccgcctgcctcctgctgttcctggaggaggaggacgccttctggatgatgtctgccatcatcgaggacctgctccccgcctcctacttcagcaccaccctgctgggtgtccagactgaccagcgggtcctgcgccacctcattgtccagtacctgcctcgcctggacaagctgctccaggagcatgacattgagctgtccctgatcacactgcactggttcctcacggccttcgccagcgtggtggacatcaagctgctcctgcgcatctgggacctgtttttctacgagggctcccgggtgctgttccagctcacgctgggcatgctgcacctcaaggaggaagagctgatccagtcagagaactcggcctccatcttcaacacgctatcggatatcccgtcgcagatggaggacgcggagctgcttctgggggtggccatgcggctggccggctccctcaccgatgtggccgtggagactcagcgccgcaagcacctggcctatctcattgcagaccagggccagctcctgggggccggcaccctcaccaacctctctcaggtggcccaggatggggggccgcaccttgacccacagcacacggggaggaggggtcaccttgaagttcagagcncgggggctgcggaaaacaaaccagcccttcctgctctgccccccagcctggcccagtcagaccacagctgtggggtgatccaggcctcctcaggctttgtgcacctcaggttctgatcctggcacggtttgggaggaaggcagacccagctctgattatctgttttcaattcttggagccagcgtcagaggctatttcagatgagacagtataagccaagggctggtgggttctcttcctcccggggccaggaccaccctgacccactcctcttggtgcaggttgttcgccgcaggacccagcggaggaagtccaccatcactgctctgctcttcggtgagagctctgcgagtgccaggcagtgtgggcatgcgggagtctgtcctcacgctcatgtggacgtggagcttcctcctcgggggcctggagtgggctgtggtcaccatggttctctgggcctcctaggggaggatgacctggaggcactcaaggccaagaacatcaagcagacggaactggtggctgacctccgggaagccatcctgcgcgtggcacgccacttccagtgcacagaccccaaaaactgcagcgtggtggtgagtcgccagctccctgggctgctaccaaacacggccctaactcctccaacccccttggtgggcctgtgttcactgtggcaggagctgactccagactatagcatggagagccaccagcgggaccacgagaactacgtggcgtgctcacgcagccaccggcgccgagccaaggccctgctggactttgagcggcacgacgacgacgagctgggcttccgcaagaacgacatcatcacaatcgtgtctcagaaggacgagcactgctgggtgggggagctcaacggcctgcgaggctggtttccagccaagttcgtggaagtcctggatgagcgcagcaaagagtactccatcgcgggggatgactcggtgacggagggggtcacagacctcgtgcgagggacctccagagccctggccggggccgcgggatatcaatatcaggctgccccactccacgttccccagcacatcccaggtggtgggagcagagggtaccctgccccaccagggtccttagggatgctctaggccaaaccacagtttgtaccaaaaaccttgtgaggaggtgggggagccatgtctgtgctcaggaagagggaaggggatgggggtggctagtaggctcctggcctctttggtttataaataaactgtgtctgtctttgaaaattgagaaagcacctacctgtcttctgtgcagctagggctgcagagctgtattcaggtccaaggttctgcccttccttgagtggtctagaaggcactgcgtggcccctcagatgctgggacacaacagacccgggacccagctgtgctacccaccccttccatggactgaataagatggactaacagaaaaaaaaaaaacaaaaaacaaaanaaaa

SEQ ID NO: 432723 - DNA, 1199 bp, Homo sapiens
gcttaggcgccgctgagcgctgactgggtgcgagtggggaagctgctaacccgacccggattggcgctgaggtggcccgtggggcagggcagatgattctggaccagatgaagcctgaggagccttccagctctaagatagcaggataggagacttctaagattggagctgcagaagacttgccagcccaccagcacaatgtcaggaagccatacacctgcctgtggccctttctcagccctgactccgagcatatggccccaggagatcttggccaagtacacgcagaaggaagagtcagcagagcaaccagagttctactacgatgagtttggtttccgtgtgtacaaggaagaaggtgatgagcctggctccagtctgctggcgaactcccctctgatggaggatgctccacagaggctgcggtggcaggcccacctggagttcacccataaccacgatgtgggggatctcacctgggacaagattgccgtctccctaccccgctctgagaagctccgctccctggtgctggccggcatcccacatggcatgaggccacaggtaaggtggccacagggacccacagggtgttgagagggtcctggccccatgatcaggtgtcacgagaaagactgagtgcccttgcggctcccttccctcagctgtggatgcggctctctggggccctgcagaagaagaggaactctgagctgtcctaccgcgagattgtgaagaacagctccaacgatgagaccatcgctgccaagcaggtgaggccggtggcactgtgcaggaagagctggaggctgtgtgggctcgcaggagagagggagcctgcctggggttcttagagtgtgcccttgatgtggggtaggggaggatatttgctccttccttggtcctctgcaggccaaagaaagaattgtccaaaaggccatcagtgctgtggaagggcttggagatggggttcccaagcccgggtccacttcaggaacagatggggactctaaatatagactccaggcctcgggccacacgttttcaggtggtctggcatgaagtttcccagctggatttgatgtcccggctccacactggctgggagctgaccctgaagggaggagggtgaccttgatcaggaacacaaggaatccccatttctgggggagaagcccgcctggggtctgcctccctcc

SEQ ID NO: 432724 - DNA, 438 bp, Homo sapiens
cagggctttctcagacccatccctcccatcagtactccatcgcgggggatgactcggtgacggagggggtcacagacctcgtgcgagggaccctctgcccggcccttaaggccctgttcgaacatggactgaagaagccatccctgcttgggggcgcctgccacccctggctgtttatcgaggaggtaagtcagtggctgggcccatgacccccaccctgcaccagccctgctgtgccccctagtacccatcttaggtccttcctgccccacagagaggatgggaagagctggcagcgtggtgacaggtgcccagtcggccccaagggctttgaaccagcatcttcctgtccctgcactcacaccgtgtgctgtccccacaggctgcaggccgggaggtcgagagagactttgcctccgtgtattcccgtctggtgct

SEQ ID NO: 432725 - DNA, 3626 bp, Homo sapiens
  misc_feature (1557)..(1557): n is a, c, g, or t
gcttaggcgccgctgagcgctgactgggtgcgagtggggaagctgctaacccgacccggattggcgctgaggtggcccgtggggcagggcagatgattctggaccagatgaagcctgaggagccttccagctctaagatagcaggataggagacttctaagattggagctgcagaagacttgccagcccaccagcacaatgtcaggaagccatacacctgcctgtggccctttctcagccctgactccgagcatatggccccaggagatcttggccaagtacacgcagaaggaagagtcagcagagcaaccagagttctactacgatgagtttggtttccgtgtgtacaaggaagaaggtgatgagcctggctccagtctgctggcgaactcccctctgatggaggatgctccacagaggctgcggtggcaggcccacctggagttcacccataaccacgatgtgggggatctcacctgggacaagattgccgtctccctaccccgctctgagaagctccgctccctggtgctggccggcatcccacatggcatgaggccacaggtaaggtggccacagggacccacagggtgttgagagggtcctggccccatgatcaggtgtcacgagaaagactgagtgcccttgcggctcccttccctcagctgtggatgcggctctctggggccctgcagaagaagaggaactctgagctgtcctaccgcgagattgtgaagaacagctccaacgatgagaccatcgctgccaagcagatcgagaaggacctgctccgcaccatgcccagcaacgcctgcttcgccagcatgggtagcatcggggtgccccgcctgcgcagggtgctccgggccctggcctggctctacccagagatcggctactgccagggcaccggcatggtggccgcctgcctcctgctgttcctggaggaggaggacgccttctggatgatgtctgccatcatcgaggacctgctccccgcctcctacttcagcaccaccctgctgggtgtccagactgaccagcgggtcctgcgccacctcattgtccagtacctgcctcgcctggacaagctgctccaggagcatgacattgagctgtccctgatcacactgcactggttcctcacggccttcgccagcgtggtggacatcaagctgctcctgcgcatctgggacctgtttttctacgagggctcccgggtgctgttccagctcacgctgggcatgctgcacctcaaggaggaagagctgatccagtcagagaactcggcctccatcttcaacacgctatcggatatcccgtcgcagatggaggacgcggagctgcttctgggggtggccatgcggctggccggctccctcaccgatgtggccgtggagactcagcgccgcaagcacctggcctatctcattgcagaccagggccagctcctgggggccggcaccctcaccaacctctctcaggtggcccaggatggggggccgcaccttgacccacagcacacggggaggaggggtcaccttgaagttcagagcncgggggctgcggaaaacaaaccagcccttcctgctctgccccccagcctggcccagtcagaccacagctgtggggtgatccaggcctcctcaggctttgtgcacctcaggttctgatcctggcacggtttgggaggaaggcagacccagctctgattatctgttttcaattcttggagccagcgtcagaggctatttcagatgagacagtataagccaagggctggtgggttctcttcctcccggggccaggaccaccctgacccactcctcttggtgcaggttgttcgccgcaggacccagcggaggaagtccaccatcactgctctgctcttcggtgagagctctgcgagtgccaggcagtgtgggcatgcgggagtctgtcctcacgctcatgtggacgtggagcttcctcctcgggggcctggagtgggctgtggtcaccatggttctctgggcctcctaggggaggatgacctggaggcactcaaggccaagaacatcaagcagacggaactggtggctgacctccgggaagccatcctgcgcgtggcacgccacttccagtgcacagaccccaaaaactgcagcgtggagctgactccagactatagcatggagagccaccagcgggaccacgagaactacgtggcgtgctcacgcagccaccggcgccgagccaaggccctgctggactttgagcggcacgacgacgacgagctgggcttccgcaagaacgacatcatcacaatcgtgtctcagaaggacgagcactgctgggtgggggagctcaacggcctgcgaggctggtttccagccaagttcgtggaagtcctggatgagcgcagcaaagagtactccatcgcgggggatgactcggtgacggagggggtcacagacctcgtgcgagggaccctctgcccggcccttaaggccctgttcgaacatggactgaagaagccatccctgcttgggggcgcctgccacccctggctgtttatcgaggaggctgcaggccgggaggtcgagagagactttgcctccgtgtattcccgtctggtgctctgtaagaccttcaggttggatgaagatggcaaagtcctgaccccggaggagctgctctaccgggctgtgcagtctgtgaacgtgacccacgatgcagtgcatgcacaaatggatgtgaagctccgctcactgatctgcgtggggctcaatgagcaggtgctgcacctgtggctggaggtgctctgctccagcctgcccaccgtggagaagtggtaccagccctggtccttcctgcgcagcccgggctgggtccagatcaagtgtgagctccgagtcctctgctgctttgccttcagcctctcccaggactgggagctccctgcgaagagagagggtgggtggtgtgggcctcgtagggcctgcactgatggagctgcccaaaccgttcgcggggtggctaaggtgggaacccgaagtgctggtgtcagcggttaggaactaccccagccatgcccaaggcctgtgaggtgaggggctgccctgtttgcaggcgcagcagcccctgaaggagggcgtccgggacatgctggtgaagcaccacctcttcagctgggatgtggacgggtgaccccctcctccccagcccaacctcgggcctgcgtctgaggtggcccaggaccccaagctgcagagcccagggaagagcagctccagagccctggccggggccgcgggatatcaatatcaggctgccccactccacgttccccagcacatcccaggtggtgggagcagagggtaccctgccccaccagggtccttagggatgctctaggccaaaccacagtttgtaccaaaaaccttgtgaggaggtgggggagccatgtctgtgctcaggaagagggaaggggatgggggtggcaacatctttggtgccaatatttatacagaaaaagaggacagtggttttatgagataatggggttctagtcttaggaggggaacatgcacctagaccttgttgggtgcatgcggtattgcattctgaaacagtccacgtttata

SEQ ID NO: 432726 - DNA, 2951 bp, Homo sapiens
  misc_feature (1557)..(1557): n is a, c, g, or t
gcttaggcgccgctgagcgctgactgggtgcgagtggggaagctgctaacccgacccggattggcgctgaggtggcccgtggggcagggcagatgattctggaccagatgaagcctgaggagccttccagctctaagatagcaggataggagacttctaagattggagctgcagaagacttgccagcccaccagcacaatgtcaggaagccatacacctgcctgtggccctttctcagccctgactccgagcatatggccccaggagatcttggccaagtacacgcagaaggaagagtcagcagagcaaccagagttctactacgatgagtttggtttccgtgtgtacaaggaagaaggtgatgagcctggctccagtctgctggcgaactcccctctgatggaggatgctccacagaggctgcggtggcaggcccacctggagttcacccataaccacgatgtgggggatctcacctgggacaagattgccgtctccctaccccgctctgagaagctccgctccctggtgctggccggcatcccacatggcatgaggccacaggtaaggtggccacagggacccacagggtgttgagagggtcctggccccatgatcaggtgtcacgagaaagactgagtgcccttgcggctcccttccctcagctgtggatgcggctctctggggccctgcagaagaagaggaactctgagctgtcctaccgcgagattgtgaagaacagctccaacgatgagaccatcgctgccaagcagatcgagaaggacctgctccgcaccatgcccagcaacgcctgcttcgccagcatgggtagcatcggggtgccccgcctgcgcagggtgctccgggccctggcctggctctacccagagatcggctactgccagggcaccggcatggtggccgcctgcctcctgctgttcctggaggaggaggacgccttctggatgatgtctgccatcatcgaggacctgctccccgcctcctacttcagcaccaccctgctgggtgtccagactgaccagcgggtcctgcgccacctcattgtccagtacctgcctcgcctggacaagctgctccaggagcatgacattgagctgtccctgatcacactgcactggttcctcacggccttcgccagcgtggtggacatcaagctgctcctgcgcatctgggacctgtttttctacgagggctcccgggtgctgttccagctcacgctgggcatgctgcacctcaaggaggaagagctgatccagtcagagaactcggcctccatcttcaacacgctatcggatatcccgtcgcagatggaggacgcggagctgcttctgggggtggccatgcggctggccggctccctcaccgatgtggccgtggagactcagcgccgcaagcacctggcctatctcattgcagaccagggccagctcctgggggccggcaccctcaccaacctctctcaggtggcccaggatggggggccgcaccttgacccacagcacacggggaggaggggtcaccttgaagttcagagcncgggggctgcggaaaacaaaccagcccttcctgctctgccccccagcctggcccagtcagaccacagctgtggggtgatccaggcctcctcaggctttgtgcacctcaggttctgatcctggcacggtttgggaggaaggcagacccagctctgattatctgttttcaattcttggagccagcgtcagaggctatttcagatgagacagtataagccaagggctggtgggttctcttcctcccggggccaggaccaccctgacccactcctcttggtgcaggttgttcgccgcaggacccagcggaggaagtccaccatcactgctctgctcttcggtgagagctctgcgagtgccaggcagtgtgggcatgcgggagtctgtcctcacgctcatgtggacgtggagcttcctcctcgggggcctggagtgggctgtggtcaccatggttctctgggcctcctaggggaggatgacctggaggcactcaaggccaagaacatcaagcagacggaactggtggctgacctccgggaagccatcctgcgcgtggcacgccacttccagtgcacagaccccaaaaactgcagcgtggagctgactccagactatagcatggagagccaccagcgggaccacgagaactacgtggcgtgctcacgcagccaccggcgccgagccaaggccctgctggactttgagcggcacgacgacgacgagctgggcttccgcaagaacgacatcatcacaatcgtgtctcagaaggacgagcactgctgggtgggggagctcaacggcctgcgaggctggtttccagccaagttcgtggaagtcctggatgagcgcagcaaagagtactccatcgcgggggatgactcggtgacggagggggtcacagacctcgtgcgagggaccctctgcccggcccttaaggccctgttcgaacatggactgaagaagccatccctgcttgggggcgcctgccacccctggctgtttatcgaggaggctgcaggccgggaggtcgagagagactttgcctccgtgtattcccgtctggtgctctgtaagaccttcaggttggatgaagatggcaaagtcctgaccccggaggagctgctctaccggtccagagccctggccggggccgcgggatatcaatatcaggctgccccactccacgttccccagcacatcccaggtggtgggagcagagggtaccctgccccaccagggtccttagggatgctctaggccaaaccacagtttgtaccaaaaaccttgtgaggaggtgggggagccatgtctgtgctcaggaagagggaaggggatgggggtggctagtaggctcctggcctctttggtttataaataaactgtgtctgtctttgaaaa

SEQ ID NO: 432727 - DNA, 2980 bp, Homo sapiens
  misc_feature (1557)..(1557): n is a, c, g, or t
  misc_feature (2976)..(2976): n is a, c, g, or t
gcttaggcgccgctgagcgctgactgggtgcgagtggggaagctgctaacccgacccggattggcgctgaggtggcccgtggggcagggcagatgattctggaccagatgaagcctgaggagccttccagctctaagatagcaggataggagacttctaagattggagctgcagaagacttgccagcccaccagcacaatgtcaggaagccatacacctgcctgtggccctttctcagccctgactccgagcatatggccccaggagatcttggccaagtacacgcagaaggaagagtcagcagagcaaccagagttctactacgatgagtttggtttccgtgtgtacaaggaagaaggtgatgagcctggctccagtctgctggcgaactcccctctgatggaggatgctccacagaggctgcggtggcaggcccacctggagttcacccataaccacgatgtgggggatctcacctgggacaagattgccgtctccctaccccgctctgagaagctccgctccctggtgctggccggcatcccacatggcatgaggccacaggtaaggtggccacagggacccacagggtgttgagagggtcctggccccatgatcaggtgtcacgagaaagactgagtgcccttgcggctcccttccctcagctgtggatgcggctctctggggccctgcagaagaagaggaactctgagctgtcctaccgcgagattgtgaagaacagctccaacgatgagaccatcgctgccaagcagatcgagaaggacctgctccgcaccatgcccagcaacgcctgcttcgccagcatgggtagcatcggggtgccccgcctgcgcagggtgctccgggccctggcctggctctacccagagatcggctactgccagggcaccggcatggtggccgcctgcctcctgctgttcctggaggaggaggacgccttctggatgatgtctgccatcatcgaggacctgctccccgcctcctacttcagcaccaccctgctgggtgtccagactgaccagcgggtcctgcgccacctcattgtccagtacctgcctcgcctggacaagctgctccaggagcatgacattgagctgtccctgatcacactgcactggttcctcacggccttcgccagcgtggtggacatcaagctgctcctgcgcatctgggacctgtttttctacgagggctcccgggtgctgttccagctcacgctgggcatgctgcacctcaaggaggaagagctgatccagtcagagaactcggcctccatcttcaacacgctatcggatatcccgtcgcagatggaggacgcggagctgcttctgggggtggccatgcggctggccggctccctcaccgatgtggccgtggagactcagcgccgcaagcacctggcctatctcattgcagaccagggccagctcctgggggccggcaccctcaccaacctctctcaggtggcccaggatggggggccgcaccttgacccacagcacacggggaggaggggtcaccttgaagttcagagcncgggggctgcggaaaacaaaccagcccttcctgctctgccccccagcctggcccagtcagaccacagctgtggggtgatccaggcctcctcaggctttgtgcacctcaggttctgatcctggcacggtttgggaggaaggcagacccagctctgattatctgttttcaattcttggagccagcgtcagaggctatttcagatgagacagtataagccaagggctggtgggttctcttcctcccggggccaggaccaccctgacccactcctcttggtgcaggttgttcgccgcaggacccagcggaggaagtccaccatcactgctctgctcttcggtgagagctctgcgagtgccaggcagtgtgggcatgcgggagtctgtcctcacgctcatgtggacgtggagcttcctcctcgggggcctggagtgggctgtggtcaccatggttctctgggcctcctaggggaggatgacctggaggcactcaaggccaagaacatcaagcagacggaactggtggctgacctccgggaagccatcctgcgcgtggcacgccacttccagtgcacagaccccaaaaactgcagcgtggtggtgagtcgccagctccctgggctgctaccaaacacggccctaactcctccaacccccttggtgggcctgtgttcactgtggcaggagctgactccagactatagcatggagagccaccagcgggaccacgagaactacgtggcgtgctcacgcagccaccggcgccgagccaaggccctgctggactttgagcggcacgacgacgacgagctgggcttccgcaagaacgacatcatcacaatcgtgtctcagaaggacgagcactgctgggtgggggagctcaacggcctgcgaggctggtttccagccaagttcgtggaagtcctggatgagcgcagcaaagagtccagagccctggccggggccgcgggatatcaatatcaggctgccccactccacgttccccagcacatcccaggtggtgggagcagagggtaccctgccccaccagggtccttagggatgctctaggccaaaccacagtttgtaccaaaaaccttgtgaggaggtgggggagccatgtctgtgctcaggaagagggaaggggatgggggtggctagtaggctcctggcctctttggtttataaataaactgtgtctgtctttgaaaattgagaaagcacctacctgtcttctgtgcagctagggctgcagagctgtattcaggtccaaggttctgcccttccttgagtggtctagaaggcactgcgtggcccctcagatgctgggacacaacagacccgggacccagctgtgctacccaccccttccatggactgaataagatggactaacagaaaaaaaaaaaacaaaaaacaaaanaaaa

SEQ ID NO: 432728 - DNA, 1678 bp, Homo sapiens
tgatagtaatatttcttaccaatggtaaaatttgaacttttaagcaaaaattagaattttggaaaactcatttgccaccgtgatcttggcagcttttgaataagagttttctgatgggtggtggtgttcataaataatgatttttaaaatattgtgtaatgaactatgtcaccatttggaagacctgtgtaattcagtgaaactagtattttccacataactagtatatatactacaaaagtatgcatgggtaaaacatacatttaaaagctaagatagaccaatgattttaatggaacgggtgttctgggatacggtttcagatttcacactgcaacaaacctttaagaaagtaccaactgttcagttttggtatagtatcaaagtagtatatcccacagttaattaaaacccctattaaaacactcccttttcccagttatatattcctgtgaggcagaatttaataatactcctcaaccaaaacaacatgtcatagtagactgaaggcagaagcagataagagactaaaacaatttttgattaagctagatatttaagagctttgcaaagatgtgaaacaatgccacttttcactagttttttttgcgtttgcaagtcatttttcattaaaatgttatttatgttaatttgtaatgagtttgttattttaaaatgaataaataaatattataaaatattctctgttttaatttctaatatggaaaatattgatagatataaccaatgtgaacaaaaagtctttttgggttcaacaatttttaagtgcataagatgattctgaagccaaagagttagggcaccactgtctcagaaaaatagtagtacattttcctaaaaatgtatattgtttaaataataagaacaataagggagactgctgagtctctatcttcaatcatctaaggttctacaggctatttctaatgttttaaaaaatgtaacaggtggctgggcgtggtggctcacgcctgtagtcccagcactttgggaggccgaggcgagtggatcacctgaggtcaggagtttgagaccagcctggccaacagggcaaaaccctgtctctactaaaaataaaaaagttagctgggcatggtggtgggcgcctgtaatcccagctacttgggaggctgaggcaggagaatcacttgaacctgggaggcggaggttgcagtgagctaagatcctgccactgcactccagcctgggtgacagagtgagactccatctcaaaaaaaaaaaagtaataggtgttcctgaaggtatagcgggaaaggtacccagaatgtaaaaattctttgctattagttggaatcaaattaacttagtggtttcttttatgcttattataagctgtttggcatttgagggaaaaaaatagaaaaacaaaacattatttaatagttcgttaggtaaaaatctttccaacgtttgaccgaggatggggaaaaaaaataaaagcaagagtttgtacgtttggtgttataagagttaggaattagattcctttctgactcagaatgttttgggcatagtttttaaatcaaagcacctcagctgatggttcccagtacttgggttcttttaaaaaatgagaggttttgccagttggtctgggtggaacccagaaatgatagctgcttaaaaactcttcaag

SEQ ID NO: 432729 - DNA, 1110 bp, Homo sapiens
ctgttgactttttatatggaacccaaatcagattgaagaagtttctttctcttctgagattgcaaaaagtttttgtcaaaggaaaacagcctgttcatttcatggaaggacgttttggaaaaatagatccagacctacatagaaagaaagatttgagtgcacactacatacattagaagagaaaaataaaggaaaatcagactgctatgaaaaccaagtttcccacttcatgctaaaaagtggtaacattgcatgtcagactgaagaaagacacctgagtctatgttgagttgtgtttggccccttgcaaggttgtcataaatgattcattgttttggcttaaggggctttcagctggatgacaaagcataaggacaaaaaatatgaaatttgtcattaaatgtcttcatcatttagcctgtttaattgtgctaagatcttttaagaaacaatgaatacagagatttccagattatacttccatgaaagcctaaatcttctcaggtattcacagtttaaaaaaattgaagtataccaaatgatatccaagtttactgtgaaagcaaatggcccataaaattttgcatttacatttgaattttaatctagagagaaggagaccacataagtaaaacacaatctatctcataggctgaagcgtcaggtattacaaatgtatgtggttagcttctctttatttagttctcattgatttaggtactaattctacccattctttgctttaatcatttagtattaagaaatattgactttcatcagagcttaatatacaactggctccaaatctagaaaatcaatttaaattctttatagtagtatgtaattggttaattcagtcatttttaaaacaatatatttgtttaaaaatatttattttgctaaccagctaccagacattgttctaggtaattcttacagaagtgcgtaagacagatagtgtggcttcccacatagggcatatagattacaaagagaagacatagctaaagaattaaaccaataataaaaacatcaaattctctgaaaaaaagagctgctgccagtatcagtgaatacttctttcatgtaacacaaactgacacttaaaga

SEQ ID NO: 432730 - DNA, 1312 bp, Homo sapiens
ctgttgactttttatatggaacccaaatcagattgaagaagtttctttctcttctgagattgcaaaaagtttttgtcaaaggaaaacagcctgttcatttcatggaaggacgttttggaaaaatagatccagacctacatagaaaggtatgacagctaccttaattcatccatcaagacctttcttcttaattgtgaattaccaactatagatcatcagagaatttaagaaaatcgacaaactaaatgcaaagaaacaagctaatgaaatagaacaaatgactaaaggaaacagaagtaattcaatgaacataagaaaacttaaaaaatattctaattacattctcagaaagatttgagtgcacactacatacattagaagagaaaaataaaggaaaatcagactgctatgaaaaccaagtttcccacttcatgctaaaaagtggtaacattgcatgtcagactgaagaaagacacctgagtctatgttgagttgtgtttggccccttgcaaggttgtcataaatgattcattgttttggcttaaggggctttcagctggatgacaaagcataaggacaaaaaatatgaaatttgtcattaaatgtcttcatcatttagcctgtttaattgtgctaagatcttttaagaaacaatgaatacagagatttccagattatacttccatgaaagcctaaatcttctcaggtattcacagtttaaaaaaattgaagtataccaaatgatatccaagtttactgtgaaagcaaatggcccataaaattttgcatttacatttgaattttaatctagagagaaggagaccacataagtaaaacacaatctatctcataggctgaagcgtcaggtattacaaatgtatgtggttagcttctctttatttagttctcattgatttaggtactaattctacccattctttgctttaatcatttagtattaagaaatattgactttcatcagagcttaatatacaactggctccaaatctagaaaatcaatttaaattctttatagtagtatgtaattggttaattcagtcatttttaaaacaatatatttgtttaaaaatatttattttgctaaccagctaccagacattgttctaggtaattcttacagaagtgcgtaagacagatagtgtggcttcccacatagggcatatagattacaaagagaagacatagctaaagaattaaaccaataataaaaacatcaaattctctgaaaaaaagagctgctgccagtatcagtgaatacttctttcatgtaacacaaactgacacttaaaga

SEQ ID NO: 432731 - DNA, 613 bp, Homo sapiens
tatgatcattccctcgaaatgtggaaactattatgtatgtcagtatgctcctagtccggtcccttaagtattccttcacgtgtatgtaatgctaggattatttgctatgaatattatgtacggcgcaggtggactcgcacgacgttgacgtttaagctagatgtatgaggactaggacgattaatgtaggatcactatgaactgtaactcttactacagtatggtagttccacagcagaagttatatgattccataaaattcaaatgcagattaattctcctaatgagttttcagtgttgaatcgtaaatagtctgaagcaggccagtgttccttttggctgccagtcttggattagtaaaaggaggtaattctttcagattccctggttctttgccactcagagtattgtacttttgatatagaatagagaaggttacctttggtttaaaaactatttttatatactagctctttcatgtataaaacagagacaatcatcctaacaaaagagttcctgttatttttctgcacaaatgtcttgtgttgaaacactgttacagttccatataaatgtgtgctatataaaataaactttggagataaaaaaaagg

SEQ ID NO: 432732 - DNA, 559 bp, Homo sapiens
gatttctcttctttccccagttctccttggtctgtaacaggaatgccccttactcagtagcaggcaaatccaaaagaactgccctccatcaccattaccacttatttcaaaacagtcaccacagacttcttttccttataaaataatgcctattcaacacaccctgtctgtgcaaagtgcatcaagtactgtcaaaaagaaaaaagaaacagtttctaaaaccactaacagatgtgaggctttgagccaaaggcatatgatctatgaaggtaagttctttcactaagaagtttatcttagcaacacagaaaatcttactgtattctgggaaaggttcacttcattttattccccaattgagagaactttagggaattattttccttttagaaagagagaatctaaccaatctctggtacattggaatgtatcttctctgtttgtttgtccttgccaaagctttcttctcacccctttgttttgaaaaatccatttttggaactgcttttaaaagcataggtctggccaagcatggtagctcacgcctataatcccagca

SEQ ID NO: 432733 - DNA, 4441 bp, Homo sapiens
accggcagcccggccacgacccaagcggaggccgcgccgacgcctgcgcaatgtatgcggagagccaccaccgcctccggtcccgactccgatgatggcggacggcgccgcagctggcgctggcggcagcccatccttgagagagctgcgggcacggatggttgctgcagcaaacgagattgctaaggaaaggaggaagcaagatgtggttaatcgtgttgcaacccattcctcaaatataagatcgacatttaaaccagtaatcgatggatccatgcttaaaaatgacataaaacaaagattagcaagagagcgcagagaggagaaaaggagacagcaagacgccaataaagaaacacaactacttgaaaaagaaagaaagaccaagctccaatatgaaaaacagatggaggaaagacagagaaagctgaaggagcgaaaagagaaagaagaacaacggagaatagctgcagaagaaaaaagacaccagaaggatgaagcacaaaaggaaaaatttacagccattctttatcgtactttggaacggaggagacttgctgatgattatcagcaaaaaaagatggtcatggggaggctctgcaatggcgaattctgagagcaaaactgccaataaacgatctgcatctactgaaaaacttgaacagggtacttctgctttaatcagacaaatgcctttgtcatctgcaggccttcaaaattccgttgccaaaaggaaaacagacaaggagagaagctcatctttaaatagaagagatagtaacctacattcgtctactgataaagaacaagccgaaaggaagccacgtgttacaggcgtcaccaattatgtaatgcagtatgtcactgtacccttgcgtaaatgtactagcgacgaattgagggctgttatgtttcccatgtcgacaatgaaaatacctcctcaaacaaaagtagaagagtctcccttggagaaagtagaaacacctcccaaggcaagtgtggatgcacccccccaggtgaatgtggaagtattctgcaacacaagcatggaagcgtcccccaaggcaggtgtgggcatggcccctgaggtgagcacggactcattccctgtggtgagcgtggacgtgtcgcctgtggtgagcacatatgattctgagatgagcatggacgcatcccccgagttgagcatagaagcactcccgaaggtggacctggaaacagttcccaaggtgagcatagtagcatccccggaggcgagcctggaagcacccccggaagtgagtctggaagcactgccagaggtgagcgtggaagcagccccagaggggagcctggaagcacctcccaaggggagcgcagaagtagcccccaaggagagtgtgaaagggtcacccaaggagagcatggaggcatctcctgaggcgatggtgaaagcatcccccaagacatcccttgaagcaagcatggaagcatctcccaaggcaaaagcgagagacgctccaaagaaatcagaaatggacaaacaggccttaatccctattgccaagaagcgtctatcatcatacactgagtgttataaatggtcatcatctcctgaaaatgcttgtggtctgccgtctcccatcagcactaacaggcaaatccaaaagaactgccctccatcaccattaccacttatttcaaaacagtcaccacagacttcttttccttataaaataatgcctattcaacacaccctgtctgtgcaaagtgcatcaagtactgtcaaaaagaaaaaagaaacagtttctaaaaccactaacagatgtgaggctttgagccaaaggcatatgatctatgaagagtctggtaataagagtactgcaggtattatgaatgccgaggcggcaacaaaaattttgacagaattgcgccgccttgctcgtgaacaaagagaaaaagaggaagaagaaagacaacgggaagaaatgcagcaaagggtcattaagaaatcaaaagacatggcaaaggaagcagttggaggccaagcagaagaccacttgaaactcaaagatgggcagcaacaaaatgagactaaaaagaagaaaggatggctggatcaggaagaccaggaagcaccactgcagaaaggggacgccaaaataaaagctcaagaggaagctgacaaacgcaagaaagaacacgagagaattatgttacaaaatttacaagaacggttagaaaggaaaaagagaatagaagaaattatgaagcggacaagaaagacagatgtgaatgcctcaaaggtcacagaaacatccagccatgacatatatgaagaggctgaggctgacaacgaagaaagcgacaaggactcattgaatgaaatgtttccatcagccattctaaatggcacaggctcacctaccaaatttaaaatgccgttcaacaatgccaagaaaatgacacacaagctggtatttctagaagatggtaccagccaggtccgtaaagagccaaaaacatattttaatggcgatttgaaaaacttcagacaaaaaagcatgaaagacacttcaatacaggaagtagtttcaagaccatcttccaaaagaatgaccagtcacacaacgaaaaccagaaaggcggatgaaaccaacaccaccagcagatcctctgcacaaacaaaatctgaaggattccatgacatcttgccaaagtcctcagacacctttagacaataagagaagaagcaaacctgtttctcctcatttggatatgtaaaccttactcagcctgggagatgaatacatcttccactctggataactcaactcctgggcccatcagtcctcaaatttttctgcttctgacttgaacctggtaaaggaagtgacaccgaaaaattgaaagaaactgtcaaaaggccactttgatgtatatctcagatgttaaagtcatcttattctcttgtgtctaagcaagagttctaagtaaagagtggtttttgttttctttggaaaatcatcattgtctctcattcttgtgttgtcccaccaatgtgtttgctggagtgagtgcatcaaggatgctttcctgaaactgtaactgtggagtttctagaagaatctgattgcagaactaattctctttcagtatatatttgaaatcttaaagtaatgctttttctttttctttttcttttttttttttttgagacggagtcttgccctgtcgcccaggctgcagtgcagtggcacaatctcggctcactgcaacctccgcctcctcatctcaagcaattctcctgtctcagtctccccagtagctgggattacaggcatgtgccaccacacctggctaatttttttgtattttagtagagatagggttttaccatgttcaccaggctagtctcgaaatcctggcctcaagagatccacccgtcttggcctcccaaagtgttgggattacaggtgtgagccactgcacccagccaagtaatgctttttctgtgtaccagtgacaattttgacagctaaaaactcacagttgatcttgtagagaacataatagattatgcaagggccgcaggatcgctcacaagagctgtcagattgtttctaatataaaaataccaaaggttgcaaaatccagcaaattgtattttactgtgatatatgtatatttttaactctacccatctgtgccagtgagtacacaggcactaataacctgaaatgctgggagtcctgtaaagccccatcttggaacagtcagcacctttcatgctcttgtcagtgtttccttttgaagggcatattggtgtttatctacagaaacatatattatttttattgtgtacataaaggagtatatggctgttgtcccgtggggtatgtttaattcctctaaatgtttaaagtacttttctgcctgtactctccagttctgtcgttgagtatacactcaggcttgagatacaaccaaaatttgcttgcctttctctagccactggctgccagtgagttcgtgtgatgggcacacagaaatgcacacagatgtacatacacgtatgtatgcacacacagtatatgattccataaaattcaaatgcagattaattctcctaatgagttttcagtgttgaatcgtaaatagtctgaagcaggccagtgttccttttggctgccagtcttggattagtaaaaggaggtaattctttcagattccctggttctttgccactcagagtattgtacttttgatatagaatagagaaggttacctttggtttaaaaactatttttatatactagctctttcatgtataaaacagagacaatcatcctaacaaaagagttcctgttatttttctgcacaaatgtcttgtgttgaaacactgttacagttccatataaatgtgtgctatataaaataaactttggagataaaaaaaagg

SEQ ID NO: 432734 - DNA, 2519 bp, Homo sapiens
aacaaaagcagcttgattttattgcagggaagctaggaaggaataggacaactgagggtcattaagaaatcaaaagacatggcaaaggaagcagttggaggccaagcagaagaccacttgaaactcaaagatgggcagcaacaaaatgagactaaaaagaagaaaggatggctggatcaggaagaccaggaagcaccactgcagaaaggggacgccaaaataaaagctcaagaggaagctgacaaacgcaagaaagaacacgagagaattatgttacaaaatttacaagaacggttagaaaggaaaaagagaatagaagaaattatgaagcggacaagaaagacagatgtgaatgcctcaaaggtcacagaaacatccagccatgacatatatgaagaggctgaggctgacaacgaagaaagcgacaaggactcattgaatgaaatgtttccatcagccattctaaatggcacaggctcacctaccaaatttaaaatgccgttcaacaatgccaagaaaatgacacacaagctggtatttctagaagatggtaccagccaggtccgtaaagagccaaaaacatattttaatggcgatttgaaaaacttcagacaaaaaagcatgaaagacacttcaatacaggaagtagtttcaagaccatcttccaaaagaatgaccagtcacacaacgaaaaccagaaaggcggatgaaaccaacaccaccagcagatcctctgcacaaacaaaatctgaaggattccatgacatcttgccaaagtcctcagacacctttagacaataagagaagaagcaaacctgtttctcctcatttggatatgtaaaccttactcagcctgggagatgaatacatcttccactctggataactcaactcctgggcccatcagtcctcaaatttttctgcttctgacttgaacctggtaaaggaagtgacaccgaaaaattgaaagaaactgtcaaaaggccactttgatgtatatctcagatgttaaagtcatcttattctcttgtgtctaagcaagagttctaagtaaagagtggtttttgttttctttggaaaatcatcattgtctctcattcttgtgttgtcccaccaatgtgtttgctggagtgagtgcatcaaggatgctttcctgaaactgtaactgtggagtttctagaagaatctgattgcagaactaattctctttcagtatatatttgaaatcttaaagtaatgctttttctttttctttttcttttttttttttttgagacggagtcttgccctgtcgcccaggctgcagtgcagtggcacaatctcggctcactgcaacctccgcctcctcatctcaagcaattctcctgtctcagtctccccagtagctgggattacaggcatgtgccaccacacctggctaatttttttgtattttagtagagatagggttttaccatgttcaccaggctagtctcgaaatcctggcctcaagagatccacccgtcttggcctcccaaagtgttgggattacaggtgtgagccactgcacccagccaagtaatgctttttctgtgtaccagtgacaattttgacagctaaaaactcacagttgatcttgtagagaacataatagattatgcaagggccgcaggatcgctcacaagagctgtcagattgtttctaatataaaaataccaaaggttgcaaaatccagcaaattgtattttactgtgatatatgtatatttttaactctacccatctgtgccagtgagtacacaggcactaataacctgaaatgctgggagtcctgtaaagccccatcttggaacagtcagcacctttcatgctcttgtcagtgtttccttttgaagggcatattggtgtttatctacagaaacatatattatttttattgtgtacataaaggagtatatggctgttgtcccgtggggtatgtttaattcctctaaatgtttaaagtacttttctgcctgtactctccagttctgtcgttgagtatacactcaggcttgagatacaaccaaaatttgcttgcctttctctagccactggctgccagtgagttcgtgtgatgggcacacagaaatgcacacagatgtacatacacgtatgtatgcacacacagtatatgattccataaaattcaaatgcagattaattctcctaatgagttttcagtgttgaatcgtaaatagtctgaagcaggccagtgttccttttggctgccagtcttggattagtaaaaggaggtaattctttcagattccctggttctttgccactcagagtattgtacttttgatatagaatagagaaggttacctttggtttaaaaactatttttatatactagctctttcatgtataaaacagagacaatcatcctaacaaaagagttcctgttatttttctgcacaaatgtcttgtgttgaaacactgttacagttccatataaatgtgtgctatataaaataaactttggagataaaaaaaagg

SEQ ID NO: 432735 - DNA, 2472 bp, Homo sapiens
  misc_feature (2339)..(2339): n is a, c, g, or t
  misc_feature (2349)..(2349): n is a, c, g, or t
accggcagcccggccacgacccaagcggaggccgcgccgacgcctgcgcaatgtatgcggagagccaccaccgcctccggtcccgactccgatgatggcggacggcgccgcagctggcgctggcggcagcccatccttgagagagctgcgggcacggatggttgctgcagcaaacgagattgctaaggaaaggaggaagcaagatgtggttaatcgtgttgcaacccattcctcaaatataagatcgacatttaaaccagtaatcgatggatccatgcttaaaaatgacataaaacaaagattagcaagagagcgcagagaggagaaaaggagacagcaagacgccaataaagaaacacaactacttgaaaaagaaagaaagaccaagctccaatatgaaaaacagatggaggaaagacagagaaagctgaaggagcgaaaagagaaagaagaacaacggagaatagctgcagaagaaaaaagacaccagaaggatgaagcacaaaaggaaaaatttacagccattctttatcgtactttggaacggaggagacttgctgatgattatcagcaaaaaaagatggtcatggggaggctctgcaatggcgaattctgagagcaaaactgccaataaacgatctgcatctactgaaaaacttgaacagggtacttctgctttaatcagacaaatgcctttgtcatctgcaggccttcaaaattccgttgccaaaaggaaaacagacaaggagagaagctcatctttaaatagaagagatagtaacctacattcgtctactgataaagaacaagccgaaaggaagccacgtgttacaggcgtcaccaattatgtaatgcagtatgtcactgtacccttgcgtaaatgtactagcgacgaattgagggctgttatgtttcccatgtcgacaatgaaaatacctcctcaaacaaaagtagaagagtctcccttggagaaagtagaaacacctcccaaggcaagtgtggatgcacccccccaggtgaatgtggaagtattctgcaacacaagcatggaagcgtcccccaaggcaggtgtgggcatggcccctgaggtgagcacggactcattccctgtggtgagcgtggacgtgtcgcctgtggtgagcacatatgattctgagatgagcatggacgcatcccccgagttgagcatagaagcactcccgaaggtggacctggaaacagttcccaaggtgagcatagtagcatccccggaggcgagcctggaagcacccccggaagtgagtctggaagcactgccagaggtgagcgtggaagcagccccagaggggagcctggaagcacctcccaaggggagcgcagaagtagcccccaaggagagtgtgaaagggtcacccaaggagagcatggaggcatctcctgaggcgatggtgaaagcatcccccaagacatcccttgaagcaagcatggaagcatctcccaaggcaaaagcgagagacgctccaaagaaatcagaaatggacaaacaggccttaatccctattgccaagaagcgtctatcatcatacactgagtgttataaatggtcatcatctcctgaaaatgcttgtggtctgccgtctcccatcagcactaacaggcaaatccaaaagaactgccctccatcaccattaccacttatttcaaaacagtcaccacagacttcttttccttataaaataatgcctattcaacacaccctgtctgtgcaaagtgcatcaagtactgtcaaaaagaaaaaagaaacagtttctaaaaccactaacagatgtgaggctttgagccaaaggcatatgatctatgaagagtctggtaataagagtactgcaggtattatgaatgccgaggcggcaacaaaaattttgacagaattgcgccgccttgctgatgatggcggacggcgccgcagctggcgctggcggcagcccatccttgagagagctgcgggcacggatggttgctgcagcaaacgagattgctaaggaaaggaggaagcaagatgtggttaatcgtgttgcaacccattcctcaaatataagatcgacatttaaaccagtaatcgatggatccatgcttaaaaatgacataaaacaaagattagcaagagagcgcagagaggagaaaaggagacagcaagacgccaataaagaaacacaactacttgaaaaagaaagaaagaccaagctccaatatgaaaaacagatggaggaaagacagagaaagctgaaggagcgaaaagagaaagaagaacaacggagaatagctgcagaagaagacaccagaaggatgaagcacaaaaggantttacagccnttcttttcgtctttggaacggaggagacttgctgatgatatcaaccaaaaagatggtcctggggaggcttctgcatggcgaattttgagagcaaaactgccaattaacaactgctctaccgaa

SEQ ID NO: 432736 - DNA, 2838 bp, Homo sapiens
gtacattatttcattttggaacaagtaggtgttaaaaagaaacaaaatgcttctgctgttgttgggggtgcagtttgaacaaaatctgttagataatcacctatagtttgcttgtgatttataaattttggactacgcacatatatatatattttaatgttttggattgtgttgcacttctttgttggagtgagagttgattagctctcttaactgttgcacatatttatttaaactagagtctggtaataagagtactgcaggtattatgaatgccgaggcggcaacaaaaattttgacagaattgcgccgccttgctcgtgaacaaagagaaaaagaggaagaagaaagacaacgggaagaaatgcagcaaagggtcattaagaaatcaaaagacatggcaaaggaagcagttggaggccaagcagaagaccacttgaaactcaaagatgggcagcaacaaaatgagactaaaaagaagaaaggatggctggatcaggaagaccaggaagcaccactgcagaaaggggacgccaaaataaaagctcaagaggaagctgacaaacgcaagaaagaacacgagagaattatgttacaaaatttacaagaacggttagaaaggaaaaagagaatagaagaaattatgaagcggacaagaaagacagatgtgaatgcctcaaaggtcacagaaacatccagccatgacatatatgaagaggctgaggctgacaacgaagaaagcgacaaggactcattgaatgaaatgtttccatcagccattctaaatggcacaggctcacctaccaaatttaaaatgccgttcaacaatgccaagaaaatgacacacaagctggtatttctagaagatggtaccagccaggtccgtaaagagccaaaaacatattttaatggcgatttgaaaaacttcagacaaaaaagcatgaaagacacttcaatacaggaagtagtttcaagaccatcttccaaaagaatgaccagtcacacaacgaaaaccagaaaggcggatgaaaccaacaccaccagcagatcctctgcacaaacaaaatctgaaggattccatgacatcttgccaaagtcctcagacacctttagacaataagagaagaagcaaacctgtttctcctcatttggatatgtaaaccttactcagcctgggagatgaatacatcttccactctggataactcaactcctgggcccatcagtcctcaaatttttctgcttctgacttgaacctggtaaaggaagtgacaccgaaaaattgaaagaaactgtcaaaaggccactttgatgtatatctcagatgttaaagtcatcttattctcttgtgtctaagcaagagttctaagtaaagagtggtttttgttttctttggaaaatcatcattgtctctcattcttgtgttgtcccaccaatgtgtttgctggagtgagtgcatcaaggatgctttcctgaaactgtaactgtggagtttctagaagaatctgattgcagaactaattctctttcagtatatatttgaaatcttaaagtaatgctttttctttttctttttcttttttttttttttgagacggagtcttgccctgtcgcccaggctgcagtgcagtggcacaatctcggctcactgcaacctccgcctcctcatctcaagcaattctcctgtctcagtctccccagtagctgggattacaggcatgtgccaccacacctggctaatttttttgtattttagtagagatagggttttaccatgttcaccaggctagtctcgaaatcctggcctcaagagatccacccgtcttggcctcccaaagtgttgggattacaggtgtgagccactgcacccagccaagtaatgctttttctgtgtaccagtgacaattttgacagctaaaaactcacagttgatcttgtagagaacataatagattatgcaagggccgcaggatcgctcacaagagctgtcagattgtttctaatataaaaataccaaaggttgcaaaatccagcaaattgtattttactgtgatatatgtatatttttaactctacccatctgtgccagtgagtacacaggcactaataacctgaaatgctgggagtcctgtaaagccccatcttggaacagtcagcacctttcatgctcttgtcagtgtttccttttgaagggcatattggtgtttatctacagaaacatatattatttttattgtgtacataaaggagtatatggctgttgtcccgtggggtatgtttaattcctctaaatgtttaaagtacttttctgcctgtactctccagttctgtcgttgagtatacactcaggcttgagatacaaccaaaatttgcttgcctttctctagccactggctgccagtgagttcgtgtgatgggcacacagaaatgcacacagatgtacatacacgtatgtatgcacacacagtatatgattccataaaattcaaatgcagattaattctcctaatgagttttcagtgttgaatcgtaaatagtctgaagcaggccagtgttccttttggctgccagtcttggattagtaaaaggaggtaattctttcagattccctggttctttgccactcagagtattgtacttttgatatagaatagagaaggttacctttggtttaaaaactatttttatatactagctctttcatgtataaaacagagacaatcatcctaacaaaagagttcctgttatttttctgcacaaatgtcttgtgttgaaacactgttacagttccatataaatgtgtgctatataaaataaactttggagataaaaaaaagg

SEQ ID NO: 432737 - DNA, 901 bp, Homo sapiens
accggcagcccggccacgacccaagcggaggccgcgccgacgcctgcgcaatgtatgcggagagccaccaccgcctccggtcccgactccgatgatggcggacggcgccgcagctggcgctggcggcagcccatccttgagagagctgcgggcacggatggttgctgcagcaaacgagattgctaaggaaaggaggaagcaagatgtggttaatcgtgttgcaacccattcctcaaatataagatcgacatttaaaccagtaatcgatggatccatgcttaaaaatgacataaaacaaagattagcaagagagcgcagagaggagaaaaggagacagcaagacgccaataaagaaacacaactacttgaaaaagaaagaaagaccaagctccaatatgaaaaacagatggaggaaagacagagaaagctgaaggagcgaaaagagaaagaagaacaacggagaatagctgcagaagaaaaaagacaccagaaggatgaagcacaaaaggaaaaatttacagccattctttatcgtactttggaacggaggagacttgctgatgattatcagcaaaaaaagatggtcatggggaggctctgcaatggcgaattctgagagcaaaactgccaataaacgatctgcatctactgaaaaacttgaacagggtacttctgctttaatcagacaaatgcctttgtcatctgcaggccttcaaaattccgttgccaaaaggaaaacagacaaggagagaagctcatctttaaatagaagagatagtaacctacattcgtctactgataaagaacaagccgaaaggaagccacgtggttagttacttctaatacaaattttaaatagtgatttaaaagaggtattttatgtcaacattgaattgcttga

SEQ ID NO: 432738 - DNA, 387 bp, Homo sapiens
tctagagacttgctacttgaagttgaagctgcagttaagtttatagggtgccaagtgctcatttaatcctctcaatagccctacaagaaaggtgttgtagcattccagatgaggaacagttgcacagagcagttaagtaagtttcccaagatcagaccactaataagtggcagagttaggatttgagcccaggaagtctggctccggagtccatgtctttaactgtcacactctgctggttgagaagctgagcaccaagctcctaaggaagaggccggctaagatgggcagagttcttatccatacctgcactcacaccctggcttcagactcccccaaaactgattcagcaaactaatctgaaagtagcttcctgtcacccaccca

SEQ ID NO: 432739 - DNA, 399 bp, Homo sapiens
  misc_feature (50)..(50): n is a, c, g, or t
cccccccccccccccaacttccacctcccaggttcaagcgattctcctgnctcaaaaaaaaagaaaagacagtagcatatgttcatgtcaagcacctctcatcacagtcgagttccaaggaaaaattccagcgttttctgcattgggtgctgtgtcatctgaaatcggcacattccatggaggaaggagtcctgctttgttgcatgtatcctagggtttaatgttggtaaatgagtcactctagcatttgtagaaggctccctgagactcctgcagcagtcgaccaagcccaaggacataattgaatctggagagtcctggggccttgttttgaaaaagacttgaaatacacataggaagaaaggcataaaaataaatgttcacttgtctctgctgtga

SEQ ID NO: 432740 - DNA, 294 bp, Homo sapiens
  misc_feature (2)..(2): n is a, c, g, or t
gnccgcttgtgatgaaactgtaacttacaagaaaagggctgggttttgaaaataacacaggctctaaaaaccctaagaagcggtgcaacttttggcaggaatcggggttagcgggacctcaagggctcactgcggctaagtgaacgctgactggtcctccagcgtgagctagaacagaccaagcccaaggacataattgaatctggagagtcctggggccttgttttgaaaaagacttgaaatacacataggaagaaaggcataaaaataaatgttcacttgtctctgctgtga

SEQ ID NO: 432741 - DNA, 492 bp, Homo sapiens
gcggccgcctactactactactgctcgaattcaagcttctaagatgtacggggacatgatggttaaagggattaaacaaaacaatagtttgtaatttattctgtcagagcaaactgctggtaaataaaagggactaagttgacgaaaaataaattttaaaaaacctaataaaacaagtttgtaatttataattgtatacaaataaaagatgttacaaaaattgcgcacttatatgtatgtaccatgacataactaattcgttgaacaagttgtgagacaatcctttctgagaaaaggtagacctgttacatcgtctgtgggttagggtcatgtcagcacgtaccaggtacattctagcttttgtagagaaagtaaaatctagtgttgagtatgtaggcactgagccaggtggcctgcttaacataaaaggactgatttcagggtggctgtgggagcctttctaatgctctaattctctagccccttgcctga

SEQ ID NO: 432742 - DNA, 4426 bp, Homo sapiens
  misc_feature (2)..(2): n is a, c, g, or t
  misc_feature (2979)..(2979): n is a, c, g, or t
gnccgcttgtgatgaaactgtaacttacaagaaaagggctgggttttgaaaataacacaggctctaaaaaccctaagaagcggtgcaacttttggcaggaatcggggttagcgggacctcaagggctcactgcggctaagtgaacgctgactggtcctccagcgtgagctagaacagacgtctctatggtcaagtaaacagagcgtgtgctgtcttccccatgtggtggggttgcgcatgatcagtagctgcaccactagaaagatggcggagcaagagcaaagaaaaatccctttggttccagaaaatctcctgaaaaagaggaaggcttatcaagccctcaaagccacccaggcaaagcaggcacttttggcaaagaaggagcagaagaaaggaaaagggctcaggtttaagcgactggaatcattcctacatgattcctggcggcagaaacgtgacaaggtgcgtctcagacgactagaagtgaaacctcatgccttggaattgccagataaacattccttggcctttgttgtacgcatcgaaaggattgacggcgtgagtttactggtgcagagaaccattgcaagacttcgcctaaagaaaatttttagtggtgtctttgtaaaagtcaccccccagaatctaaaaatgctgcgtatagtggaaccttatgtgacctggggatttccaaatctgaagtctgtccgagaactcattttgaaacgtggacaagccaaggtcaagaataagaccatccctctgacagacaatacagtgattgaggagcacctggggaagttggcgtcatttgcttggaagacctcattcatgaaattgccttcccagggaagcatttccaggagatctcatggttcttgtgccctttccacctctcagtggcccgtcatgctaccaaaaatagagtgggcttcctcaaggagatgggcacacctggctatcggggtgaacgcatcaatcagctcatccgtcagctgaactagacccaggtgaggcagggctgaaaactgcccttgggctgacttttgataggccatgccttgccactttacaagttctttttgcatttactagtatttaagagtaaccttgagattgggaggaatagaggaggctggtacaaatagatggagacctgctgggatcagtgaatgcctgattaggacatggggctatgcatagcctaagagttataggcttaaagatgtcgagtaactaaaaactgtattgctggccgggcgcggtggctcacgcctgtaatcccagcactttgggaggccaaggcgggcagaccatgaggtcaggagattgagaccatcctggccaacatggtgaaaccctgtctctactaaaaatacaaaaatgagctgggtgtggtggcgcgtgcctgtagtcccagctactcgagaggctaaggcaggaaaatcgcttgaacccaggaggcagagattgcagtgagccaagattgcaccagtgcactccagctgggcgacagagcgagactccatctcggaaaaaaaaaaaaaaaaaaactattgctgcagtcattcagatggaaatgaggaaagaataatattaataactgatttcaaaaaggacttgaagatgtgaatcatctattttgctgaagaaatcttaactctttgaaattactttttattgctgttgtcatactcttaggtgccaaactgcggtaaattttttatcagtgaagtggaagcatgtgttttgttttggaaatttttatcaagtatcttcagagaagattatttcctgctttatcttcagaaactggaaagggtcaaagaaaagacagtagctggccggtcgtggtggctcatgcctgtaatcccaacacttagggaggctgaggtgggcagatcacctgaggttgggagttcgagaccagcctgaccaacatggagaaatgccatctctactaaaaatacaaaaattagccgggcatggtggcacgtgcctgtaatcccagctactcaggaggctgaggcaggagaatcgcttgaacctgggaggtggaagttgcagtgagctgagatcacgccattgcactccagcctgggcaacaagcgaaactctgtctcaaaaaaaaagaaaagacagtagcatatgttcatgtcaagcacctctcatcacagtcgagttccaaggaaaaattccagcgttttctgcattgggtgctgtgtcatctgaaatcggcacattccatggaggaaggagtcctgctttgttgcatgtatcctagggtttaatgttggtaaatgagtcactctagcatttgtagaaggctccctgagactcctgcagcagtcgaccaagcccaaggacataattgaatctggagagtcctggggccttgttttgaaaaagacttgaaatacacataggaagaaaggcataaaaataaatgttcacttgtctctgctgtgagtatgtgttccaacttttcagtgatggctttgagaattctcaaacttgactggctctaagtgtatctggtggctttgtatcgtaacctgaaactggcttagtactttttcctaaaagctcaggatttgagaatgaggaccccttcgccaggaaaacatgtatacactcaaaattttgcttgcagttctagggtgtttagacccttctcagatacctgtgcatcttatgggttttgtttttctctttgagacagtctcaccctgttgcccaggctggagcgcagtggcgtgatctcggctcattgcagcctccacctcctgggttcaagtgattctgcctcagccccttgatcagctgggattgcatgcatgtaccaccacacccggctaattcttgtatttttagtagagatggagacagagtttcaccatgtaggccaggctggtctcgaactcctgacctcaagtgatccacaagcctgggcctcccaaagtgctgggattacaggcntgagcaactgcgcccagctcttgtgtaccttatgtgaggaagtcctgctcaatcaggatcggtcacgcaggccctgatcttgctactctggttccatgtcctatggaagaccaaagtttaccaagatagatttttcccttcatagtggcagatagtgttaacccctgcaccatctgtaactcagaaatccccaccatttcttcccctgggcttcagaatagaattgcctggtttctctgatgatcagcatggttccttaaaacccaaatcagcaaggaatgaacaattttgtttggcatggatgaaattagcactgtttggctcgttaggccccaggcaggcaggcaccttaattttttccttgcatattctagtcttcagaagcattgccttttgtcctactggtagtgacatagaccaataacagggcatctggggattttaatcctgaaaacagtgagtctgatactgcttgtgtttttcatcagtgtccaccccaagtgggtcttcctgctattctcttcacttagttgcccctcacttgccatctgagcaattggcaaggatgtgccaggcctaggttaaacttggaaacatgcttgaccattctattccctggtcctttaagatcagtttggctgcaattttggctccttggaccctcaagcatagctggtaaatcaagttagagatgtaactgccttaaaacatgccagcttaggctgggcacggtggctcacgcctgtaatctcaacacttcaggaggctgaggcaggcagatcacttgaggtcaggagttcgagaccagcctgaccaacatggagaaattctgtccctactgaaaatacaaaattagccggatgtggtggtgcatgcctgtaatcccagctacttgggaggctgaggcaagagaattgcttgaacccagggaggcagaggttgcagtgagccgagatcacaccattgcactccaccttgggcaacaaaagcaaaactctgtctcaaaaaaaaaaaaaaaaaaagtgccagcgtatgaggtaattagattggttctctccagaggtaacctgccaagaagagatgctatagatgttactcctatactgtaaaacattgtgaaatcagattactttaaaatgatgtattacaaagttatgcaaaaaagcagttgtgactatggaagcccaaggcttatatcccagctctgtcttacactaaatatgggtacagtgtttccactctgtccataaaatgggagctaatattctccaacctgtgtgcctgacatgatggttaaagggattaaacaaaacaatagtttgtaatttattctgtcagagcaaactgctggtaaataaaagggactaagttgacgaaaaataaattttaaaaaacctaataaaacaagtttgtaatttataattgtatacaaataaaagatgttaca

SEQ ID NO: 432743 - DNA, 4702 bp, Homo sapiens
  misc_feature (2)..(2): n is a, c, g, or t
  misc_feature (2979)..(2979): n is a, c, g, or t
gnccgcttgtgatgaaactgtaacttacaagaaaagggctgggttttgaaaataacacaggctctaaaaaccctaagaagcggtgcaacttttggcaggaatcggggttagcgggacctcaagggctcactgcggctaagtgaacgctgactggtcctccagcgtgagctagaacagacgtctctatggtcaagtaaacagagcgtgtgctgtcttccccatgtggtggggttgcgcatgatcagtagctgcaccactagaaagatggcggagcaagagcaaagaaaaatccctttggttccagaaaatctcctgaaaaagaggaaggcttatcaagccctcaaagccacccaggcaaagcaggcacttttggcaaagaaggagcagaagaaaggaaaagggctcaggtttaagcgactggaatcattcctacatgattcctggcggcagaaacgtgacaaggtgcgtctcagacgactagaagtgaaacctcatgccttggaattgccagataaacattccttggcctttgttgtacgcatcgaaaggattgacggcgtgagtttactggtgcagagaaccattgcaagacttcgcctaaagaaaatttttagtggtgtctttgtaaaagtcaccccccagaatctaaaaatgctgcgtatagtggaaccttatgtgacctggggatttccaaatctgaagtctgtccgagaactcattttgaaacgtggacaagccaaggtcaagaataagaccatccctctgacagacaatacagtgattgaggagcacctggggaagttggcgtcatttgcttggaagacctcattcatgaaattgccttcccagggaagcatttccaggagatctcatggttcttgtgccctttccacctctcagtggcccgtcatgctaccaaaaatagagtgggcttcctcaaggagatgggcacacctggctatcggggtgaacgcatcaatcagctcatccgtcagctgaactagacccaggtgaggcagggctgaaaactgcccttgggctgacttttgataggccatgccttgccactttacaagttctttttgcatttactagtatttaagagtaaccttgagattgggaggaatagaggaggctggtacaaatagatggagacctgctgggatcagtgaatgcctgattaggacatggggctatgcatagcctaagagttataggcttaaagatgtcgagtaactaaaaactgtattgctggccgggcgcggtggctcacgcctgtaatcccagcactttgggaggccaaggcgggcagaccatgaggtcaggagattgagaccatcctggccaacatggtgaaaccctgtctctactaaaaatacaaaaatgagctgggtgtggtggcgcgtgcctgtagtcccagctactcgagaggctaaggcaggaaaatcgcttgaacccaggaggcagagattgcagtgagccaagattgcaccagtgcactccagctgggcgacagagcgagactccatctcggaaaaaaaaaaaaaaaaaaactattgctgcagtcattcagatggaaatgaggaaagaataatattaataactgatttcaaaaaggacttgaagatgtgaatcatctattttgctgaagaaatcttaactctttgaaattactttttattgctgttgtcatactcttaggtgccaaactgcggtaaattttttatcagtgaagtggaagcatgtgttttgttttggaaatttttatcaagtatcttcagagaagattatttcctgctttatcttcagaaactggaaagggtcaaagaaaagacagtagctggccggtcgtggtggctcatgcctgtaatcccaacacttagggaggctgaggtgggcagatcacctgaggttgggagttcgagaccagcctgaccaacatggagaaatgccatctctactaaaaatacaaaaattagccgggcatggtggcacgtgcctgtaatcccagctactcaggaggctgaggcaggagaatcgcttgaacctgggaggtggaagttgcagtgagctgagatcacgccattgcactccagcctgggcaacaagcgaaactctgtctcaaaaaaaaagaaaagacagtagcatatgttcatgtcaagcacctctcatcacagtcgagttccaaggaaaaattccagcgttttctgcattgggtgctgtgtcatctgaaatcggcacattccatggaggaaggagtcctgctttgttgcatgtatcctagggtttaatgttggtaaatgagtcactctagcatttgtagaaggctccctgagactcctgcagcagtcgaccaagcccaaggacataattgaatctggagagtcctggggccttgttttgaaaaagacttgaaatacacataggaagaaaggcataaaaataaatgttcacttgtctctgctgtgagtatgtgttccaacttttcagtgatggctttgagaattctcaaacttgactggctctaagtgtatctggtggctttgtatcgtaacctgaaactggcttagtactttttcctaaaagctcaggatttgagaatgaggaccccttcgccaggaaaacatgtatacactcaaaattttgcttgcagttctagggtgtttagacccttctcagatacctgtgcatcttatgggttttgtttttctctttgagacagtctcaccctgttgcccaggctggagcgcagtggcgtgatctcggctcattgcagcctccacctcctgggttcaagtgattctgcctcagccccttgatcagctgggattgcatgcatgtaccaccacacccggctaattcttgtatttttagtagagatggagacagagtttcaccatgtaggccaggctggtctcgaactcctgacctcaagtgatccacaagcctgggcctcccaaagtgctgggattacaggcntgagcaactgcgcccagctcttgtgtaccttatgtgaggaagtcctgctcaatcaggatcggtcacgcaggccctgatcttgctactctggttccatgtcctatggaagaccaaagtttaccaagatagatttttcccttcatagtggcagatagtgttaacccctgcaccatctgtaactcagaaatccccaccatttcttcccctgggcttcagaatagaattgcctggtttctctgatgatcagcatggttccttaaaacccaaatcagcaaggaatgaacaattttgtttggcatggatgaaattagcactgtttggctcgttaggccccaggcaggcaggcaccttaattttttccttgcatattctagtcttcagaagcattgccttttgtcctactggtagtgacatagaccaataacagggcatctggggattttaatcctgaaaacagtgagtctgatactgcttgtgtttttcatcagtgtccaccccaagtgggtcttcctgctattctcttcacttagttgcccctcacttgccatctgagcaattggcaaggatgtgccaggcctaggttaaacttggaaacatgcttgaccattctattccctggtcctttaagatcagtttggctgcaattttggctccttggaccctcaagcatagctggtaaatcaagttagagatgtaactgccttaaaacatgccagcttaggctgggcacggtggctcacgcctgtaatctcaacacttcaggaggctgaggcaggcagatcacttgaggtcaggagttcgagaccagcctgaccaacatggagaaattctgtccctactgaaaatacaaaattagccggatgtggtggtgcatgcctgtaatcccagctacttgggaggctgaggcaagagaattgcttgaacccagggaggcagaggttgcagtgagccgagatcacaccattgcactccaccttgggcaacaaaagcaaaactctgtctcaaaaaaaaaaaaaaaaaaagtgccagcgtatgaggtaattagattggttctctccagaggtaacctgccaagaagagatgctatagatgttactcctatactgtaaaacattgtgaaatcagattactttaaaatgatgtattacaaagttatgcaaaaaagcagttgtgactatggaagcccaaggcttatatcccagctctgtcttacactaaatatgggtacagtgtttccactctgtccataaaatgggagctaatattctccaacctgtgtgcctgacatgatggttaaagggattaaacaaaacaatagtttgtaatttattctgtcagagcaaactgctggtaaataaaagggactaagttgacgaaaaataaattttaaaaaacctaataaaacaagtttgtaatttataattgtatacaaataaaagatgttacaaaaattgcgcacttatatgtatgtaccatgacataactaattcgttgaacaagttgtgagacaatcctttctgagaaaaggtagacctgttacatcgtctgtgggttagggtcatgtcagcacgtaccaggtacattctagcttttgtagagaaagtaaaatctagtgttgagtatgtaggcactgagccaggtggcctgcttaacataaaaggactgatttcagggtggctgtgggagcctttctaatgctctaattctctagccccttgcctga

SEQ ID NO: 432744 - DNA, 4320 bp, Homo sapiens
  misc_feature (2)..(2): n is a, c, g, or t
  misc_feature (2873)..(2873): n is a, c, g, or t
gnccgcttgtgatgaaactgtaacttacaagaaaagggctgggttttgaaaataacacaggctctaaaaaccctaagaagcggtgcaacttttggcaggaatcggggttagcgggacctcaagggctcactgcggctaagtgaacgctgactggtcctccagcgtgagctagaacagacgtctctatggtcaagtaaacagagcgtgtgctgtcttccccatgtggtggggttgcgcatgatcagtagctgcaccactagaaagatggcggagcaagacagaagaaaggaaaagggctcaggtttaagcgactggaatcattcctacatgattcctggcggcagaaacgtgacaaggtgcgtctcagacgactagaagtgaaacctcatgccttggaattgccagataaacattccttggcctttgttgtacgcatcgaaaggattgacggcgtgagtttactggtgcagagaaccattgcaagacttcgcctaaagaaaatttttagtggtgtctttgtaaaagtcaccccccagaatctaaaaatgctgcgtatagtggaaccttatgtgacctggggatttccaaatctgaagtctgtccgagaactcattttgaaacgtggacaagccaaggtcaagaataagaccatccctctgacagacaatacagtgattgaggagcacctggggaagttggcgtcatttgcttggaagacctcattcatgaaattgccttcccagggaagcatttccaggagatctcatggttcttgtgccctttccacctctcagtggcccgtcatgctaccaaaaatagagtgggcttcctcaaggagatgggcacacctggctatcggggtgaacgcatcaatcagctcatccgtcagctgaactagacccaggtgaggcagggctgaaaactgcccttgggctgacttttgataggccatgccttgccactttacaagttctttttgcatttactagtatttaagagtaaccttgagattgggaggaatagaggaggctggtacaaatagatggagacctgctgggatcagtgaatgcctgattaggacatggggctatgcatagcctaagagttataggcttaaagatgtcgagtaactaaaaactgtattgctggccgggcgcggtggctcacgcctgtaatcccagcactttgggaggccaaggcgggcagaccatgaggtcaggagattgagaccatcctggccaacatggtgaaaccctgtctctactaaaaatacaaaaatgagctgggtgtggtggcgcgtgcctgtagtcccagctactcgagaggctaaggcaggaaaatcgcttgaacccaggaggcagagattgcagtgagccaagattgcaccagtgcactccagctgggcgacagagcgagactccatctcggaaaaaaaaaaaaaaaaaaactattgctgcagtcattcagatggaaatgaggaaagaataatattaataactgatttcaaaaaggacttgaagatgtgaatcatctattttgctgaagaaatcttaactctttgaaattactttttattgctgttgtcatactcttaggtgccaaactgcggtaaattttttatcagtgaagtggaagcatgtgttttgttttggaaatttttatcaagtatcttcagagaagattatttcctgctttatcttcagaaactggaaagggtcaaagaaaagacagtagctggccggtcgtggtggctcatgcctgtaatcccaacacttagggaggctgaggtgggcagatcacctgaggttgggagttcgagaccagcctgaccaacatggagaaatgccatctctactaaaaatacaaaaattagccgggcatggtggcacgtgcctgtaatcccagctactcaggaggctgaggcaggagaatcgcttgaacctgggaggtggaagttgcagtgagctgagatcacgccattgcactccagcctgggcaacaagcgaaactctgtctcaaaaaaaaagaaaagacagtagcatatgttcatgtcaagcacctctcatcacagtcgagttccaaggaaaaattccagcgttttctgcattgggtgctgtgtcatctgaaatcggcacattccatggaggaaggagtcctgctttgttgcatgtatcctagggtttaatgttggtaaatgagtcactctagcatttgtagaaggctccctgagactcctgcagcagtcgaccaagcccaaggacataattgaatctggagagtcctggggccttgttttgaaaaagacttgaaatacacataggaagaaaggcataaaaataaatgttcacttgtctctgctgtgagtatgtgttccaacttttcagtgatggctttgagaattctcaaacttgactggctctaagtgtatctggtggctttgtatcgtaacctgaaactggcttagtactttttcctaaaagctcaggatttgagaatgaggaccccttcgccaggaaaacatgtatacactcaaaattttgcttgcagttctagggtgtttagacccttctcagatacctgtgcatcttatgggttttgtttttctctttgagacagtctcaccctgttgcccaggctggagcgcagtggcgtgatctcggctcattgcagcctccacctcctgggttcaagtgattctgcctcagccccttgatcagctgggattgcatgcatgtaccaccacacccggctaattcttgtatttttagtagagatggagacagagtttcaccatgtaggccaggctggtctcgaactcctgacctcaagtgatccacaagcctgggcctcccaaagtgctgggattacaggcntgagcaactgcgcccagctcttgtgtaccttatgtgaggaagtcctgctcaatcaggatcggtcacgcaggccctgatcttgctactctggttccatgtcctatggaagaccaaagtttaccaagatagatttttcccttcatagtggcagatagtgttaacccctgcaccatctgtaactcagaaatccccaccatttcttcccctgggcttcagaatagaattgcctggtttctctgatgatcagcatggttccttaaaacccaaatcagcaaggaatgaacaattttgtttggcatggatgaaattagcactgtttggctcgttaggccccaggcaggcaggcaccttaattttttccttgcatattctagtcttcagaagcattgccttttgtcctactggtagtgacatagaccaataacagggcatctggggattttaatcctgaaaacagtgagtctgatactgcttgtgtttttcatcagtgtccaccccaagtgggtcttcctgctattctcttcacttagttgcccctcacttgccatctgagcaattggcaaggatgtgccaggcctaggttaaacttggaaacatgcttgaccattctattccctggtcctttaagatcagtttggctgcaattttggctccttggaccctcaagcatagctggtaaatcaagttagagatgtaactgccttaaaacatgccagcttaggctgggcacggtggctcacgcctgtaatctcaacacttcaggaggctgaggcaggcagatcacttgaggtcaggagttcgagaccagcctgaccaacatggagaaattctgtccctactgaaaatacaaaattagccggatgtggtggtgcatgcctgtaatcccagctacttgggaggctgaggcaagagaattgcttgaacccagggaggcagaggttgcagtgagccgagatcacaccattgcactccaccttgggcaacaaaagcaaaactctgtctcaaaaaaaaaaaaaaaaaaagtgccagcgtatgaggtaattagattggttctctccagaggtaacctgccaagaagagatgctatagatgttactcctatactgtaaaacattgtgaaatcagattactttaaaatgatgtattacaaagttatgcaaaaaagcagttgtgactatggaagcccaaggcttatatcccagctctgtcttacactaaatatgggtacagtgtttccactctgtccataaaatgggagctaatattctccaacctgtgtgcctgacatgatggttaaagggattaaacaaaacaatagtttgtaatttattctgtcagagcaaactgctggtaaataaaagggactaagttgacgaaaaataaattttaaaaaacctaataaaacaagtttgtaatttataattgtatacaaataaaagatgttaca

SEQ ID NO: 432745 - DNA, 4283 bp, Homo sapiens
  misc_feature (2)..(2): n is a, c, g, or t
  misc_feature (2836)..(2836): n is a, c, g, or t
gnccgcttgtgatgaaactgtaacttacaagaaaagggctgggttttgaaaataacacaggctctaaaaaccctaagaagcggtgcaacttttggcaggaatcggggttagcgggacctcaagggctcactgcggctaagtgaacgctgactggtcctccagcgtgagctagaacagacgtctctatggtcaagtaaacagagcgtgtgctgtcttccccatgtggtggggttgcgcatgatcagtagctgcaccactagaaagatggcggagcaagagcaaagaaaaatccctttggttccagaaaatctcctgaaaaagaggaaggcttatcaagccctcaaagccacccaggcaaagcaggcacttttggcaaagaaggagcagaagaaaggaaaagggctcaggtttaagcgactggaatcattcctacatgattcctggcggcagaaacgtgacaaggtgcgtctcagacgactagaagtgaaacctcatgccttggaattgccagataaacattccttggcctttgttgtacgcatcgaaaggattgacggcgtgagtttactggtgcagagaaccattgcaagacttcgcctaaagaaaatttttagtggtgtctttgtaaaagtcaccccccagaatctaaaaatgctgcgtatagtggaaccttatgtgacctggggatttccaaatctgaagtctgtccgagaactcattttgaaacgtggacaagccaaggtcaagaataagaccatccctctgacagacaatacagtgattgaggagcacctggggaagttggcgtcatttgcttggaagacctcattcatgaaattgccttcccagggaagcatttccaggagatctcatggttcttgtgccctttccacctctcagtggcccgtcatgctaccaaaaatagagtgggcttcctcaaggagatgggcacacctggctatcggggtgaacgcatcaatcagctcatccgtcagctgaactagacccaggtgaggcagggctgaaaactgcccttgggctgacttttgataggccatgccttgccactttacaagttctttttgcatttactagtatttaagagtaaccttgagattgggaggaatagaggaggctggtacaaatagatggagacctgctgggatcagtgaatgcctgattaggacatggggctatgcatagcctaagagttataggcttaaagatgtcgagtaactaaaaactgtattgctggccgggcgcggtggctcacgcctgtaatcccagcactttgggaggccaaggcgggcagaccatgaggtcaggagattgagaccatcctggccaacatggtgaaaccctgtctctactaaaaatacaaaaatgagctgggtgtggtggcgcgtgcctgtagtcccagctactcgagaggctaaggcaggaaaatcgcttgaacccaggaggcagagattgcagtgagccaagattgcaccagtgcactccagctgggcgacagagcgagactccatctcggaaaaaaaaaaaaaaaaaaactattgctgcagtcattcagatggaaatgaggaaagaataatattaataactgatttcaaaaaggacttgaagatgtgaatcatctattttgctgaagaaatcttaactctttgaaattactttttattgctgttgtcatactcttaggtgccaaactgcggtaaattttttatcagtgaagtggaagcatgtgttttgttttggaaatttttatcaagtatcttcagagaagattatttcctgctttatcttcagaaactggaaagggtcaaagaaaagacagtagctggccggtcgtggtggctcatgcctgtaatcccaacacttagggaggctgaggtgggcagatcacctgaggttgggagttcgagaccagcctgaccaacatggagaaatgccatctctactaaaaatacaaaaattagccgggcatggtggcacgtgcctgtaatcccagctactcaggaggctgaggcaggagaatcgcttgaacctgggaggtggaagttgcagtgagctgagatcacgccattgcactccagcctgggcaacaagcgaaactctgtctcaaaaaaaaagaaaagacagtagcatatgttcatgtcaagcacctctcatcacagtcgagttccaaggaaaaattccagcgttttctgcattgggtgctgtgtcatctgaaatcggcacattccatggaggaaggagtcctgctttgttgcatgtatcctagggtttaatgttggtaaatgagtcactctagcatttgtagaaggctccctgagactcctgcagcagtcgaccaagcccaaggacataattgaatctggagagtcctggggccttgttttgaaaaagacttgaaatacacataggaagaaaggcataaaaataaatgttcacttgtctctgctgtgagtatgtgttccaacttttcagtgatggctttgagaattctcaaacttgactggctctaagtgtatctggtggctttgtatcgtaacctgaaactggcttagtactttttcctaaaagctcaggatttgagaatgaggaccccttcgccaggaaaacatgtatacactcaaaattttgcttgcagttctagggtgtttagacccttctcagatacctgtgcatcttatgggttttgtttttctctttgagacagtctcaccctgttgcccaggctggagcgcagtggcgtgatctcggctcattgcagcctccacctcctgggttcaagtgattctgcctcagccccttgatcaggggattacaggcntgagcaactgcgcccagctcttgtgtaccttatgtgaggaagtcctgctcaatcaggatcggtcacgcaggccctgatcttgctactctggttccatgtcctatggaagaccaaagtttaccaagatagatttttcccttcatagtggcagatagtgttaacccctgcaccatctgtaactcagaaatccccaccatttcttcccctgggcttcagaatagaattgcctggtttctctgatgatcagcatggttccttaaaacccaaatcagcaaggaatgaacaattttgtttggcatggatgaaattagcactgtttggctcgttaggccccaggcaggcaggcaccttaattttttccttgcatattctagtcttcagaagcattgccttttgtcctactggtagtgacatagaccaataacagggcatctggggattttaatcctgaaaacagtgagtctgatactgcttgtgtttttcatcagtgtccaccccaagtgggtcttcctgctattctcttcacttagttgcccctcacttgccatctgagcaattggcaaggatgtgccaggcctaggttaaacttggaaacatgcttgaccattctattccctggtcctttaagatcagtttggctgcaattttggctccttggaccctcaagcatagctggtaaatcaagttagagatgtaactgccttaaaacatgccagcttaggctgggcacggtggctcacgcctgtaatctcaacacttcaggaggctgaggcaggcagatcacttgaggtcaggagttcgagaccagcctgaccaacatggagaaattctgtccctactgaaaatacaaaattagccggatgtggtggtgcatgcctgtaatcccagctacttgggaggctgaggcaagagaattgcttgaacccagggaggcagaggttgcagtgagccgagatcacaccattgcactccaccttgggcaacaaaagcaaaactctgtctcaaaaaaaaaaaaaaaaaaagtgccagcgtatgaggtaattagattggttctctccagaggtaacctgccaagaagagatgctatagatgttactcctatactgtaaaacattgtgaaatcagattactttaaaatgatgtattacaaagttatgcaaaaaagcagttgtgactatggaagcccaaggcttatatcccagctctgtcttacactaaatatgggtacagtgtttccactctgtccataaaatgggagctaatattctccaacctgtgtgcctgacatgatggttaaagggattaaacaaaacaatagtttgtaatttattctgtcagagcaaactgctggtaaataaaagggactaagttgacgaaaaataaattttaaaaaacctaataaaacaagtttgtaatttataattgtatacaaataaaagatgttaca

SEQ ID NO: 432746 - DNA, 4542 bp, Homo sapiens
  misc_feature (2)..(2): n is a, c, g, or t
  misc_feature (3095)..(3095): n is a, c, g, or t
gnccgcttgtgatgaaactgtaacttacaagaaaagggctgggttttgaaaataacacaggctctaaaaaccctaagaagcggtgcaacttttggcaggaatcggggttagcgggacctcaagggctcactgcggctaagtgaacgctgactggtcctccagcgtgagctagaacagacgtctctatggtcaagtaaacagagcgtgtgctgtcttccccatgtggtggggttgcgcatgatcagtagctgcaccactagaaagatggcggagcaagagcaaagaaaaatccctttggttccagaaaatctcctgaaaaagaggaaggcttatcaagccctcaaagccacccaggcaaagcaggcacttttggcaaagaaggaggtaatggtggggaaccaagagaaagtaattagaatttttatttggtgagttttatcccgcatgtgttggactacatttggtattgacgagctccccccaacggtttgacagaccagcagaagaaaggaaaagggctcaggtttaagcgactggaatcattcctacatgattcctggcggcagaaacgtgacaaggtgcgtctcagacgactagaagtgaaacctcatgccttggaattgccagataaacattccttggcctttgttgtacgcatcgaaaggattgacggcgtgagtttactggtgcagagaaccattgcaagacttcgcctaaagaaaatttttagtggtgtctttgtaaaagtcaccccccagaatctaaaaatgctgcgtatagtggaaccttatgtgacctggggatttccaaatctgaagtctgtccgagaactcattttgaaacgtggacaagccaaggtcaagaataagaccatccctctgacagacaatacagtgattgaggagcacctggggaagttggcgtcatttgcttggaagacctcattcatgaaattgccttcccagggaagcatttccaggagatctcatggttcttgtgccctttccacctctcagtggcccgtcatgctaccaaaaatagagtgggcttcctcaaggagatgggcacacctggctatcggggtgaacgcatcaatcagctcatccgtcagctgaactagacccaggtgaggcagggctgaaaactgcccttgggctgacttttgataggccatgccttgccactttacaagttctttttgcatttactagtatttaagagtaaccttgagattgggaggaatagaggaggctggtacaaatagatggagacctgctgggatcagtgaatgcctgattaggacatggggctatgcatagcctaagagttataggcttaaagatgtcgagtaactaaaaactgtattgctggccgggcgcggtggctcacgcctgtaatcccagcactttgggaggccaaggcgggcagaccatgaggtcaggagattgagaccatcctggccaacatggtgaaaccctgtctctactaaaaatacaaaaatgagctgggtgtggtggcgcgtgcctgtagtcccagctactcgagaggctaaggcaggaaaatcgcttgaacccaggaggcagagattgcagtgagccaagattgcaccagtgcactccagctgggcgacagagcgagactccatctcggaaaaaaaaaaaaaaaaaaactattgctgcagtcattcagatggaaatgaggaaagaataatattaataactgatttcaaaaaggacttgaagatgtgaatcatctattttgctgaagaaatcttaactctttgaaattactttttattgctgttgtcatactcttaggtgccaaactgcggtaaattttttatcagtgaagtggaagcatgtgttttgttttggaaatttttatcaagtatcttcagagaagattatttcctgctttatcttcagaaactggaaagggtcaaagaaaagacagtagctggccggtcgtggtggctcatgcctgtaatcccaacacttagggaggctgaggtgggcagatcacctgaggttgggagttcgagaccagcctgaccaacatggagaaatgccatctctactaaaaatacaaaaattagccgggcatggtggcacgtgcctgtaatcccagctactcaggaggctgaggcaggagaatcgcttgaacctgggaggtggaagttgcagtgagctgagatcacgccattgcactccagcctgggcaacaagcgaaactctgtctcaaaaaaaaagaaaagacagtagcatatgttcatgtcaagcacctctcatcacagtcgagttccaaggaaaaattccagcgttttctgcattgggtgctgtgtcatctgaaatcggcacattccatggaggaaggagtcctgctttgttgcatgtatcctagggtttaatgttggtaaatgagtcactctagcatttgtagaaggctccctgagactcctgcagcagtcgaccaagcccaaggacataattgaatctggagagtcctggggccttgttttgaaaaagacttgaaatacacataggaagaaaggcataaaaataaatgttcacttgtctctgctgtgagtatgtgttccaacttttcagtgatggctttgagaattctcaaacttgactggctctaagtgtatctggtggctttgtatcgtaacctgaaactggcttagtactttttcctaaaagctcaggatttgagaatgaggaccccttcgccaggaaaacatgtatacactcaaaattttgcttgcagttctagggtgtttagacccttctcagatacctgtgcatcttatgggttttgtttttctctttgagacagtctcaccctgttgcccaggctggagcgcagtggcgtgatctcggctcattgcagcctccacctcctgggttcaagtgattctgcctcagccccttgatcagctgggattgcatgcatgtaccaccacacccggctaattcttgtatttttagtagagatggagacagagtttcaccatgtaggccaggctggtctcgaactcctgacctcaagtgatccacaagcctgggcctcccaaagtgctgggattacaggcntgagcaactgcgcccagctcttgtgtaccttatgtgaggaagtcctgctcaatcaggatcggtcacgcaggccctgatcttgctactctggttccatgtcctatggaagaccaaagtttaccaagatagatttttcccttcatagtggcagatagtgttaacccctgcaccatctgtaactcagaaatccccaccatttcttcccctgggcttcagaatagaattgcctggtttctctgatgatcagcatggttccttaaaacccaaatcagcaaggaatgaacaattttgtttggcatggatgaaattagcactgtttggctcgttaggccccaggcaggcaggcaccttaattttttccttgcatattctagtcttcagaagcattgccttttgtcctactggtagtgacatagaccaataacagggcatctggggattttaatcctgaaaacagtgagtctgatactgcttgtgtttttcatcagtgtccaccccaagtgggtcttcctgctattctcttcacttagttgcccctcacttgccatctgagcaattggcaaggatgtgccaggcctaggttaaacttggaaacatgcttgaccattctattccctggtcctttaagatcagtttggctgcaattttggctccttggaccctcaagcatagctggtaaatcaagttagagatgtaactgccttaaaacatgccagcttaggctgggcacggtggctcacgcctgtaatctcaacacttcaggaggctgaggcaggcagatcacttgaggtcaggagttcgagaccagcctgaccaacatggagaaattctgtccctactgaaaatacaaaattagccggatgtggtggtgcatgcctgtaatcccagctacttgggaggctgaggcaagagaattgcttgaacccagggaggcagaggttgcagtgagccgagatcacaccattgcactccaccttgggcaacaaaagcaaaactctgtctcaaaaaaaaaaaaaaaaaaagtgccagcgtatgaggtaattagattggttctctccagaggtaacctgccaagaagagatgctatagatgttactcctatactgtaaaacattgtgaaatcagattactttaaaatgatgtattacaaagttatgcaaaaaagcagttgtgactatggaagcccaaggcttatatcccagctctgtcttacactaaatatgggtacagtgtttccactctgtccataaaatgggagctaatattctccaacctgtgtgcctgacatgatggttaaagggattaaacaaaacaatagtttgtaatttattctgtcagagcaaactgctggtaaataaaagggactaagttgacgaaaaataaattttaaaaaacctaataaaacaagtttgtaatttataattgtatacaaataaaagatgttaca

SEQ ID NO: 432747 - DNA, 4408 bp, Homo sapiens
  misc_feature (2)..(2): n is a, c, g, or t
  misc_feature (2979)..(2979): n is a, c, g, or t
  misc_feature (4396)..(4396): n is a, c, g, or t
gnccgcttgtgatgaaactgtaacttacaagaaaagggctgggttttgaaaataacacaggctctaaaaaccctaagaagcggtgcaacttttggcaggaatcggggttagcgggacctcaagggctcactgcggctaagtgaacgctgactggtcctccagcgtgagctagaacagacgtctctatggtcaagtaaacagagcgtgtgctgtcttccccatgtggtggggttgcgcatgatcagtagctgcaccactagaaagatggcggagcaagagcaaagaaaaatccctttggttccagaaaatctcctgaaaaagaggaaggcttatcaagccctcaaagccacccaggcaaagcaggcacttttggcaaagaaggagcagaagaaaggaaaagggctcaggtttaagcgactggaatcattcctacatgattcctggcggcagaaacgtgacaaggtgcgtctcagacgactagaagtgaaacctcatgccttggaattgccagataaacattccttggcctttgttgtacgcatcgaaaggattgacggcgtgagtttactggtgcagagaaccattgcaagacttcgcctaaagaaaatttttagtggtgtctttgtaaaagtcaccccccagaatctaaaaatgctgcgtatagtggaaccttatgtgacctggggatttccaaatctgaagtctgtccgagaactcattttgaaacgtggacaagccaaggtcaagaataagaccatccctctgacagacaatacagtgattgaggagcacctggggaagttggcgtcatttgcttggaagacctcattcatgaaattgccttcccagggaagcatttccaggagatctcatggttcttgtgccctttccacctctcagtggcccgtcatgctaccaaaaatagagtgggcttcctcaaggagatgggcacacctggctatcggggtgaacgcatcaatcagctcatccgtcagctgaactagacccaggtgaggcagggctgaaaactgcccttgggctgacttttgataggccatgccttgccactttacaagttctttttgcatttactagtatttaagagtaaccttgagattgggaggaatagaggaggctggtacaaatagatggagacctgctgggatcagtgaatgcctgattaggacatggggctatgcatagcctaagagttataggcttaaagatgtcgagtaactaaaaactgtattgctggccgggcgcggtggctcacgcctgtaatcccagcactttgggaggccaaggcgggcagaccatgaggtcaggagattgagaccatcctggccaacatggtgaaaccctgtctctactaaaaatacaaaaatgagctgggtgtggtggcgcgtgcctgtagtcccagctactcgagaggctaaggcaggaaaatcgcttgaacccaggaggcagagattgcagtgagccaagattgcaccagtgcactccagctgggcgacagagcgagactccatctcggaaaaaaaaaaaaaaaaaaactattgctgcagtcattcagatggaaatgaggaaagaataatattaataactgatttcaaaaaggacttgaagatgtgaatcatctattttgctgaagaaatcttaactctttgaaattactttttattgctgttgtcatactcttaggtgccaaactgcggtaaattttttatcagtgaagtggaagcatgtgttttgttttggaaatttttatcaagtatcttcagagaagattatttcctgctttatcttcagaaactggaaagggtcaaagaaaagacagtagctggccggtcgtggtggctcatgcctgtaatcccaacacttagggaggctgaggtgggcagatcacctgaggttgggagttcgagaccagcctgaccaacatggagaaatgccatctctactaaaaatacaaaaattagccgggcatggtggcacgtgcctgtaatcccagctactcaggaggctgaggcaggagaatcgcttgaacctgggaggtggaagttgcagtgagctgagatcacgccattgcactccagcctgggcaacaagcgaaactctgtctcaaaaaaaaagaaaagacagtagcatatgttcatgtcaagcacctctcatcacagtcgagttccaaggaaaaattccagcgttttctgcattgggtgctgtgtcatctgaaatcggcacattccatggaggaaggagtcctgctttgttgcatgtatcctagggtttaatgttggtaaatgagtcactctagcatttgtagaaggctccctgagactcctgcagcagtcgaccaagcccaaggacataattgaatctggagagtcctggggccttgttttgaaaaagacttgaaatacacataggaagaaaggcataaaaataaatgttcacttgtctctgctgtgagtatgtgttccaacttttcagtgatggctttgagaattctcaaacttgactggctctaagtgtatctggtggctttgtatcgtaacctgaaactggcttagtactttttcctaaaagctcaggatttgagaatgaggaccccttcgccaggaaaacatgtatacactcaaaattttgcttgcagttctagggtgtttagacccttctcagatacctgtgcatcttatgggttttgtttttctctttgagacagtctcaccctgttgcccaggctggagcgcagtggcgtgatctcggctcattgcagcctccacctcctgggttcaagtgattctgcctcagccccttgatcagctgggattgcatgcatgtaccaccacacccggctaattcttgtatttttagtagagatggagacagagtttcaccatgtaggccaggctggtctcgaactcctgacctcaagtgatccacaagcctgggcctcccaaagtgctgggattacaggcntgagcaactgcgcccagctcttgtgtaccttatgtgaggaagtcctgctcaatcaggatcggtcacgcaggccctgatcttgctactctggttccatgtcctatggaagaccaaagtttaccaagatagatttttcccttcatagtggcagatagtgttaacccctgcaccatctgtaactcagaaatccccaccatttcttcccctgggcttcagaatagaattgcctggtttctctgatgatcagcatggttccttaaaacccaaatcagcaaggaatgaacaattttgtttggcatggatgaaattagcactgtttggctcgttaggccccaggcaggcaggcaccttaattttttccttgcatattctagtcttcagaagcattgccttttgtcctactggtagtgacatagaccaataacagggcatctggggattttaatcctgaaaacagtgagtctgatactgcttgtgtttttcatcagtgtccaccccaagtgggtcttcctgctattctcttcacttagttgcccctcacttgccatctgagcaattggcaaggatgtgccaggcctaggttaaacttggaaacatgcttgaccattctattccctggtcctttaagatcagtttggctgcaattttggctccttggaccctcaagcatagctggtaaatcaagttagagatgtaactgccttaaaacatgccagcttaggctgggcacggtggctcacgcctgtaatctcaacacttcaggaggctgaggcaggcagatcacttgaggtcaggagttcgagaccagcctgaccaacatggagaaattctgtccctactgaaaatacaaaattagccggatgtggtggtgcatgcctgtaatcccagctacttgggaggctgaggcaagagaattgcttgaacccagggaggcagaggttgcagtgagccgagatcacaccattgcactccaccttgggcaacaaaagcaaaactctgtctcaaaaaaaaaaaaaaaaaaagtgccagcgtatgaggtaattagattggttctctccagaggtaacctgccaagaagagatgctatagatgttactcctatactgtaaaacattgtgaaatcagattactttaaaatgatgtattacaaagttatgcaaaaaagcagttgtgactatggaagcccaaggcttatatcccagctctgtcttacactaaatatgggtacagtgtttccactctgtccataaaatgggagctaatattctccaacctgtgtgcctgacatgatggttaaagggattaaacaaaacaatagtttgtaatttattctgtcagagcaaactgctggtaaataaaagatgaaccacgtgacgaaatagaaaaagctacctatggagttgtgcccctactgccntgccatatgcaa

SEQ ID NO: 432748 - DNA, 4393 bp, Homo sapiens
  misc_feature (2946)..(2946): n is a, c, g, or t
atcacccaaaccagaaacctgtggattttgcatgtttatgagctctgtcctttgtagccctctaccactgctcatatttttcctgaactattgtattaaccttcctcctggatttccttgcctctagtgtcatactgtgatctgtcccatacactgcccttggtgattgtcagaaagaaatctggtctggtctcttctgcttaaaatcttcagtagcttttactgcccatagaagcacatccagcttccttagctggacatgtgtagacctacataccaccactccgcctacccctgaaacacacacaagttcaatttccatagcattccaggcactgctccacattatgaaaaggatctgttttcataaccgcctcccactaaactgagctctttaaggcatagtctctgtgtcttattccagattacccagtgtagtgacctcgcatgttgtgcttgctggactgacataaactggagggagtctgtctgacttctgttgctgttcatttcaggattgacggcgtgagtttactggtgcagagaaccattgcaagacttcgcctaaagaaaatttttagtggtgtctttgtaaaagtcaccccccagaatctaaaaatgctgcgtatagtggaaccttatgtgacctggggatttccaaatctgaagtctgtccgagaactcattttgaaacgtggacaagccaaggtcaagaataagaccatccctctgacagacaatacagtgattgaggagcacctggggaagttggcgtcatttgcttggaagacctcattcatgaaattgccttcccagggaagcatttccaggagatctcatggttcttgtgccctttccacctctcagtggcccgtcatgctaccaaaaatagagtgggcttcctcaaggagatgggcacacctggctatcggggtgaacgcatcaatcagctcatccgtcagctgaactagacccaggtgaggcagggctgaaaactgcccttgggctgacttttgataggccatgccttgccactttacaagttctttttgcatttactagtatttaagagtaaccttgagattgggaggaatagaggaggctggtacaaatagatggagacctgctgggatcagtgaatgcctgattaggacatggggctatgcatagcctaagagttataggcttaaagatgtcgagtaactaaaaactgtattgctggccgggcgcggtggctcacgcctgtaatcccagcactttgggaggccaaggcgggcagaccatgaggtcaggagattgagaccatcctggccaacatggtgaaaccctgtctctactaaaaatacaaaaatgagctgggtgtggtggcgcgtgcctgtagtcccagctactcgagaggctaaggcaggaaaatcgcttgaacccaggaggcagagattgcagtgagccaagattgcaccagtgcactccagctgggcgacagagcgagactccatctcggaaaaaaaaaaaaaaaaaaactattgctgcagtcattcagatggaaatgaggaaagaataatattaataactgatttcaaaaaggacttgaagatgtgaatcatctattttgctgaagaaatcttaactctttgaaattactttttattgctgttgtcatactcttaggtgccaaactgcggtaaattttttatcagtgaagtggaagcatgtgttttgttttggaaatttttatcaagtatcttcagagaagattatttcctgctttatcttcagaaactggaaagggtcaaagaaaagacagtagctggccggtcgtggtggctcatgcctgtaatcccaacacttagggaggctgaggtgggcagatcacctgaggttgggagttcgagaccagcctgaccaacatggagaaatgccatctctactaaaaatacaaaaattagccgggcatggtggcacgtgcctgtaatcccagctactcaggaggctgaggcaggagaatcgcttgaacctgggaggtggaagttgcagtgagctgagatcacgccattgcactccagcctgggcaacaagcgaaactctgtctcaaaaaaaaagaaaagacagtagcatatgttcatgtcaagcacctctcatcacagtcgagttccaaggaaaaattccagcgttttctgcattgggtgctgtgtcatctgaaatcggcacattccatggaggaaggagtcctgctttgttgcatgtatcctagggtttaatgttggtaaatgagtcactctagcatttgtagaaggctccctgagactcctgcagcagtcgaccaagcccaaggacataattgaatctggagagtcctggggccttgttttgaaaaagacttgaaatacacataggaagaaaggcataaaaataaatgttcacttgtctctgctgtgagtatgtgttccaacttttcagtgatggctttgagaattctcaaacttgactggctctaagtgtatctggtggctttgtatcgtaacctgaaactggcttagtactttttcctaaaagctcaggatttgagaatgaggaccccttcgccaggaaaacatgtatacactcaaaattttgcttgcagttctagggtgtttagacccttctcagatacctgtgcatcttatgggttttgtttttctctttgagacagtctcaccctgttgcccaggctggagcgcagtggcgtgatctcggctcattgcagcctccacctcctgggttcaagtgattctgcctcagccccttgatcagctgggattgcatgcatgtaccaccacacccggctaattcttgtatttttagtagagatggagacagagtttcaccatgtaggccaggctggtctcgaactcctgacctcaagtgatccacaagcctgggcctcccaaagtgctgggattacaggcntgagcaactgcgcccagctcttgtgtaccttatgtgaggaagtcctgctcaatcaggatcggtcacgcaggccctgatcttgctactctggttccatgtcctatggaagaccaaagtttaccaagatagatttttcccttcatagtggcagatagtgttaacccctgcaccatctgtaactcagaaatccccaccatttcttcccctgggcttcagaatagaattgcctggtttctctgatgatcagcatggttccttaaaacccaaatcagcaaggaatgaacaattttgtttggcatggatgaaattagcactgtttggctcgttaggccccaggcaggcaggcaccttaattttttccttgcatattctagtcttcagaagcattgccttttgtcctactggtagtgacatagaccaataacagggcatctggggattttaatcctgaaaacagtgagtctgatactgcttgtgtttttcatcagtgtccaccccaagtgggtcttcctgctattctcttcacttagttgcccctcacttgccatctgagcaattggcaaggatgtgccaggcctaggttaaacttggaaacatgcttgaccattctattccctggtcctttaagatcagtttggctgcaattttggctccttggaccctcaagcatagctggtaaatcaagttagagatgtaactgccttaaaacatgccagcttaggctgggcacggtggctcacgcctgtaatctcaacacttcaggaggctgaggcaggcagatcacttgaggtcaggagttcgagaccagcctgaccaacatggagaaattctgtccctactgaaaatacaaaattagccggatgtggtggtgcatgcctgtaatcccagctacttgggaggctgaggcaagagaattgcttgaacccagggaggcagaggttgcagtgagccgagatcacaccattgcactccaccttgggcaacaaaagcaaaactctgtctcaaaaaaaaaaaaaaaaaaagtgccagcgtatgaggtaattagattggttctctccagaggtaacctgccaagaagagatgctatagatgttactcctatactgtaaaacattgtgaaatcagattactttaaaatgatgtattacaaagttatgcaaaaaagcagttgtgactatggaagcccaaggcttatatcccagctctgtcttacactaaatatgggtacagtgtttccactctgtccataaaatgggagctaatattctccaacctgtgtgcctgacatgatggttaaagggattaaacaaaacaatagtttgtaatttattctgtcagagcaaactgctggtaaataaaagggactaagttgacgaaaaataaattttaaaaaacctaataaaacaagtttgtaatttataattgtatacaaataaaagatgttaca

SEQ ID NO: 432749 - DNA, 4598 bp, Homo sapiens
  misc_feature (2)..(2): n is a, c, g, or t
  misc_feature (3151)..(3151): n is a, c, g, or t
gnccgcttgtgatgaaactgtaacttacaagaaaagggctgggttttgaaaataacacaggctctaaaaaccctaagaagcggtgcaacttttggcaggaatcggggttagcgggacctcaagggctcactgcggctaagtgaacgctgactggtcctccagcgtgagctagaacagacgtctctatggtcaagtaaacagagcgtgtgctgtcttccccatgtggtggggttgcgcatgatcagtagctgcaccactagaaagatggcggagcaagagcaaagaaaaatccctttggttccagaaaatctcctgaaaaagaggaaggcttatcaagccctcaaagccacccaggcaaagcaggcacttttggcaaagaaggagcagaagaaaggaaaagggctcaggtttaagcgactggaatcattcctacatgattcctggcggcagaaacgtgacaaggtgcgtctcagacgactagaagtgaaacctcatgccttggaattgccagataaacattccttggcctttgttgtacgcatcgaaaggattgacggcgtgagtttactggtgcagagaaccattgcaagacttcgcctaaagaaaatttttagtggtgtctttgtaaaagtcaccccccagaatctaaaaatgctgcgtatagtggaaccttatgtgacctggggatttccaaatctgaagtctgtccgagaactcattttgaaacgtggacaagccaaggtcaagaataagaccatccctctgacagacaatacagtgattgaggagcacctgggtgagtgctacagcttaggggtcagctggggcagaaagccagggtctttgaagctttgatgtgagattcaggttgtattcttcttggggccccaagagtctgccagagtggccagcttagtatatgctggatacatgttaaataaaggaatctgtgcttttgtgtttcttagggaagttggcgtcatttgcttggaagacctcattcatgaaattgccttcccagggaagcatttccaggagatctcatggttcttgtgccctttccacctctcagtggcccgtcatgctaccaaaaatagagtgggcttcctcaaggagatgggcacacctggctatcggggtgaacgcatcaatcagctcatccgtcagctgaactagacccaggtgaggcagggctgaaaactgcccttgggctgacttttgataggccatgccttgccactttacaagttctttttgcatttactagtatttaagagtaaccttgagattgggaggaatagaggaggctggtacaaatagatggagacctgctgggatcagtgaatgcctgattaggacatggggctatgcatagcctaagagttataggcttaaagatgtcgagtaactaaaaactgtattgctggccgggcgcggtggctcacgcctgtaatcccagcactttgggaggccaaggcgggcagaccatgaggtcaggagattgagaccatcctggccaacatggtgaaaccctgtctctactaaaaatacaaaaatgagctgggtgtggtggcgcgtgcctgtagtcccagctactcgagaggctaaggcaggaaaatcgcttgaacccaggaggcagagattgcagtgagccaagattgcaccagtgcactccagctgggcgacagagcgagactccatctcggaaaaaaaaaaaaaaaaaaactattgctgcagtcattcagatggaaatgaggaaagaataatattaataactgatttcaaaaaggacttgaagatgtgaatcatctattttgctgaagaaatcttaactctttgaaattactttttattgctgttgtcatactcttaggtgccaaactgcggtaaattttttatcagtgaagtggaagcatgtgttttgttttggaaatttttatcaagtatcttcagagaagattatttcctgctttatcttcagaaactggaaagggtcaaagaaaagacagtagctggccggtcgtggtggctcatgcctgtaatcccaacacttagggaggctgaggtgggcagatcacctgaggttgggagttcgagaccagcctgaccaacatggagaaatgccatctctactaaaaatacaaaaattagccgggcatggtggcacgtgcctgtaatcccagctactcaggaggctgaggcaggagaatcgcttgaacctgggaggtggaagttgcagtgagctgagatcacgccattgcactccagcctgggcaacaagcgaaactctgtctcaaaaaaaaagaaaagacagtagcatatgttcatgtcaagcacctctcatcacagtcgagttccaaggaaaaattccagcgttttctgcattgggtgctgtgtcatctgaaatcggcacattccatggaggaaggagtcctgctttgttgcatgtatcctagggtttaatgttggtaaatgagtcactctagcatttgtagaaggctccctgagactcctgcagcagtcgaccaagcccaaggacataattgaatctggagagtcctggggccttgttttgaaaaagacttgaaatacacataggaagaaaggcataaaaataaatgttcacttgtctctgctgtgagtatgtgttccaacttttcagtgatggctttgagaattctcaaacttgactggctctaagtgtatctggtggctttgtatcgtaacctgaaactggcttagtactttttcctaaaagctcaggatttgagaatgaggaccccttcgccaggaaaacatgtatacactcaaaattttgcttgcagttctagggtgtttagacccttctcagatacctgtgcatcttatgggttttgtttttctctttgagacagtctcaccctgttgcccaggctggagcgcagtggcgtgatctcggctcattgcagcctccacctcctgggttcaagtgattctgcctcagccccttgatcagctgggattgcatgcatgtaccaccacacccggctaattcttgtatttttagtagagatggagacagagtttcaccatgtaggccaggctggtctcgaactcctgacctcaagtgatccacaagcctgggcctcccaaagtgctgggattacaggcntgagcaactgcgcccagctcttgtgtaccttatgtgaggaagtcctgctcaatcaggatcggtcacgcaggccctgatcttgctactctggttccatgtcctatggaagaccaaagtttaccaagatagatttttcccttcatagtggcagatagtgttaacccctgcaccatctgtaactcagaaatccccaccatttcttcccctgggcttcagaatagaattgcctggtttctctgatgatcagcatggttccttaaaacccaaatcagcaaggaatgaacaattttgtttggcatggatgaaattagcactgtttggctcgttaggccccaggcaggcaggcaccttaattttttccttgcatattctagtcttcagaagcattgccttttgtcctactggtagtgacatagaccaataacagggcatctggggattttaatcctgaaaacagtgagtctgatactgcttgtgtttttcatcagtgtccaccccaagtgggtcttcctgctattctcttcacttagttgcccctcacttgccatctgagcaattggcaaggatgtgccaggcctaggttaaacttggaaacatgcttgaccattctattccctggtcctttaagatcagtttggctgcaattttggctccttggaccctcaagcatagctggtaaatcaagttagagatgtaactgccttaaaacatgccagcttaggctgggcacggtggctcacgcctgtaatctcaacacttcaggaggctgaggcaggcagatcacttgaggtcaggagttcgagaccagcctgaccaacatggagaaattctgtccctactgaaaatacaaaattagccggatgtggtggtgcatgcctgtaatcccagctacttgggaggctgaggcaagagaattgcttgaacccagggaggcagaggttgcagtgagccgagatcacaccattgcactccaccttgggcaacaaaagcaaaactctgtctcaaaaaaaaaaaaaaaaaaagtgccagcgtatgaggtaattagattggttctctccagaggtaacctgccaagaagagatgctatagatgttactcctatactgtaaaacattgtgaaatcagattactttaaaatgatgtattacaaagttatgcaaaaaagcagttgtgactatggaagcccaaggcttatatcccagctctgtcttacactaaatatgggtacagtgtttccactctgtccataaaatgggagctaatattctccaacctgtgtgcctgacatgatggttaaagggattaaacaaaacaatagtttgtaatttattctgtcagagcaaactgctggtaaataaaagggactaagttgacgaaaaataaattttaaaaaacctaataaaacaagtttgtaatttataattgtatacaaataaaagatgttaca

SEQ ID NO: 432750 - DNA, 4565 bp, Homo sapiens
  misc_feature (3118)..(3118): n is a, c, g, or t
atcacccaaaccagaaacctgtggattttgcatgtttatgagctctgtcctttgtagccctctaccactgctcatatttttcctgaactattgtattaaccttcctcctggatttccttgcctctagtgtcatactgtgatctgtcccatacactgcccttggtgattgtcagaaagaaatctggtctggtctcttctgcttaaaatcttcagtagcttttactgcccatagaagcacatccagcttccttagctggacatgtgtagacctacataccaccactccgcctacccctgaaacacacacaagttcaatttccatagcattccaggcactgctccacattatgaaaaggatctgttttcataaccgcctcccactaaactgagctctttaaggcatagtctctgtgtcttattccagattacccagtgtagtgacctcgcatgttgtgcttgctggactgacataaactggagggagtctgtctgacttctgttgctgttcatttcaggattgacggcgtgagtttactggtgcagagaaccattgcaagacttcgcctaaagaaaatttttagtggtgtctttgtaaaagtcaccccccagaatctaaaaatgctgcgtatagtggaaccttatgtgacctggggatttccaaatctgaagtctgtccgagaactcattttgaaacgtggacaagccaaggtcaagaataagaccatccctctgacagacaatacagtgattgaggagcacctgggtgagtgctacagcttaggggtcagctggggcagaaagccagggtctttgaagctttgatgtgagattcaggttgtattcttcttggggccccaagagtctgccagagtggccagcttagtatatgctggatacatgttaaataaaggaatctgtgcttttgtgtttcttagggaagttggcgtcatttgcttggaagacctcattcatgaaattgccttcccagggaagcatttccaggagatctcatggttcttgtgccctttccacctctcagtggcccgtcatgctaccaaaaatagagtgggcttcctcaaggagatgggcacacctggctatcggggtgaacgcatcaatcagctcatccgtcagctgaactagacccaggtgaggcagggctgaaaactgcccttgggctgacttttgataggccatgccttgccactttacaagttctttttgcatttactagtatttaagagtaaccttgagattgggaggaatagaggaggctggtacaaatagatggagacctgctgggatcagtgaatgcctgattaggacatggggctatgcatagcctaagagttataggcttaaagatgtcgagtaactaaaaactgtattgctggccgggcgcggtggctcacgcctgtaatcccagcactttgggaggccaaggcgggcagaccatgaggtcaggagattgagaccatcctggccaacatggtgaaaccctgtctctactaaaaatacaaaaatgagctgggtgtggtggcgcgtgcctgtagtcccagctactcgagaggctaaggcaggaaaatcgcttgaacccaggaggcagagattgcagtgagccaagattgcaccagtgcactccagctgggcgacagagcgagactccatctcggaaaaaaaaaaaaaaaaaaactattgctgcagtcattcagatggaaatgaggaaagaataatattaataactgatttcaaaaaggacttgaagatgtgaatcatctattttgctgaagaaatcttaactctttgaaattactttttattgctgttgtcatactcttaggtgccaaactgcggtaaattttttatcagtgaagtggaagcatgtgttttgttttggaaatttttatcaagtatcttcagagaagattatttcctgctttatcttcagaaactggaaagggtcaaagaaaagacagtagctggccggtcgtggtggctcatgcctgtaatcccaacacttagggaggctgaggtgggcagatcacctgaggttgggagttcgagaccagcctgaccaacatggagaaatgccatctctactaaaaatacaaaaattagccgggcatggtggcacgtgcctgtaatcccagctactcaggaggctgaggcaggagaatcgcttgaacctgggaggtggaagttgcagtgagctgagatcacgccattgcactccagcctgggcaacaagcgaaactctgtctcaaaaaaaaagaaaagacagtagcatatgttcatgtcaagcacctctcatcacagtcgagttccaaggaaaaattccagcgttttctgcattgggtgctgtgtcatctgaaatcggcacattccatggaggaaggagtcctgctttgttgcatgtatcctagggtttaatgttggtaaatgagtcactctagcatttgtagaaggctccctgagactcctgcagcagtcgaccaagcccaaggacataattgaatctggagagtcctggggccttgttttgaaaaagacttgaaatacacataggaagaaaggcataaaaataaatgttcacttgtctctgctgtgagtatgtgttccaacttttcagtgatggctttgagaattctcaaacttgactggctctaagtgtatctggtggctttgtatcgtaacctgaaactggcttagtactttttcctaaaagctcaggatttgagaatgaggaccccttcgccaggaaaacatgtatacactcaaaattttgcttgcagttctagggtgtttagacccttctcagatacctgtgcatcttatgggttttgtttttctctttgagacagtctcaccctgttgcccaggctggagcgcagtggcgtgatctcggctcattgcagcctccacctcctgggttcaagtgattctgcctcagccccttgatcagctgggattgcatgcatgtaccaccacacccggctaattcttgtatttttagtagagatggagacagagtttcaccatgtaggccaggctggtctcgaactcctgacctcaagtgatccacaagcctgggcctcccaaagtgctgggattacaggcntgagcaactgcgcccagctcttgtgtaccttatgtgaggaagtcctgctcaatcaggatcggtcacgcaggccctgatcttgctactctggttccatgtcctatggaagaccaaagtttaccaagatagatttttcccttcatagtggcagatagtgttaacccctgcaccatctgtaactcagaaatccccaccatttcttcccctgggcttcagaatagaattgcctggtttctctgatgatcagcatggttccttaaaacccaaatcagcaaggaatgaacaattttgtttggcatggatgaaattagcactgtttggctcgttaggccccaggcaggcaggcaccttaattttttccttgcatattctagtcttcagaagcattgccttttgtcctactggtagtgacatagaccaataacagggcatctggggattttaatcctgaaaacagtgagtctgatactgcttgtgtttttcatcagtgtccaccccaagtgggtcttcctgctattctcttcacttagttgcccctcacttgccatctgagcaattggcaaggatgtgccaggcctaggttaaacttggaaacatgcttgaccattctattccctggtcctttaagatcagtttggctgcaattttggctccttggaccctcaagcatagctggtaaatcaagttagagatgtaactgccttaaaacatgccagcttaggctgggcacggtggctcacgcctgtaatctcaacacttcaggaggctgaggcaggcagatcacttgaggtcaggagttcgagaccagcctgaccaacatggagaaattctgtccctactgaaaatacaaaattagccggatgtggtggtgcatgcctgtaatcccagctacttgggaggctgaggcaagagaattgcttgaacccagggaggcagaggttgcagtgagccgagatcacaccattgcactccaccttgggcaacaaaagcaaaactctgtctcaaaaaaaaaaaaaaaaaaagtgccagcgtatgaggtaattagattggttctctccagaggtaacctgccaagaagagatgctatagatgttactcctatactgtaaaacattgtgaaatcagattactttaaaatgatgtattacaaagttatgcaaaaaagcagttgtgactatggaagcccaaggcttatatcccagctctgtcttacactaaatatgggtacagtgtttccactctgtccataaaatgggagctaatattctccaacctgtgtgcctgacatgatggttaaagggattaaacaaaacaatagtttgtaatttattctgtcagagcaaactgctggtaaataaaagggactaagttgacgaaaaataaattttaaaaaacctaataaaacaagtttgtaatttataattgtatacaaataaaagatgttaca

SEQ ID NO: 432751 - DNA, 4145 bp, Homo sapiens
  misc_feature (2698)..(2698): n is a, c, g, or t
cctggtgaacatttacatccataaatttaaatttctaattatgtaagtggggtcacttcagttctttatcaggagtatttccaagcatttcagctggaatgtgattgcagaacacttgctcgttgggagaagtgagtgtgtgggagaacctctccaacctctcagccaggctgcaggactggtatgtagtgtgccaggtgctggtgaaaaccgtgctttattttcctacatagatttccaaatctgaagtctgtccgagaactcattttgaaacgtggacaagccaaggtcaagaataagaccatccctctgacagacaatacagtgattgaggagcacctgggtgagtgctacagcttaggggtcagctggggcagaaagccagggtctttgaagctttgatgtgagattcaggttgtattcttcttggggccccaagagtctgccagagtggccagcttagtatatgctggatacatgttaaataaaggaatctgtgcttttgtgtttcttagggaagttggcgtcatttgcttggaagacctcattcatgaaattgccttcccagggaagcatttccaggagatctcatggttcttgtgccctttccacctctcagtggcccgtcatgctaccaaaaatagagtgggcttcctcaaggagatgggcacacctggctatcggggtgaacgcatcaatcagctcatccgtcagctgaactagacccaggtgaggcagggctgaaaactgcccttgggctgacttttgataggccatgccttgccactttacaagttctttttgcatttactagtatttaagagtaaccttgagattgggaggaatagaggaggctggtacaaatagatggagacctgctgggatcagtgaatgcctgattaggacatggggctatgcatagcctaagagttataggcttaaagatgtcgagtaactaaaaactgtattgctggccgggcgcggtggctcacgcctgtaatcccagcactttgggaggccaaggcgggcagaccatgaggtcaggagattgagaccatcctggccaacatggtgaaaccctgtctctactaaaaatacaaaaatgagctgggtgtggtggcgcgtgcctgtagtcccagctactcgagaggctaaggcaggaaaatcgcttgaacccaggaggcagagattgcagtgagccaagattgcaccagtgcactccagctgggcgacagagcgagactccatctcggaaaaaaaaaaaaaaaaaaactattgctgcagtcattcagatggaaatgaggaaagaataatattaataactgatttcaaaaaggacttgaagatgtgaatcatctattttgctgaagaaatcttaactctttgaaattactttttattgctgttgtcatactcttaggtgccaaactgcggtaaattttttatcagtgaagtggaagcatgtgttttgttttggaaatttttatcaagtatcttcagagaagattatttcctgctttatcttcagaaactggaaagggtcaaagaaaagacagtagctggccggtcgtggtggctcatgcctgtaatcccaacacttagggaggctgaggtgggcagatcacctgaggttgggagttcgagaccagcctgaccaacatggagaaatgccatctctactaaaaatacaaaaattagccgggcatggtggcacgtgcctgtaatcccagctactcaggaggctgaggcaggagaatcgcttgaacctgggaggtggaagttgcagtgagctgagatcacgccattgcactccagcctgggcaacaagcgaaactctgtctcaaaaaaaaagaaaagacagtagcatatgttcatgtcaagcacctctcatcacagtcgagttccaaggaaaaattccagcgttttctgcattgggtgctgtgtcatctgaaatcggcacattccatggaggaaggagtcctgctttgttgcatgtatcctagggtttaatgttggtaaatgagtcactctagcatttgtagaaggctccctgagactcctgcagcagtcgaccaagcccaaggacataattgaatctggagagtcctggggccttgttttgaaaaagacttgaaatacacataggaagaaaggcataaaaataaatgttcacttgtctctgctgtgagtatgtgttccaacttttcagtgatggctttgagaattctcaaacttgactggctctaagtgtatctggtggctttgtatcgtaacctgaaactggcttagtactttttcctaaaagctcaggatttgagaatgaggaccccttcgccaggaaaacatgtatacactcaaaattttgcttgcagttctagggtgtttagacccttctcagatacctgtgcatcttatgggttttgtttttctctttgagacagtctcaccctgttgcccaggctggagcgcagtggcgtgatctcggctcattgcagcctccacctcctgggttcaagtgattctgcctcagccccttgatcagctgggattgcatgcatgtaccaccacacccggctaattcttgtatttttagtagagatggagacagagtttcaccatgtaggccaggctggtctcgaactcctgacctcaagtgatccacaagcctgggcctcccaaagtgctgggattacaggcntgagcaactgcgcccagctcttgtgtaccttatgtgaggaagtcctgctcaatcaggatcggtcacgcaggccctgatcttgctactctggttccatgtcctatggaagaccaaagtttaccaagatagatttttcccttcatagtggcagatagtgttaacccctgcaccatctgtaactcagaaatccccaccatttcttcccctgggcttcagaatagaattgcctggtttctctgatgatcagcatggttccttaaaacccaaatcagcaaggaatgaacaattttgtttggcatggatgaaattagcactgtttggctcgttaggccccaggcaggcaggcaccttaattttttccttgcatattctagtcttcagaagcattgccttttgtcctactggtagtgacatagaccaataacagggcatctggggattttaatcctgaaaacagtgagtctgatactgcttgtgtttttcatcagtgtccaccccaagtgggtcttcctgctattctcttcacttagttgcccctcacttgccatctgagcaattggcaaggatgtgccaggcctaggttaaacttggaaacatgcttgaccattctattccctggtcctttaagatcagtttggctgcaattttggctccttggaccctcaagcatagctggtaaatcaagttagagatgtaactgccttaaaacatgccagcttaggctgggcacggtggctcacgcctgtaatctcaacacttcaggaggctgaggcaggcagatcacttgaggtcaggagttcgagaccagcctgaccaacatggagaaattctgtccctactgaaaatacaaaattagccggatgtggtggtgcatgcctgtaatcccagctacttgggaggctgaggcaagagaattgcttgaacccagggaggcagaggttgcagtgagccgagatcacaccattgcactccaccttgggcaacaaaagcaaaactctgtctcaaaaaaaaaaaaaaaaaaagtgccagcgtatgaggtaattagattggttctctccagaggtaacctgccaagaagagatgctatagatgttactcctatactgtaaaacattgtgaaatcagattactttaaaatgatgtattacaaagttatgcaaaaaagcagttgtgactatggaagcccaaggcttatatcccagctctgtcttacactaaatatgggtacagtgtttccactctgtccataaaatgggagctaatattctccaacctgtgtgcctgacatgatggttaaagggattaaacaaaacaatagtttgtaatttattctgtcagagcaaactgctggtaaataaaagggactaagttgacgaaaaataaattttaaaaaacctaataaaacaagtttgtaatttataattgtatacaaataaaagatgttaca

SEQ ID NO: 432752 - DNA, 3735 bp, Homo sapiens
  misc_feature (2)..(2): n is a, c, g, or t
  misc_feature (2288)..(2288): n is a, c, g, or t
gnccgcttgtgatgaaactgtaacttacaagaaaagggctgggttttgaaaataacacaggctctaaaaaccctaagaagcggtgcaacttttggcaggaatcggggttagcgggacctcaagggctcactgcggctaagtgaacgctgactggtcctccagcgtgagctagaacagacgtctctatggtcaagtaaacagagcgtgtgctgtcttccccatgtggtggggttgcgcatgatcagtagctgcaccactagaaagatggcggagcaagagcaaagaaaaatccctttggttccagaaaatctcctgaaaaagaggaaggcttatcaagccctcaaagccacccaggcaaagcaggcacttttggcaaagaaggagcagaagaaaggaaaagggctcaggtttaagcgactggaatcattcctacatgattcctggcggcagaaacgtgacaaggtgcgtctcagacgactagaagtgaaacctcatgccttggaattgccagataaacattccttggcctttgttgtacgcatcgaaaggattgacggcgtgagtttactggtgcagagaaccattgcaagacttcgcctaaagaaaatttttagtggtgtctttgtaaaagtcaccccccagaatctaaaaatgctgcgtatagtggaaccttatgtgacctggggatttccaaatctgaagtctgtccgagaactcattttgaaacgtggacaagccaaggtcaagaataagaccatccctctgacagacaatacagtgattgaggagcacctggggaagttggcgtcatttgcttggaagacctcattcatgaaattgccttcccagggaagcatttccaggagatctcatggttcttgtgccctttccacctctcagtggcccgtcatgctaccaaaaatagagtgggcttcctcaaggagatgggcacacctggctatcggggtgaacgcatcaatcagctcatccgtcagctgaactagacccaggtgccaaactgcggtaaattttttatcagtgaagtggaagcatgtgttttgttttggaaatttttatcaagtatcttcagagaagattatttcctgctttatcttcagaaactggaaagggtcaaagaaaagacagtagctggccggtcgtggtggctcatgcctgtaatcccaacacttagggaggctgaggtgggcagatcacctgaggttgggagttcgagaccagcctgaccaacatggagaaatgccatctctactaaaaatacaaaaattagccgggcatggtggcacgtgcctgtaatcccagctactcaggaggctgaggcaggagaatcgcttgaacctgggaggtggaagttgcagtgagctgagatcacgccattgcactccagcctgggcaacaagcgaaactctgtctcaaaaaaaaagaaaagacagtagcatatgttcatgtcaagcacctctcatcacagtcgagttccaaggaaaaattccagcgttttctgcattgggtgctgtgtcatctgaaatcggcacattccatggaggaaggagtcctgctttgttgcatgtatcctagggtttaatgttggtaaatgagtcactctagcatttgtagaaggctccctgagactcctgcagcagtcgaccaagcccaaggacataattgaatctggagagtcctggggccttgttttgaaaaagacttgaaatacacataggaagaaaggcataaaaataaatgttcacttgtctctgctgtgagtatgtgttccaacttttcagtgatggctttgagaattctcaaacttgactggctctaagtgtatctggtggctttgtatcgtaacctgaaactggcttagtactttttcctaaaagctcaggatttgagaatgaggaccccttcgccaggaaaacatgtatacactcaaaattttgcttgcagttctagggtgtttagacccttctcagatacctgtgcatcttatgggttttgtttttctctttgagacagtctcaccctgttgcccaggctggagcgcagtggcgtgatctcggctcattgcagcctccacctcctgggttcaagtgattctgcctcagccccttgatcagctgggattgcatgcatgtaccaccacacccggctaattcttgtatttttagtagagatggagacagagtttcaccatgtaggccaggctggtctcgaactcctgacctcaagtgatccacaagcctgggcctcccaaagtgctgggattacaggcntgagcaactgcgcccagctcttgtgtaccttatgtgaggaagtcctgctcaatcaggatcggtcacgcaggccctgatcttgctactctggttccatgtcctatggaagaccaaagtttaccaagatagatttttcccttcatagtggcagatagtgttaacccctgcaccatctgtaactcagaaatccccaccatttcttcccctgggcttcagaatagaattgcctggtttctctgatgatcagcatggttccttaaaacccaaatcagcaaggaatgaacaattttgtttggcatggatgaaattagcactgtttggctcgttaggccccaggcaggcaggcaccttaattttttccttgcatattctagtcttcagaagcattgccttttgtcctactggtagtgacatagaccaataacagggcatctggggattttaatcctgaaaacagtgagtctgatactgcttgtgtttttcatcagtgtccaccccaagtgggtcttcctgctattctcttcacttagttgcccctcacttgccatctgagcaattggcaaggatgtgccaggcctaggttaaacttggaaacatgcttgaccattctattccctggtcctttaagatcagtttggctgcaattttggctccttggaccctcaagcatagctggtaaatcaagttagagatgtaactgccttaaaacatgccagcttaggctgggcacggtggctcacgcctgtaatctcaacacttcaggaggctgaggcaggcagatcacttgaggtcaggagttcgagaccagcctgaccaacatggagaaattctgtccctactgaaaatacaaaattagccggatgtggtggtgcatgcctgtaatcccagctacttgggaggctgaggcaagagaattgcttgaacccagggaggcagaggttgcagtgagccgagatcacaccattgcactccaccttgggcaacaaaagcaaaactctgtctcaaaaaaaaaaaaaaaaaaagtgccagcgtatgaggtaattagattggttctctccagaggtaacctgccaagaagagatgctatagatgttactcctatactgtaaaacattgtgaaatcagattactttaaaatgatgtattacaaagttatgcaaaaaagcagttgtgactatggaagcccaaggcttatatcccagctctgtcttacactaaatatgggtacagtgtttccactctgtccataaaatgggagctaatattctccaacctgtgtgcctgacatgatggttaaagggattaaacaaaacaatagtttgtaatttattctgtcagagcaaactgctggtaaataaaagggactaagttgacgaaaaataaattttaaaaaacctaataaaacaagtttgtaatttataattgtatacaaataaaagatgttaca

SEQ ID NO: 432753 - DNA, 3338 bp, Homo sapiens
  misc_feature (2)..(2): n is a, c, g, or t
  misc_feature (1891)..(1891): n is a, c, g, or t
gnccgcttgtgatgaaactgtaacttacaagaaaagggctgggttttgaaaataacacaggctctaaaaaccctaagaagcggtgcaacttttggcaggaatcggggttagcgggacctcaagggctcactgcggctaagtgaacgctgactggtcctccagcgtgagctagaacagacgtctctatggtcaagtaaacagagcgtgtgctgtcttccccatgtggtggggttgcgcatgatcagtagctgcaccactagaaagatggcggagcaagagcaaagaaaaatccctttggttccagaaaatctcctgaaaaagaggaaggcttatcaagccctcaaagccacccaggcaaagcaggcacttttggcaaagaaggagcagaagaaaggaaaagggctcaggtttaagcgactggaatcattcctacatgattcctggcggcagaaacgtgacaaggtgcgtctcagacgactagaagtgaaacctcatgccttggaattgccagataaacattccttggcctttgttgtacgcatcgaaaggattgacggcgtgagtttactggtgcagagaaccattgcaagacttcgcctaaagaaaatttttagtggtgtctttgtaaaagtcaccccccagaatctaaaaatgctgcgtatagtggaaccttatgtgacctggggatttccaaatctgaagtctgtccgagaactcattttgaaacgtggacaagccaaggtcaagaataagaccatccctctgacagacaatacagtgattgaggagcacctggggaagttggcgtcatttgcttggaagacctcattcatgaaattgccttcccagggaagcatttccaggagatctcatggttcttgtgccctttccacctctcagtggcccgtcatgctaccaaaaatagagtgggcttcctcaaggagatgggcacacctggctatcggggtgaacgcatcaatcagctcatccgtcagctgaactagacccaggtgaggcagggctgaaaactgcccttgggctgacttttgataggccatgccttgccactttacaagttctttttgcatttactagtatttaagagtaaccttgagattgggaggaatagaggaggctggtacaaatagatggagacctgctgggatcagtgaatgcctgattaggacatggggctatgcatagcctaagagttataggcttaaagatgtcgagtaactaaaaactgtattgctggccgggcgcggtggctcacgcctgtaatcccagcactttgggaggccaaggcgggcagaccatgaggtcaggagattgagaccatcctggccaacatggtgaaaccctgtctctactaaaaatacaaaaatgagctgggtgtggtggcgcgtgcctgtagtcccagctactcgagaggctaaggcaggaaaatcgcttgaacccaggaggcagagattgcagtgagccaagattgcaccagtgcactccagctgggcgacagagcgagactccatctcggaaaaaaaaaaaaaaaaaaactattgctgcagtcattcagatggaaatgaggaaagaataatattaataactgatttcaaaaaggacttgaagatgtgaatcatctattttgctgaagaaatcttaactctttgaaattactttttattgctgttgtcatactcttaggtgccaaactgcggtaaattttttatcagtgaagtggaagcatgtgttttgttttggaaatttttatcaagtatcttcagagaagattatttcctgctttatcttcagaaactggaaagggtcaaagaaaagacagtagctggccggtcgtggtggctcatgcctgtaatcccaacagggattacaggcntgagcaactgcgcccagctcttgtgtaccttatgtgaggaagtcctgctcaatcaggatcggtcacgcaggccctgatcttgctactctggttccatgtcctatggaagaccaaagtttaccaagatagatttttcccttcatagtggcagatagtgttaacccctgcaccatctgtaactcagaaatccccaccatttcttcccctgggcttcagaatagaattgcctggtttctctgatgatcagcatggttccttaaaacccaaatcagcaaggaatgaacaattttgtttggcatggatgaaattagcactgtttggctcgttaggccccaggcaggcaggcaccttaattttttccttgcatattctagtcttcagaagcattgccttttgtcctactggtagtgacatagaccaataacagggcatctggggattttaatcctgaaaacagtgagtctgatactgcttgtgtttttcatcagtgtccaccccaagtgggtcttcctgctattctcttcacttagttgcccctcacttgccatctgagcaattggcaaggatgtgccaggcctaggttaaacttggaaacatgcttgaccattctattccctggtcctttaagatcagtttggctgcaattttggctccttggaccctcaagcatagctggtaaatcaagttagagatgtaactgccttaaaacatgccagcttaggctgggcacggtggctcacgcctgtaatctcaacacttcaggaggctgaggcaggcagatcacttgaggtcaggagttcgagaccagcctgaccaacatggagaaattctgtccctactgaaaatacaaaattagccggatgtggtggtgcatgcctgtaatcccagctacttgggaggctgaggcaagagaattgcttgaacccagggaggcagaggttgcagtgagccgagatcacaccattgcactccaccttgggcaacaaaagcaaaactctgtctcaaaaaaaaaaaaaaaaaaagtgccagcgtatgaggtaattagattggttctctccagaggtaacctgccaagaagagatgctatagatgttactcctatactgtaaaacattgtgaaatcagattactttaaaatgatgtattacaaagttatgcaaaaaagcagttgtgactatggaagcccaaggcttatatcccagctctgtcttacactaaatatgggtacagtgtttccactctgtccataaaatgggagctaatattctccaacctgtgtgcctgacatgatggttaaagggattaaacaaaacaatagtttgtaatttattctgtcagagcaaactgctggtaaataaaagggactaagttgacgaaaaataaattttaaaaaacctaataaaacaagtttgtaatttataattgtatacaaataaaagatgttaca

SEQ ID NO: 432754 - DNA, 4375 bp, Homo sapiens
  misc_feature (2)..(2): n is a, c, g, or t
  misc_feature (2979)..(2979): n is a, c, g, or t
gnccgcttgtgatgaaactgtaacttacaagaaaagggctgggttttgaaaataacacaggctctaaaaaccctaagaagcggtgcaacttttggcaggaatcggggttagcgggacctcaagggctcactgcggctaagtgaacgctgactggtcctccagcgtgagctagaacagacgtctctatggtcaagtaaacagagcgtgtgctgtcttccccatgtggtggggttgcgcatgatcagtagctgcaccactagaaagatggcggagcaagagcaaagaaaaatccctttggttccagaaaatctcctgaaaaagaggaaggcttatcaagccctcaaagccacccaggcaaagcaggcacttttggcaaagaaggagcagaagaaaggaaaagggctcaggtttaagcgactggaatcattcctacatgattcctggcggcagaaacgtgacaaggtgcgtctcagacgactagaagtgaaacctcatgccttggaattgccagataaacattccttggcctttgttgtacgcatcgaaaggattgacggcgtgagtttactggtgcagagaaccattgcaagacttcgcctaaagaaaatttttagtggtgtctttgtaaaagtcaccccccagaatctaaaaatgctgcgtatagtggaaccttatgtgacctggggatttccaaatctgaagtctgtccgagaactcattttgaaacgtggacaagccaaggtcaagaataagaccatccctctgacagacaatacagtgattgaggagcacctggggaagttggcgtcatttgcttggaagacctcattcatgaaattgccttcccagggaagcatttccaggagatctcatggttcttgtgccctttccacctctcagtggcccgtcatgctaccaaaaatagagtgggcttcctcaaggagatgggcacacctggctatcggggtgaacgcatcaatcagctcatccgtcagctgaactagacccaggtgaggcagggctgaaaactgcccttgggctgacttttgataggccatgccttgccactttacaagttctttttgcatttactagtatttaagagtaaccttgagattgggaggaatagaggaggctggtacaaatagatggagacctgctgggatcagtgaatgcctgattaggacatggggctatgcatagcctaagagttataggcttaaagatgtcgagtaactaaaaactgtattgctggccgggcgcggtggctcacgcctgtaatcccagcactttgggaggccaaggcgggcagaccatgaggtcaggagattgagaccatcctggccaacatggtgaaaccctgtctctactaaaaatacaaaaatgagctgggtgtggtggcgcgtgcctgtagtcccagctactcgagaggctaaggcaggaaaatcgcttgaacccaggaggcagagattgcagtgagccaagattgcaccagtgcactccagctgggcgacagagcgagactccatctcggaaaaaaaaaaaaaaaaaaactattgctgcagtcattcagatggaaatgaggaaagaataatattaataactgatttcaaaaaggacttgaagatgtgaatcatctattttgctgaagaaatcttaactctttgaaattactttttattgctgttgtcatactcttaggtgccaaactgcggtaaattttttatcagtgaagtggaagcatgtgttttgttttggaaatttttatcaagtatcttcagagaagattatttcctgctttatcttcagaaactggaaagggtcaaagaaaagacagtagctggccggtcgtggtggctcatgcctgtaatcccaacacttagggaggctgaggtgggcagatcacctgaggttgggagttcgagaccagcctgaccaacatggagaaatgccatctctactaaaaatacaaaaattagccgggcatggtggcacgtgcctgtaatcccagctactcaggaggctgaggcaggagaatcgcttgaacctgggaggtggaagttgcagtgagctgagatcacgccattgcactccagcctgggcaacaagcgaaactctgtctcaaaaaaaaagaaaagacagtagcatatgttcatgtcaagcacctctcatcacagtcgagttccaaggaaaaattccagcgttttctgcattgggtgctgtgtcatctgaaatcggcacattccatggaggaaggagtcctgctttgttgcatgtatcctagggtttaatgttggtaaatgagtcactctagcatttgtagaaggctccctgagactcctgcagcagtcgaccaagcccaaggacataattgaatctggagagtcctggggccttgttttgaaaaagacttgaaatacacataggaagaaaggcataaaaataaatgttcacttgtctctgctgtgagtatgtgttccaacttttcagtgatggctttgagaattctcaaacttgactggctctaagtgtatctggtggctttgtatcgtaacctgaaactggcttagtactttttcctaaaagctcaggatttgagaatgaggaccccttcgccaggaaaacatgtatacactcaaaattttgcttgcagttctagggtgtttagacccttctcagatacctgtgcatcttatgggttttgtttttctctttgagacagtctcaccctgttgcccaggctggagcgcagtggcgtgatctcggctcattgcagcctccacctcctgggttcaagtgattctgcctcagccccttgatcagctgggattgcatgcatgtaccaccacacccggctaattcttgtatttttagtagagatggagacagagtttcaccatgtaggccaggctggtctcgaactcctgacctcaagtgatccacaagcctgggcctcccaaagtgctgggattacaggcntgagcaactgcgcccagctcttgtgtaccttatgtgaggaagtcctgctcaatcaggatcggtcacgcaggccctgatcttgctactctggttccatgtcctatggaagaccaaagtttaccaagatagatttttcccttcatagtggcagatagtgttaacccctgcaccatctgtaactcagaaatccccaccatttcttcccctgggcttcagaatagaattgcctggtttctctgatgatcagcatggttccttaaaacccaaatcagcaaggaatgaacaattttgtttggcatggatgaaattagcactgtttggctcgttaggccccaggcaggcaggcaccttaattttttccttgcatattctagtcttcagaagcattgccttttgtcctactggtagtgacatagaccaataacagggcatctggggattttaatcaagtgggtcttcctgctattctcttcacttagttgcccctcacttgccatctgagcaattggcaaggatgtgccaggcctaggttaaacttggaaacatgcttgaccattctattccctggtcctttaagatcagtttggctgcaattttggctccttggaccctcaagcatagctggtaaatcaagttagagatgtaactgccttaaaacatgccagcttaggctgggcacggtggctcacgcctgtaatctcaacacttcaggaggctgaggcaggcagatcacttgaggtcaggagttcgagaccagcctgaccaacatggagaaattctgtccctactgaaaatacaaaattagccggatgtggtggtgcatgcctgtaatcccagctacttgggaggctgaggcaagagaattgcttgaacccagggaggcagaggttgcagtgagccgagatcacaccattgcactccaccttgggcaacaaaagcaaaactctgtctcaaaaaaaaaaaaaaaaaaagtgccagcgtatgaggtaattagattggttctctccagaggtaacctgccaagaagagatgctatagatgttactcctatactgtaaaacattgtgaaatcagattactttaaaatgatgtattacaaagttatgcaaaaaagcagttgtgactatggaagcccaaggcttatatcccagctctgtcttacactaaatatgggtacagtgtttccactctgtccataaaatgggagctaatattctccaacctgtgtgcctgacatgatggttaaagggattaaacaaaacaatagtttgtaatttattctgtcagagcaaactgctggtaaataaaagggactaagttgacgaaaaataaattttaaaaaacctaataaaacaagtttgtaatttataattgtatacaaataaaagatgttaca

SEQ ID NO: 432755 - DNA, 4185 bp, Homo sapiens
  misc_feature (2)..(2): n is a, c, g, or t
  misc_feature (2979)..(2979): n is a, c, g, or t
gnccgcttgtgatgaaactgtaacttacaagaaaagggctgggttttgaaaataacacaggctctaaaaaccctaagaagcggtgcaacttttggcaggaatcggggttagcgggacctcaagggctcactgcggctaagtgaacgctgactggtcctccagcgtgagctagaacagacgtctctatggtcaagtaaacagagcgtgtgctgtcttccccatgtggtggggttgcgcatgatcagtagctgcaccactagaaagatggcggagcaagagcaaagaaaaatccctttggttccagaaaatctcctgaaaaagaggaaggcttatcaagccctcaaagccacccaggcaaagcaggcacttttggcaaagaaggagcagaagaaaggaaaagggctcaggtttaagcgactggaatcattcctacatgattcctggcggcagaaacgtgacaaggtgcgtctcagacgactagaagtgaaacctcatgccttggaattgccagataaacattccttggcctttgttgtacgcatcgaaaggattgacggcgtgagtttactggtgcagagaaccattgcaagacttcgcctaaagaaaatttttagtggtgtctttgtaaaagtcaccccccagaatctaaaaatgctgcgtatagtggaaccttatgtgacctggggatttccaaatctgaagtctgtccgagaactcattttgaaacgtggacaagccaaggtcaagaataagaccatccctctgacagacaatacagtgattgaggagcacctggggaagttggcgtcatttgcttggaagacctcattcatgaaattgccttcccagggaagcatttccaggagatctcatggttcttgtgccctttccacctctcagtggcccgtcatgctaccaaaaatagagtgggcttcctcaaggagatgggcacacctggctatcggggtgaacgcatcaatcagctcatccgtcagctgaactagacccaggtgaggcagggctgaaaactgcccttgggctgacttttgataggccatgccttgccactttacaagttctttttgcatttactagtatttaagagtaaccttgagattgggaggaatagaggaggctggtacaaatagatggagacctgctgggatcagtgaatgcctgattaggacatggggctatgcatagcctaagagttataggcttaaagatgtcgagtaactaaaaactgtattgctggccgggcgcggtggctcacgcctgtaatcccagcactttgggaggccaaggcgggcagaccatgaggtcaggagattgagaccatcctggccaacatggtgaaaccctgtctctactaaaaatacaaaaatgagctgggtgtggtggcgcgtgcctgtagtcccagctactcgagaggctaaggcaggaaaatcgcttgaacccaggaggcagagattgcagtgagccaagattgcaccagtgcactccagctgggcgacagagcgagactccatctcggaaaaaaaaaaaaaaaaaaactattgctgcagtcattcagatggaaatgaggaaagaataatattaataactgatttcaaaaaggacttgaagatgtgaatcatctattttgctgaagaaatcttaactctttgaaattactttttattgctgttgtcatactcttaggtgccaaactgcggtaaattttttatcagtgaagtggaagcatgtgttttgttttggaaatttttatcaagtatcttcagagaagattatttcctgctttatcttcagaaactggaaagggtcaaagaaaagacagtagctggccggtcgtggtggctcatgcctgtaatcccaacacttagggaggctgaggtgggcagatcacctgaggttgggagttcgagaccagcctgaccaacatggagaaatgccatctctactaaaaatacaaaaattagccgggcatggtggcacgtgcctgtaatcccagctactcaggaggctgaggcaggagaatcgcttgaacctgggaggtggaagttgcagtgagctgagatcacgccattgcactccagcctgggcaacaagcgaaactctgtctcaaaaaaaaagaaaagacagtagcatatgttcatgtcaagcacctctcatcacagtcgagttccaaggaaaaattccagcgttttctgcattgggtgctgtgtcatctgaaatcggcacattccatggaggaaggagtcctgctttgttgcatgtatcctagggtttaatgttggtaaatgagtcactctagcatttgtagaaggctccctgagactcctgcagcagtcgaccaagcccaaggacataattgaatctggagagtcctggggccttgttttgaaaaagacttgaaatacacataggaagaaaggcataaaaataaatgttcacttgtctctgctgtgagtatgtgttccaacttttcagtgatggctttgagaattctcaaacttgactggctctaagtgtatctggtggctttgtatcgtaacctgaaactggcttagtactttttcctaaaagctcaggatttgagaatgaggaccccttcgccaggaaaacatgtatacactcaaaattttgcttgcagttctagggtgtttagacccttctcagatacctgtgcatcttatgggttttgtttttctctttgagacagtctcaccctgttgcccaggctggagcgcagtggcgtgatctcggctcattgcagcctccacctcctgggttcaagtgattctgcctcagccccttgatcagctgggattgcatgcatgtaccaccacacccggctaattcttgtatttttagtagagatggagacagagtttcaccatgtaggccaggctggtctcgaactcctgacctcaagtgatccacaagcctgggcctcccaaagtgctgggattacaggcntgagcaactgcgcccagctcttgtgtaccttatgtgaggaagtcctgctcaatcaggatcggtcacgcaggccctgatcttgctactctggttccatgtcctatggaagaccaaagtttaccaagatagatttttcccttcatagtggcagatagtgttaacccctgcaccatctgtaactcagaaatccccaccatttcttcccctgggcttcagaatagaattgcctggtttctctgatgatcagcatggttccttaaaacccaaatcagcaaggaatgaacaattttgtttggcatggatgaaattagcactgtttggctcgttaggccccaggcaggcaggcaccttaattttttccttgcatattctagtcttcagaagcattgccttttgtcctactggtagtgacatagaccaataacagggcatctggggattttaatcctgaaaacagtgagtctgatactgcttgtgtttttcatcagtgtccaccccaagtgggtcttcctgctattctcttcacttagttgcccctcacttgccatctgagcaattggcaaggatgtgccaggcctaggttaaacttggaaacatgcttgaccattctattccctggtcctttaagatcagtttggtaatcccagctacttgggaggctgaggcaagagaattgcttgaacccagggaggcagaggttgcagtgagccgagatcacaccattgcactccaccttgggcaacaaaagcaaaactctgtctcaaaaaaaaaaaaaaaaaaagtgccagcgtatgaggtaattagattggttctctccagaggtaacctgccaagaagagatgctatagatgttactcctatactgtaaaacattgtgaaatcagattactttaaaatgatgtattacaaagttatgcaaaaaagcagttgtgactatggaagcccaaggcttatatcccagctctgtcttacactaaatatgggtacagtgtttccactctgtccataaaatgggagctaatattctccaacctgtgtgcctgacatgatggttaaagggattaaacaaaacaatagtttgtaatttattctgtcagagcaaactgctggtaaataaaagggactaagttgacgaaaaataaattttaaaaaacctaataaaacaagtttgtaatttataattgtatacaaataaaagatgttaca

SEQ ID NO: 432756 - DNA, 3308 bp, Homo sapiens
  misc_feature (2)..(2): n is a, c, g, or t
  misc_feature (1861)..(1861): n is a, c, g, or t
gnccgcttgtgatgaaactgtaacttacaagaaaagggctgggttttgaaaataacacaggctctaaaaaccctaagaagcggtgcaacttttggcaggaatcggggttagcgggacctcaagggctcactgcggctaagtgaacgctgactggtcctccagcgtgagctagaacagacgtctctatggtcaagtaaacagagcgtgtgctgtcttccccatgtggtggggttgcgcatgatcagtagctgcaccactagaaagatggcggagcaagagcaaagaaaaatccctttggttccagaaaatctcctgaaaaagaggaaggcttatcaagccctcaaagccacccaggcaaagcaggcacttttggcaaagaaggagcagaagaaaggaaaagggctcaggtttaagcgactggaatcattcctacatgattcctggcggcagaaacgtgacaaggtgcgtctcagacgactagaagtgaaacctcatgccttggaattgccagataaacattccttggcctttgttgtacgcatcgaaaggattgacggcgtgagtttactggtgcagagaaccattgcaagacttcgcctaaagaaaatttttagtggtgtctttgtaaaagtcaccccccagaatctaaaaatgctgcgtatagtggaaccttatgtgacctggggatttccaaatctgaagtctgtccgagaactcattttgaaacgtggacaagccaaggtcaagaataagaccatccctctgacagacaatacagtgattgaggagcacctggggaagttggcgtcatttgcttggaagacctcattcatgaaattgccttcccagggaagcatttccaggagatctcatggttcttgtgccctttccacctctcagtggcccgtcatgctaccaaaaatagagtgggcttcctcaaggagatgggcacacctggctatcggggtgaacgcatcaatcagctcatccgtcagctgaactagacccaggtgaggcagggctgaaaactgcccttgggctgacttttgataggccatgccttgccactttacaagttctttttgcatttactagtatttaagagtaaccttgagattgggaggaatagaggaggctggtacaaatagatggagacctgctgggatcagtgaatgcctgattaggacatggggctatgcatagcctaagagttataggcttaaagatgtcgagtaactaaaaactgtattgctggccgggcgcggtggctcacgcctgtaatcccagcactttgggaggccaaggcgggcagaccatgaggtcaggagattgagaccatcctggccaacatggtgaaaccctgtctctactaaaaatacaaaaatgagctgggtgtggtggcgcgtgcctgtagtcccagctactcgagaggctaaggcaggaaaatcgcttgaacccaggaggcagagattgcagtgagccaagattgcaccagtgcactccagctgggcgacagagcgagactccatctcggaaaaaaaaaaaaaaaaaaactattgctgcagtcattcagatggaaatgaggaaagaataatattaataactgatttcaaaaaggacttgaagatgtgaatcatctattttgctgaagaaatcttaactctttgaaattactttttattgctgttgtcatactcttaggtgccaaactgcggtaaattttttatcagtgaagtggaagcatgtgttttgttttggaaatttttatcaagtatcttcagagaagattatttcctgctttatcttcagaaactggaaagggtcaaagaaaagacagtagctggccgggggattacaggcntgagcaactgcgcccagctcttgtgtaccttatgtgaggaagtcctgctcaatcaggatcggtcacgcaggccctgatcttgctactctggttccatgtcctatggaagaccaaagtttaccaagatagatttttcccttcatagtggcagatagtgttaacccctgcaccatctgtaactcagaaatccccaccatttcttcccctgggcttcagaatagaattgcctggtttctctgatgatcagcatggttccttaaaacccaaatcagcaaggaatgaacaattttgtttggcatggatgaaattagcactgtttggctcgttaggccccaggcaggcaggcaccttaattttttccttgcatattctagtcttcagaagcattgccttttgtcctactggtagtgacatagaccaataacagggcatctggggattttaatcctgaaaacagtgagtctgatactgcttgtgtttttcatcagtgtccaccccaagtgggtcttcctgctattctcttcacttagttgcccctcacttgccatctgagcaattggcaaggatgtgccaggcctaggttaaacttggaaacatgcttgaccattctattccctggtcctttaagatcagtttggctgcaattttggctccttggaccctcaagcatagctggtaaatcaagttagagatgtaactgccttaaaacatgccagcttaggctgggcacggtggctcacgcctgtaatctcaacacttcaggaggctgaggcaggcagatcacttgaggtcaggagttcgagaccagcctgaccaacatggagaaattctgtccctactgaaaatacaaaattagccggatgtggtggtgcatgcctgtaatcccagctacttgggaggctgaggcaagagaattgcttgaacccagggaggcagaggttgcagtgagccgagatcacaccattgcactccaccttgggcaacaaaagcaaaactctgtctcaaaaaaaaaaaaaaaaaaagtgccagcgtatgaggtaattagattggttctctccagaggtaacctgccaagaagagatgctatagatgttactcctatactgtaaaacattgtgaaatcagattactttaaaatgatgtattacaaagttatgcaaaaaagcagttgtgactatggaagcccaaggcttatatcccagctctgtcttacactaaatatgggtacagtgtttccactctgtccataaaatgggagctaatattctccaacctgtgtgcctgacatgatggttaaagggattaaacaaaacaatagtttgtaatttattctgtcagagcaaactgctggtaaataaaagggactaagttgacgaaaaataaattttaaaaaacctaataaaacaagtttgtaatttataattgtatacaaataaaagatgttaca

SEQ ID NO: 432757 - DNA, 2646 bp, Homo sapiens
  misc_feature (1199)..(1199): n is a, c, g, or t
gcgtggtcgcggccgaggtacgcggggagatgtaactgccttaaaacatgccagcttaggctgggcactcgtggtggctcatgcctgtaatcccaacacttagggaggctgaggtgggcagatcacctgaggttgggagttcgagaccagcctgaccaacatggagaaatgccatctctactaaaaatacaaaaattagccgggcatggtggcacgtgcctgtaatcccagctactcaggaggctgaggcaggagaatcgcttgaacctgggaggtggaagttgcagtgagctgagatcacgccattgcactccagcctgggcaacaagcgaaactctgtctcaaaaaaaaagaaaagacagtagcatatgttcatgtcaagcacctctcatcacagtcgagttccaaggaaaaattccagcgttttctgcattgggtgctgtgtcatctgaaatcggcacattccatggaggaaggagtcctgctttgttgcatgtatcctagggtttaatgttggtaaatgagtcactctagcatttgtagaaggctccctgagactcctgcagcagtcgaccaagcccaaggacataattgaatctggagagtcctggggccttgttttgaaaaagacttgaaatacacataggaagaaaggcataaaaataaatgttcacttgtctctgctgtgagtatgtgttccaacttttcagtgatggctttgagaattctcaaacttgactggctctaagtgtatctggtggctttgtatcgtaacctgaaactggcttagtactttttcctaaaagctcaggatttgagaatgaggaccccttcgccaggaaaacatgtatacactcaaaattttgcttgcagttctagggtgtttagacccttctcagatacctgtgcatcttatgggttttgtttttctctttgagacagtctcaccctgttgcccaggctggagcgcagtggcgtgatctcggctcattgcagcctccacctcctgggttcaagtgattctgcctcagccccttgatcagctgggattgcatgcatgtaccaccacacccggctaattcttgtatttttagtagagatggagacagagtttcaccatgtaggccaggctggtctcgaactcctgacctcaagtgatccacaagcctgggcctcccaaagtgctgggattacaggcntgagcaactgcgcccagctcttgtgtaccttatgtgaggaagtcctgctcaatcaggatcggtcacgcaggccctgatcttgctactctggttccatgtcctatggaagaccaaagtttaccaagatagatttttcccttcatagtggcagatagtgttaacccctgcaccatctgtaactcagaaatccccaccatttcttcccctgggcttcagaatagaattgcctggtttctctgatgatcagcatggttccttaaaacccaaatcagcaaggaatgaacaattttgtttggcatggatgaaattagcactgtttggctcgttaggccccaggcaggcaggcaccttaattttttccttgcatattctagtcttcagaagcattgccttttgtcctactggtagtgacatagaccaataacagggcatctggggattttaatcctgaaaacagtgagtctgatactgcttgtgtttttcatcagtgtccaccccaagtgggtcttcctgctattctcttcacttagttgcccctcacttgccatctgagcaattggcaaggatgtgccaggcctaggttaaacttggaaacatgcttgaccattctattccctggtcctttaagatcagtttggctgcaattttggctccttggaccctcaagcatagctggtaaatcaagttagagatgtaactgccttaaaacatgccagcttaggctgggcacggtggctcacgcctgtaatctcaacacttcaggaggctgaggcaggcagatcacttgaggtcaggagttcgagaccagcctgaccaacatggagaaattctgtccctactgaaaatacaaaattagccggatgtggtggtgcatgcctgtaatcccagctacttgggaggctgaggcaagagaattgcttgaacccagggaggcagaggttgcagtgagccgagatcacaccattgcactccaccttgggcaacaaaagcaaaactctgtctcaaaaaaaaaaaaaaaaaaagtgccagcgtatgaggtaattagattggttctctccagaggtaacctgccaagaagagatgctatagatgttactcctatactgtaaaacattgtgaaatcagattactttaaaatgatgtattacaaagttatgcaaaaaagcagttgtgactatggaagcccaaggcttatatcccagctctgtcttacactaaatatgggtacagtgtttccactctgtccataaaatgggagctaatattctccaacctgtgtgcctgacatgatggttaaagggattaaacaaaacaatagtttgtaatttattctgtcagagcaaactgctggtaaataaaagggactaagttgacgaaaaataaattttaaaaaacctaataaaacaagtttgtaatttataattgtatacaaataaaagatgttaca

SEQ ID NO: 432758 - DNA, 3553 bp, Homo sapiens
  misc_feature (2)..(2): n is a, c, g, or t
gnccgcttgtgatgaaactgtaacttacaagaaaagggctgggttttgaaaataacacaggctctaaaaaccctaagaagcggtgcaacttttggcaggaatcggggttagcgggacctcaagggctcactgcggctaagtgaacgctgactggtcctccagcgtgagctagaacagacgtctctatggtcaagtaaacagagcgtgtgctgtcttccccatgtggtggggttgcgcatgatcagtagctgcaccactagaaagatggcggagcaagagcaaagaaaaatccctttggttccagaaaatctcctgaaaaagaggaaggcttatcaagccctcaaagccacccaggcaaagcaggcacttttggcaaagaaggagcagaagaaaggaaaagggctcaggtttaagcgactggaatcattcctacatgattcctggcggcagaaacgtgacaaggtgcgtctcagacgactagaagtgaaacctcatgccttggaattgccagataaacattccttggcctttgttgtacgcatcgaaaggattgacggcgtgagtttactggtgcagagaaccattgcaagacttcgcctaaagaaaatttttagtggtgtctttgtaaaagtcaccccccagaatctaaaaatgctgcgtatagtggaaccttatgtgacctggggatttccaaatctgaagtctgtccgagaactcattttgaaacgtggacaagccaaggtcaagaataagaccatccctctgacagacaatacagtgattgaggagcacctggggaagttggcgtcatttgcttggaagacctcattcatgaaattgccttcccagggaagcatttccaggagatctcatggttcttgtgccctttccacctctcagtggcccgtcatgctaccaaaaatagagtgggcttcctcaaggagatgggcacacctggctatcggggtgaacgcatcaatcagctcatccgtcagctgaactagacccaggtgaggcagggctgaaaactgcccttgggctgacttttgataggccatgccttgccactttacaagttctttttgcatttactagtatttaagagtaaccttgagattgggaggaatagaggaggctggtacaaatagatggagacctgctgggatcagtgaatgcctgattaggacatggggctatgcatagcctaagagttataggcttaaagatgtcgagtaactaaaaactgtattgctggccgggcgcggtggctcacgcctgtaatcccagcactttgggaggccaaggcgggcagaccatgaggtcaggagattgagaccatcctggccaacatggtgaaaccctgtctctactaaaaatacaaaaatgagctgggtgtggtggcgcgtgcctgtagtcccagctactcgagaggctaaggcaggaaaatcgcttgaacccaggaggcagagattgcagtgagccaagattgcaccagtgcactccagctgggcgacagagcgagactccatctcggaaaaaaaaaaaaaaaaaaactattgctgcagtcattcagatggaaatgaggaaagaataatattaataactgatttcaaaaaggacttgaagatgtgaatcatctattttgctgaagaaatcttaactctttgaaattactttttattgctgttgtcatactcttaggtgccaaactgcggtaaattttttatcagtgaagtggaagcatgtgttttgttttggaaatttttatcaagtatcttcagagaagattatttcctgctttatcttcagaaactggaaagggtcaaagaaaagacagtagctggccggtcgtggtggctcatgcctgtaatcccaacacttagggaggctgaggtgggcagatcacctgaggttgggagttcgagaccagcctgaccaacatggagaaatgccatctctactaaaaatacaaaaattagccgggcatggtggcacgtgcctgtaatcccagctactcaggaggctgaggcaggagaatcgcttgaacctgggaggtggaagttgcagtgagctgagatcacgccattgcactccagcctgggcaacaagcgaaactctgtctcaaaaaaaaagaaaagacagtagcatatgttcatgtcaagcacctctcatcacagtcgagttccaaggaaaaattccagcgttttctgcattgggtgctgtgtcatctgaaatcggcacattccatggaggaaggagtcctgctttgttgcatgtatcctagggtttaatgttggtaaatgagtcactctagcatttgtagaaggctccctgagactcctgcagcagtcgaccaagcccaaggacataattgaatctggagagtcctggggccttgttttgaaaaagacttgaaatacacataggaagaaaggcataaaaataaatgttcacttgtctctgctgtgagtatgtgttccaacttttcagtgatggctttgagaattctcaaacttgactggctctaagtgtatctggtggctttgtatcgtaacctgaaactggcttagtactttttcctaaaagctcaggatttgagaatgaggaccccttcgccaggaaaacatgtatacactcaaaattttgcttgcagttctagggtgtttagacccttctcagatacctgtgcatcttatgggttttgtttttctctttgagacagtctcaccctgttgcccaggctggagcgcagtggcgtgatctcggctcattgcagcctccacctcctgggttcaagtgattctgcctcagccccttgatcagctgggattgcatgcatgtaccaccacacccggctaattcttgtatttttagtagagatggagacagagtttcaccatgtgttcgagaccagcctgaccaacatggagaaattctgtccctactgaaaatacaaaattagccggatgtggtggtgcatgcctgtaatcccagctacttgggaggctgaggcaagagaattgcttgaacccagggaggcagaggttgcagtgagccgagatcacaccattgcactccaccttgggcaacaaaagcaaaactctgtctcaaaaaaaaaaaaaaaaaaagtgccagcgtatgaggtaattagattggttctctccagaggtaacctgccaagaagagatgctatagatgttactcctatactgtaaaacattgtgaaatcagattactttaaaatgatgtattacaaagttatgcaaaaaagcagttgtgactatggaagcccaaggcttatatcccagctctgtcttacactaaatatgggtacagtgtttccactctgtccataaaatgggagctaatattctccaacctgtgtgcctgacatgatggttaaagggattaaacaaaacaatagtttgtaatttattctgtcagagcaaactgctggtaaataaaagggactaagttgacgaaaaataaattttaaaaaacctaataaaacaagtttgtaatttataattgtatacaaataaaagatgttaca

SEQ ID NO: 432759 - DNA, 2711 bp, Homo sapiens
  misc_feature (2)..(2): n is a, c, g, or t
  misc_feature (1264)..(1264): n is a, c, g, or t
gnccgcttgtgatgaaactgtaacttacaagaaaagggctgggttttgaaaataacacaggctctaaaaaccctaagaagcggtgcaacttttggcaggaatcggggttagcgggacctcaagggctcactgcggctaagtgaacgctgactggtcctccagcgtgagctagaacagacgtctctatggtcaagtaaacagagcgtgtgctgtcttccccatgtggtggggttgcgcatgatcagtagctgcaccactagaaagatggcggagcaagagcaaagaaaaatccctttggttccagaaaatctcctgaaaaagaggaaggcttatcaagccctcaaagccacccaggcaaagcaggcacttttggcaaagaaggagcagaagaaaggaaaagggctcaggtttaagcgactggaatcattcctacatgattcctggcggcagaaacgtgacaaggtgcgtctcagacgactagaagtgaaacctcatgccttggaattgccagataaacattccttggcctttgttgtacgcatcgaaaggattgacggcgtgagtttactggtgcagagaaccattgcaagacttcgcctaaagaaaatttttagtggtgtctttgtaaaagtcaccccccagaatctaaaaatgctgcgtatagtggaaccttatgtgacctggggatttccaaatctgaagtctgtccgagaactcattttgaaacgtggacaagccaaggtcaagaataagaccatccctctgacagacaatacagtgattgaggagcacctggggaagttggcgtcatttgcttggaagacctcattcatgaaattgccttcccagggaagcatttccaggagatctcatggttcttgtgccctttccacctctcagtggcccgtcatgctaccaaaaatagagtgggcttcctcaaggagatgggcacacctggctatcggggtgaacgcatcaatcagctcatccgtcagctgaactagacccaggtgaggcagggctgaaaactgcccttgggctgacttttgataggccatgccttgccactttacaagttctttttgcatttactagtatttaagagtaaccttgagattgggaggaatagaggaggctggtacaaatagatggagacctgctgggatcagtgaatgcctgattaggacatggggctatgcatagcctaagagttataggcttaaagatgtcgagtaactaaaaactgtattggggattacaggcntgagcaactgcgcccagctcttgtgtaccttatgtgaggaagtcctgctcaatcaggatcggtcacgcaggccctgatcttgctactctggttccatgtcctatggaagaccaaagtttaccaagatagatttttcccttcatagtggcagatagtgttaacccctgcaccatctgtaactcagaaatccccaccatttcttcccctgggcttcagaatagaattgcctggtttctctgatgatcagcatggttccttaaaacccaaatcagcaaggaatgaacaattttgtttggcatggatgaaattagcactgtttggctcgttaggccccaggcaggcaggcaccttaattttttccttgcatattctagtcttcagaagcattgccttttgtcctactggtagtgacatagaccaataacagggcatctggggattttaatcctgaaaacagtgagtctgatactgcttgtgtttttcatcagtgtccaccccaagtgggtcttcctgctattctcttcacttagttgcccctcacttgccatctgagcaattggcaaggatgtgccaggcctaggttaaacttggaaacatgcttgaccattctattccctggtcctttaagatcagtttggctgcaattttggctccttggaccctcaagcatagctggtaaatcaagttagagatgtaactgccttaaaacatgccagcttaggctgggcacggtggctcacgcctgtaatctcaacacttcaggaggctgaggcaggcagatcacttgaggtcaggagttcgagaccagcctgaccaacatggagaaattctgtccctactgaaaatacaaaattagccggatgtggtggtgcatgcctgtaatcccagctacttgggaggctgaggcaagagaattgcttgaacccagggaggcagaggttgcagtgagccgagatcacaccattgcactccaccttgggcaacaaaagcaaaactctgtctcaaaaaaaaaaaaaaaaaaagtgccagcgtatgaggtaattagattggttctctccagaggtaacctgccaagaagagatgctatagatgttactcctatactgtaaaacattgtgaaatcagattactttaaaatgatgtattacaaagttatgcaaaaaagcagttgtgactatggaagcccaaggcttatatcccagctctgtcttacactaaatatgggtacagtgtttccactctgtccataaaatgggagctaatattctccaacctgtgtgcctgacatgatggttaaagggattaaacaaaacaatagtttgtaatttattctgtcagagcaaactgctggtaaataaaagggactaagttgacgaaaaataaattttaaaaaacctaataaaacaagtttgtaatttataattgtatacaaataaaagatgttaca

SEQ ID NO: 432760 - DNA, 3411 bp, Homo sapiens
  misc_feature (2)..(2): n is a, c, g, or t
gnccgcttgtgatgaaactgtaacttacaagaaaagggctgggttttgaaaataacacaggctctaaaaaccctaagaagcggtgcaacttttggcaggaatcggggttagcgggacctcaagggctcactgcggctaagtgaacgctgactggtcctccagcgtgagctagaacagacgtctctatggtcaagtaaacagagcgtgtgctgtcttccccatgtggtggggttgcgcatgatcagtagctgcaccactagaaagatggcggagcaagagcaaagaaaaatccctttggttccagaaaatctcctgaaaaagaggaaggcttatcaagccctcaaagccacccaggcaaagcaggcacttttggcaaagaaggagcagaagaaaggaaaagggctcaggtttaagcgactggaatcattcctacatgattcctggcggcagaaacgtgacaaggtgcgtctcagacgactagaagtgaaacctcatgccttggaattgccagataaacattccttggcctttgttgtacgcatcgaaaggattgacggcgtgagtttactggtgcagagaaccattgcaagacttcgcctaaagaaaatttttagtggtgtctttgtaaaagtcaccccccagaatctaaaaatgctgcgtatagtggaaccttatgtgacctggggatttccaaatctgaagtctgtccgagaactcattttgaaacgtggacaagccaaggtcaagaataagaccatccctctgacagacaatacagtgattgaggagcacctggggaagttggcgtcatttgcttggaagacctcattcatgaaattgccttcccagggaagcatttccaggagatctcatggttcttgtgccctttccacctctcagtggcccgtcatgctaccaaaaatagagtgggcttcctcaaggagatgggcacacctggctatcggggtgaacgcatcaatcagctcatccgtcagctgaactagacccaggtgaggcagggctgaaaactgcccttgggctgacttttgataggccatgccttgccactttacaagttctttttgcatttactagtatttaagagtaaccttgagattgggaggaatagaggaggctggtacaaatagatggagacctgctgggatcagtgaatgcctgattaggacatggggctatgcatagcctaagagttataggcttaaagatgtcgagtaactaaaaactgtattgctggccgggcgcggtggctcacgcctgtaatcccagcactttgggaggccaaggcgggcagaccatgaggtcaggagattgagaccatcctggccaacatggtgaaaccctgtctctactaaaaatacaaaaatgagctgggtgtggtggcgcgtgcctgtagtcccagctactcgagaggctaaggcaggaaaatcgcttgaacccaggaggcagagattgcagtgagccaagattgcaccagtgcactccagctgggcgacagagcgagactccatctcggaaaaaaaaaaaaaaaaaaactattgctgcagtcattcagatggaaatgaggaaagaataatattaataactgatttcaaaaaggacttgaagatgtgaatcatctattttgctgaagaaatcttaactctttgaaattactttttattgctgttgtcatactcttaggtgccaaactgcggtaaattttttatcagtgaagtggaagcatgtgttttgttttggaaatttttatcaagtatcttcagagaagattatttcctgctttatcttcagaaactggaaagggtcaaagaaaagacagtagctggccggtcgtggtggctcatgcctgtaatcccaacacttagggaggctgaggtgggcagatcacctgaggttgggagttcgagaccagcctgaccaacatggagaaatgccatctctactaaaaatacaaaaattagccgggcatggtggcacgtgcctgtaatcccagctactcaggaggctgaggcaggagaatcgcttgaacctgggaggtggaagttgcagtgagctgagatcacgccattgcactccagcctgggcaacaagcgaaactctgtctcaaaaaaaaagaaaagacagtagcatatgttcatgtcaagcacctctcatcacagtcgagttccaaggaaaaattccagcgttttctgcattgggtgctgtgtcatctgaaatcggcacattccatggaggaaggagtcctgctttgttgcatgtatcctagggtttaatgttggtaaatgagtcactctagcatttgtagaaggctccctgagactcctgcagcagtcgaccaagcccaaggacataattgaatctggagagtcctggggccttgttttgaaaaagacttgaaatacacataggaagaaaggcataaaaataaatgttcacttgtctctgctgtgagtatgtgttccaacttttcagtgatggctttgagaattctcaaacttgactggctctaagtgtatctggtggctttgtatcgtaacctgaaactggcttagtactttttcctaaaagctcaggatttgagaatgaggaccccttcgccaggaaaacatgtatacactcaaaattttgcttgcagttctagggtgtttagacccttctcagatacctgtgcatcttatgggttttgtttttctctttgagacagtctcaccctgttgcccaggctggagcgcagtggcgtgatctcggctcattgcagcctccacctcctgggttcaagtgattctgcctcagccccttgatcagctgggattgcatgcatgtaccaccacacccggctaattcttgtatttttagtagagatggagacagagtttcaccatgtgttgcagtgagccgagatcacaccattgcactccaccttgggcaacaaaagcaaaactctgtctcaaaaaaaaaaaaaaaaaaagtgccagcgtatgaggtaattagattggttctctccagaggtaacctgccaagaagagatgctatagatgttactcctatactgtaaaacattgtgaaatcagattactttaaaatgatgtattacaaagttatgcaaaaaagcagttgtgactatggaagcccaaggcttatatcccagctctgtcttacactaaatatgggtacagtgtttccactctgtccataaaatgggagctaatattctccaacctgtgtgcctgacatgatggttaaagggattaaacaaaacaatagtttgtaatttattctgtcagagcaaactgctggtaaataaaagggactaagttgacgaaaaataaattttaaaaaacctaataaaacaagtttgtaatttataattgtatacaaataaaagatgttaca

SEQ ID NO: 432761 - DNA, 2575 bp, Homo sapiens
  misc_feature (2)..(2): n is a, c, g, or t
  misc_feature (1128)..(1128): n is a, c, g, or t
gnccgcttgtgatgaaactgtaacttacaagaaaagggctgggttttgaaaataacacaggctctaaaaaccctaagaagcggtgcaacttttggcaggaatcggggttagcgggacctcaagggctcactgcggctaagtgaacgctgactggtcctccagcgtgagctagaacagacgtctctatggtcaagtaaacagagcgtgtgctgtcttccccatgtggtggggttgcgcatgatcagtagctgcaccactagaaagatggcggagcaagacagaagaaaggaaaagggctcaggtttaagcgactggaatcattcctacatgattcctggcggcagaaacgtgacaaggtgcgtctcagacgactagaagtgaaacctcatgccttggaattgccagataaacattccttggcctttgttgtacgcatcgaaaggattgacggcgtgagtttactggtgcagagaaccattgcaagacttcgcctaaagaaaatttttagtggtgtctttgtaaaagtcaccccccagaatctaaaaatgctgcgtatagtggaaccttatgtgacctggggatttccaaatctgaagtctgtccgagaactcattttgaaacgtggacaagccaaggtcaagaataagaccatccctctgacagacaatacagtgattgaggagcacctggggaagttggcgtcatttgcttggaagacctcattcatgaaattgccttcccagggaagcatttccaggagatctcatggttcttgtgccctttccacctctcagtggcccgtcatgctaccaaaaatagagtgggcttcctcaaggagatgggcacacctggctatcggggtgaacgcatcaatcagctcatccgtcagctgaactagacccaggtgccaaactgcggtaaattttttatcagtgaagtggaagcatgtgttttgttttggaaatttttatcaagtatcttcagagaagattatttcctgctttatcttcagaaactggaaagggtcaaagaaaagacagtagctggccggaggccaggctggtctcgaactcctgacctcaagtgatccacaagcctgggcctcccaaagtgctgggattacaggcntgagcaactgcgcccagctcttgtgtaccttatgtgaggaagtcctgctcaatcaggatcggtcacgcaggccctgatcttgctactctggttccatgtcctatggaagaccaaagtttaccaagatagatttttcccttcatagtggcagatagtgttaacccctgcaccatctgtaactcagaaatccccaccatttcttcccctgggcttcagaatagaattgcctggtttctctgatgatcagcatggttccttaaaacccaaatcagcaaggaatgaacaattttgtttggcatggatgaaattagcactgtttggctcgttaggccccaggcaggcaggcaccttaattttttccttgcatattctagtcttcagaagcattgccttttgtcctactggtagtgacatagaccaataacagggcatctggggattttaatcctgaaaacagtgagtctgatactgcttgtgtttttcatcagtgtccaccccaagtgggtcttcctgctattctcttcacttagttgcccctcacttgccatctgagcaattggcaaggatgtgccaggcctaggttaaacttggaaacatgcttgaccattctattccctggtcctttaagatcagtttggctgcaattttggctccttggaccctcaagcatagctggtaaatcaagttagagatgtaactgccttaaaacatgccagcttaggctgggcacggtggctcacgcctgtaatctcaacacttcaggaggctgaggcaggcagatcacttgaggtcaggagttcgagaccagcctgaccaacatggagaaattctgtccctactgaaaatacaaaattagccggatgtggtggtgcatgcctgtaatcccagctacttgggaggctgaggcaagagaattgcttgaacccagggaggcagaggttgcagtgagccgagatcacaccattgcactccaccttgggcaacaaaagcaaaactctgtctcaaaaaaaaaaaaaaaaaaagtgccagcgtatgaggtaattagattggttctctccagaggtaacctgccaagaagagatgctatagatgttactcctatactgtaaaacattgtgaaatcagattactttaaaatgatgtattacaaagttatgcaaaaaagcagttgtgactatggaagcccaaggcttatatcccagctctgtcttacactaaatatgggtacagtgtttccactctgtccataaaatgggagctaatattctccaacctgtgtgcctgacatgatggttaaagggattaaacaaaacaatagtttgtaatttattctgtcagagcaaactgctggtaaataaaagggactaagttgacgaaaaataaattttaaaaaacctaataaaacaagtttgtaatttataattgtatacaaataaaagatgttaca

SEQ ID NO: 432762 - DNA, 3492 bp, Homo sapiens
  misc_feature (2)..(2): n is a, c, g, or t
gnccgcttgtgatgaaactgtaacttacaagaaaagggctgggttttgaaaataacacaggctctaaaaaccctaagaagcggtgcaacttttggcaggaatcggggttagcgggacctcaagggctcactgcggctaagtgaacgctgactggtcctccagcgtgagctagaacagacgtctctatggtcaagtaaacagagcgtgtgctgtcttccccatgtggtggggttgcgcatgatcagtagctgcaccactagaaagatggcggagcaagagcaaagaaaaatccctttggttccagaaaatctcctgaaaaagaggaaggcttatcaagccctcaaagccacccaggcaaagcaggcacttttggcaaagaaggagcagaagaaaggaaaagggctcaggtttaagcgactggaatcattcctacatgattcctggcggcagaaacgtgacaaggtgcgtctcagacgactagaagtgaaacctcatgccttggaattgccagataaacattccttggcctttgttgtacgcatcgaaaggattgacggcgtgagtttactggtgcagagaaccattgcaagacttcgcctaaagaaaatttttagtggtgtctttgtaaaagtcaccccccagaatctaaaaatgctgcgtatagtggaaccttatgtgacctggggatttccaaatctgaagtctgtccgagaactcattttgaaacgtggacaagccaaggtcaagaataagaccatccctctgacagacaatacagtgattgaggagcacctggggaagttggcgtcatttgcttggaagacctcattcatgaaattgccttcccagggaagcatttccaggagatctcatggttcttgtgccctttccacctctcagtggcccgtcatgctaccaaaaatagagtgggcttcctcaaggagatgggcacacctggctatcggggtgaacgcatcaatcagctcatccgtcagctgaactagacccaggtgaggcagggctgaaaactgcccttgggctgacttttgataggccatgccttgccactttacaagttctttttgcatttactagtatttaagagtaaccttgagattgggaggaatagaggaggctggtacaaatagatggagacctgctgggatcagtgaatgcctgattaggacatggggctatgcatagcctaagagttataggcttaaagatgtcgagtaactaaaaactgtattgctggccgggcgcggtggctcacgcctgtaatcccagcactttgggaggccaaggcgggcagaccatgaggtcaggagattgagaccatcctggccaacatggtgaaaccctgtctctactaaaaatacaaaaatgagctgggtgtggtggcgcgtgcctgtagtcccagctactcgagaggctaaggcaggaaaatcgcttgaacccaggaggcagagattgcagtgagccaagattgcaccagtgcactccagctgggcgacagagcgagactccatctcggaaaaaaaaaaaaaaaaaaactattgctgcagtcattcagatggaaatgaggaaagaataatattaataactgatttcaaaaaggacttgaagatgtgaatcatctattttgctgaagaaatcttaactctttgaaattactttttattgctgttgtcatactcttaggtgccaaactgcggtaaattttttatcagtgaagtggaagcatgtgttttgttttggaaatttttatcaagtatcttcagagaagattatttcctgctttatcttcagaaactggaaagggtcaaagaaaagacagtagctggccggtcgtggtggctcatgcctgtaatcccaacacttagggaggctgaggtgggcagatcacctgaggttgggagttcgagaccagcctgaccaacatggagaaatgccatctctactaaaaatacaaaaattagccgggcatggtggcacgtgcctgtaatcccagctactcaggaggctgaggcaggagaatcgcttgaacctgggaggtggaagttgcagtgagctgagatcacgccattgcactccagcctgggcaacaagcgaaactctgtctcaaaaaaaaagaaaagacagtagcatatgttcatgtcaagcacctctcatcacagtcgagttccaaggaaaaattccagcgttttctgcattgggtgctgtgtcatctgaaatcggcacattccatggaggaaggagtcctgctttgttgcatgtatcctagggtttaatgttggtaaatgagtcactctagcatttgtagaaggctccctgagactcctgcagcagtcgaccaagcccaaggacataattgaatctggagagtcctggggccttgttttgaaaaagacttgaaatacacataggaagaaaggcataaaaataaatgttcacttgtctctgctgtgagtatgtgttccaacttttcagtgatggctttgagaattctcaaacttgactggctctaagtgtatctggtggctttgtatcgtaacctgaaactggcttagtactttttcctaaaagctcaggatttgagaatgaggaccccttcgccaggaaaacatgtatacactcaaaattttgcttgcagttctagggtgtttagacccttctcagatacctgtgcatcttatgggttttgtttttctctttgagacagtctcaccctgttgcccaggctggagcgcagtggcgtgatctcggctcattgcagcctccacctcctgggttcaagtgattctgcctcagccccttgatcagctgggattgcatgcatgtgttcgagaccagcctgaccaacatggagaaattctgtccctactgaaaatacaaaattagccggatgtggtggtgcatgcctgtaatcccagctacttgggaggctgaggcaagagaattgcttgaacccagggaggcagaggttgcagtgagccgagatcacaccattgcactccaccttgggcaacaaaagcaaaactctgtctcaaaaaaaaaaaaaaaaaaagtgccagcgtatgaggtaattagattggttctctccagaggtaacctgccaagaagagatgctatagatgttactcctatactgtaaaacattgtgaaatcagattactttaaaatgatgtattacaaagttatgcaaaaaagcagttgtgactatggaagcccaaggcttatatcccagctctgtcttacactaaatatgggtacagtgtttccactctgtccataaaatgggagctaatattctccaacctgtgtgcctgacatgatggttaaagggattaaacaaaacaatagtttgtaatttattctgtcagagcaaactgctggtaaataaaagggactaagttgacgaaaaataaattttaaaaaacctaataaaacaagtttgtaatttataattgtatacaaataaaagatgttaca

SEQ ID NO: 432763 - DNA, 3253 bp, Homo sapiens
  misc_feature (2)..(2): n is a, c, g, or t
gnccgcttgtgatgaaactgtaacttacaagaaaagggctgggttttgaaaataacacaggctctaaaaaccctaagaagcggtgcaacttttggcaggaatcggggttagcgggacctcaagggctcactgcggctaagtgaacgctgactggtcctccagcgtgagctagaacagacgtctctatggtcaagtaaacagagcgtgtgctgtcttccccatgtggtggggttgcgcatgatcagtagctgcaccactagaaagatggcggagcaagagcaaagaaaaatccctttggttccagaaaatctcctgaaaaagaggaaggcttatcaagccctcaaagccacccaggcaaagcaggcacttttggcaaagaaggagcagaagaaaggaaaagggctcaggtttaagcgactggaatcattcctacatgattcctggcggcagaaacgtgacaaggtgcgtctcagacgactagaagtgaaacctcatgccttggaattgccagataaacattccttggcctttgttgtacgcatcgaaaggattgacggcgtgagtttactggtgcagagaaccattgcaagacttcgcctaaagaaaatttttagtggtgtctttgtaaaagtcaccccccagaatctaaaaatgctgcgtatagtggaaccttatgtgacctggggatttccaaatctgaagtctgtccgagaactcattttgaaacgtggacaagccaaggtcaagaataagaccatccctctgacagacaatacagtgattgaggagcacctggggaagttggcgtcatttgcttggaagacctcattcatgaaattgccttcccagggaagcatttccaggagatctcatggttcttgtgccctttccacctctcagtggcccgtcatgctaccaaaaatagagtgggcttcctcaaggagatgggcacacctggctatcggggtgaacgcatcaatcagctcatccgtcagctgaactagacccaggtgaggcagggctgaaaactgcccttgggctgacttttgataggccatgccttgccactttacaagttctttttgcatttactagtatttaagagtaaccttgagattgggaggaatagaggaggctggtacaaatagatggagacctgctgggatcagtgaatgcctgattaggacatggggctatgcatagcctaagagttataggcttaaagatgtcgagtaactaaaaactgtattgctggccgggcgcggtggctcacgcctgtaatcccagcactttgggaggccaaggcgggcagaccatgaggtcaggagattgagaccatcctggccaacatggtgaaaccctgtctctactaaaaatacaaaaatgagctgggtgtggtggcgcgtgcctgtagtcccagctactcgagaggctaaggcaggaaaatcgcttgaacccaggaggcagagattgcagtgagccaagattgcaccagtgcactccagctgggcgacagagcgagactccatctcggaaaaaaaaaaaaaaaaaaactattgctgcagtcattcagatggaaatgaggaaagaataatattaataactgatttcaaaaaggacttgaagatgtgaatcatctattttgctgaagaaatcttaactctttgaaattactttttattgctgttgtcatactcttaggtgccaaactgcggtaaattttttatcagtgaagtggaagcatgtgttttgttttggaaatttttatcaagtatcttcagagaagattatttcctgctttatcttcagaaactggaaagggtcaaagaaaagacagtagctggccggtcgtggtggctcatgcctgtaatcccaacacttagggaggctgaggtgggcagatcacctgaggttgggagttcgagaccagcctgaccaacatggagaaatgccatctctactaaaaatacaaaaattagccgggcatggtggcacgtgcctgtaatcccagctactcaggaggctgaggcaggagaatcgcttgaacctgggaggtggaagttgcagtgagctgagatcacgccattgcactccagcctgggcaacaagcgaaactctgtctcaaaaaaaaagaaaagacagtagcatatgttcatgtcaagcacctctcatcacagtcgagttccaaggaaaaattccagcgttttctgcattgggtgctgtgtcatctgaaatcggcacattccatggaggaaggagtcctgctttgttgcatgtatcctagggtttaatgttggtaaatgagtcactctagcatttgtagaaggctccctgagactcctgcagcagtcgaccaagcccaaggacataattgaatctggagagtcctggggccttgttttgaaaaagacttgaaatacacataggaagaaaggcataaaaataaatgttcacttgtctctgctgtgagtatgtgttccaacttttcagtgatggctttgagaattctcaaacttgactggctctaagtgtatctggtggctttgtatcgtaacctgaaactggcttagtactttttcctaaaagctcaggatttgagaatgaggaccccttcgccaggaaaacatgtatacactcaaaattttgcttgcagttctagggtgtttagacccttctcagataccttaatcccagctacttgggaggctgaggcaagagaattgcttgaacccagggaggcagaggttgcagtgagccgagatcacaccattgcactccaccttgggcaacaaaagcaaaactctgtctcaaaaaaaaaaaaaaaaaaagtgccagcgtatgaggtaattagattggttctctccagaggtaacctgccaagaagagatgctatagatgttactcctatactgtaaaacattgtgaaatcagattactttaaaatgatgtattacaaagttatgcaaaaaagcagttgtgactatggaagcccaaggcttatatcccagctctgtcttacactaaatatgggtacagtgtttccactctgtccataaaatgggagctaatattctccaacctgtgtgcctgacatgatggttaaagggattaaacaaaacaatagtttgtaatttattctgtcagagcaaactgctggtaaataaaagggactaagttgacgaaaaataaattttaaaaaacctaataaaacaagtttgtaatttataattgtatacaaataaaagatgttaca

SEQ ID NO: 432764 - DNA, 3086 bp, Homo sapiens
  misc_feature (2)..(2): n is a, c, g, or t
gnccgcttgtgatgaaactgtaacttacaagaaaagggctgggttttgaaaataacacaggctctaaaaaccctaagaagcggtgcaacttttggcaggaatcggggttagcgggacctcaagggctcactgcggctaagtgaacgctgactggtcctccagcgtgagctagaacagacgtctctatggtcaagtaaacagagcgtgtgctgtcttccccatgtggtggggttgcgcatgatcagtagctgcaccactagaaagatggcggagcaagagcaaagaaaaatccctttggttccagaaaatctcctgaaaaagaggaaggcttatcaagccctcaaagccacccaggcaaagcaggcacttttggcaaagaaggagcagaagaaaggaaaagggctcaggtttaagcgactggaatcattcctacatgattcctggcggcagaaacgtgacaaggtgcgtctcagacgactagaagtgaaacctcatgccttggaattgccagataaacattccttggcctttgttgtacgcatcgaaaggattgacggcgtgagtttactggtgcagagaaccattgcaagacttcgcctaaagaaaatttttagtggtgtctttgtaaaagtcaccccccagaatctaaaaatgctgcgtatagtggaaccttatgtgacctggggatttccaaatctgaagtctgtccgagaactcattttgaaacgtggacaagccaaggtcaagaataagaccatccctctgacagacaatacagtgattgaggagcacctggggaagttggcgtcatttgcttggaagacctcattcatgaaattgccttcccagggaagcatttccaggagatctcatggttcttgtgccctttccacctctcagtggcccgtcatgctaccaaaaatagagtgggcttcctcaaggagatgggcacacctggctatcggggtgaacgcatcaatcagctcatccgtcagctgaactagacccaggtgaggcagggctgaaaactgcccttgggctgacttttgataggccatgccttgccactttacaagttctttttgcatttactagtatttaagagtaaccttgagattgggaggaatagaggaggctggtacaaatagatggagacctgctgggatcagtgaatgcctgattaggacatggggctatgcatagcctaagagttataggcttaaagatgtcgagtaactaaaaactgtattgctggccgggcgcggtggctcacgcctgtaatcccagcactttgggaggccaaggcgggcagaccatgaggtcaggagattgagaccatcctggccaacatggtgaaaccctgtctctactaaaaatacaaaaatgagctgggtgtggtggcgcgtgcctgtagtcccagctactcgagaggctaaggcaggaaaatcgcttgaacccaggaggcagagattgcagtgagccaagattgcaccagtgcactccagctgggcgacagagcgagactccatctcggaaaaaaaaaaaaaaaaaaactattgctgcagtcattcagatggaaatgaggaaagaataatattaataactgatttcaaaaaggacttgaagatgtgaatcatctattttgctgaagaaatcttaactctttgaaattactttttattgctgttgtcatactcttaggtgccaaactgcggtaaattttttatcagtgaagtggaagcatgtgttttgttttggaaatttttatcaagtatcttcagagaagattatttcctgctttatcttcagaaactggaaagggtcaaagaaaagacagtagctggccggtcgtggtggctcatgcctgtaatcccaacacttagggaggctgaggtgggcagatcacctgaggttgggagttcgagaccagcctgaccaacatggagaaatgccatctctactaaaaatacaaaaattagccgggcatggtggcacgtgcctgtaatcccagctactcaggaggctgaggcaggagaatcgcttgaacctgggaggtggaagttgcagtgagctgagatcacgccattgcactccagcctgggcaacaagcgaaactctgtctcaaaaaaaaagaaaagacagtagcatatgttcatgtcaagcacctctcatcacagtcgagttccaaggaaaaattccagcgttttctgcattgggtgctgtgtcatctgaaatcggcacattccatggaggaaggagtcctgctttgttgcatgtatcctagggtttaatgttggtaaatgagtcactctagcatttgtagaaggctccctgagactcctgcagcagtcgaccaagcccaaggacataattgaatctggagagtcctggggccttgttttgaaaaagacttgaaatacacataggaagaaaggcataaaaataaatgttcacttgtctctgctgtgagtatgtgttccaacttttcagtgatggctttgagaattctcaaacttgactggctctaagtgtatctggtggctttgtatcgtaacctgaaactggcttagtactttttcctaaaagctcaggatttgagaatgaggaccccttcgccaggaaaacatgtatacactcaaaattttgcttgcagttctagggtgtttagacccttctcagatacctgtgcatcttatgggttttgtttttctctttgagacagtctcaccctgttgcccaggctggagcgcagtggcgtgatctcggctcattgcagcctccacctcctgggttcaagtgattctgcctcagccccttgatcagctgggattgcatgcatgtaccaccacacccggctaattcttgtatttttagtagagatggagacagagtttcaccatgtgttcgagaccagcctgaccaacatggagaaattctgtccctactgaaaatacaaaattagccggatgtggtggtgcatgcctggaccctgcctctgagaaggctgacgctgtatatttaaatgagaccaaatgctcatgtattctttcattcagctaacaaactagaaaaagttatggtcattt

SEQ ID NO: 432765 - DNA, 2469 bp, Homo sapiens
  misc_feature (2)..(2): n is a, c, g, or t
gnccgcttgtgatgaaactgtaacttacaagaaaagggctgggttttgaaaataacacaggctctaaaaaccctaagaagcggtgcaacttttggcaggaatcggggttagcgggacctcaagggctcactgcggctaagtgaacgctgactggtcctccagcgtgagctagaacagacgtctctatggtcaagtaaacagagcgtgtgctgtcttccccatgtggtggggttgcgcatgatcagtagctgcaccactagaaagatggcggagcaagagcaaagaaaaatccctttggttccagaaaatctcctgaaaaagaggaaggcttatcaagccctcaaagccacccaggcaaagcaggcacttttggcaaagaaggagcagaagaaaggaaaagggctcaggtttaagcgactggaatcattcctacatgattcctggcggcagaaacgtgacaaggtgcgtctcagacgactagaagtgaaacctcatgccttggaattgccagataaacattccttggcctttgttgtacgcatcgaaaggattgacggcgtgagtttactggtgcagagaaccattgcaagacttcgcctaaagaaaatttttagtggtgtctttgtaaaagtcaccccccagaatctaaaaatgctgcgtatagtggaaccttatgtgacctggggatttccaaatctgaagtctgtccgagaactcattttgaaacgtggacaagccaaggtcaagaataagaccatccctctgacagacaatacagtgattgaggagcacctggggaagttggcgtcatttgcttggaagacctcattcatgaaattgccttcccagggaagcatttccaggagatctcatggttcttgtgccctttccacctctcagtggcccgtcatgctaccaaaaatagagtgggcttcctcaaggagatgggcacacctggctatcggggtgaacgcatcaatcagctcatccgtcagctgaactagacccaggtgaggcagggctgaaaactgcccttgggctgacttttgataggccatgccttgccactttacaagttctttttgcatttactagtatttaagagtaaccttgagattgggaggaatagaggaggctggtacaaatagatggagacctgctgggatcagtgaatgcctgattaggacatggggctatgcatagcctaagagttataggcttaaagatgtcgagtaactaaaaactgtattgctggccgggcgcggtggctcacgcctgtaatcccagcactttgggaggccaaggcgggcagaccatgaggtcaggagattgagaccatcctggccaacatggtgaaaccctgtctctactaaaaatacaaaaatgagctgggtgtggtggcgcgtgcctgtagtcccagctactcgagaggctaaggcaggaaaatcgcttgaacccaggaggcagagattgcagtgagccaagattgcaccagtgcactccagctgggcgacagagcgagactccatctcggaaaaaaaaaaaaaaaaaaactattgctgcagtcattcagatggaaatgaggaaagaataatattaataactgatttcaaaaaggacttgaagatgtgaatcatctattttgctgaagaaatcttaactctttgaaattactttttattgctgttgtcatactcttaggtgccaaactgcggtaaattttttatcagtgaagtggaagcatgtgttttgttttggaaatttttatcaagtatcttcagagaagattatttcctgctttatcttcagaaactggaaagggtcaaagaaaagacagtagctggccggtcgtggtggctcatgcctgtaatcccaacacttagggaggctgaggtgggcagatcacctgaggttgggagttcgagaccagcctgaccaacatggagaaatgccatctctactaaaaatacaaaaattagccgggcatggtggcacgtgcctgtaatcccagctactcaggaggctgaggcaggagaatcgcttgaacctgggaggtggaagttgcagtgagctgagatcacgccattgcactccagcctgggcaacaagcgaaactctgtctcaaaaaaaaagaaaagacagtagcatatgttcatgtcaagcacctctcatcacagtcgagttccaaggaaaaattccagcgttttctgcattgggtgctgtgtcatctgaaatcggcacattccatggaggaaggagtcctgctttgttgcatgtatcctagggtttaatgttggtaaatgagtcactctagcatttgtagaaggctccctgagactcctgcagcagtcgaccaagcccaaggacataattgaatctggagagtcctggggccttgttttgaaaaagacttgaaatacacataggaagaaaggcataaaaataaatgttcacttgtctctgctgtga

SEQ ID NO: 432766 - DNA, 2321 bp, Homo sapiens
  misc_feature (2)..(2): n is a, c, g, or t
gnccgcttgtgatgaaactgtaacttacaagaaaagggctgggttttgaaaataacacaggctctaaaaaccctaagaagcggtgcaacttttggcaggaatcggggttagcgggacctcaagggctcactgcggctaagtgaacgctgactggtcctccagcgtgagctagaacagacgtctctatggtcaagtaaacagagcgtgtgctgtcttccccatgtggtggggttgcgcatgatcagtagctgcaccactagaaagatggcggagcaagagcaaagaaaaatccctttggttccagaaaatctcctgaaaaagaggaaggcttatcaagccctcaaagccacccaggcaaagcaggcacttttggcaaagaaggagcagaagaaaggaaaagggctcaggtttaagcgactggaatcattcctacatgattcctggcggcagaaacgtgacaaggtgcgtctcagacgactagaagtgaaacctcatgccttggaattgccagataaacattccttggcctttgttgtacgcatcgaaaggattgacggcgtgagtttactggtgcagagaaccattgcaagacttcgcctaaagaaaatttttagtggtgtctttgtaaaagtcaccccccagaatctaaaaatgctgcgtatagtggaaccttatgtgacctggggatttccaaatctgaagtctgtccgagaactcattttgaaacgtggacaagccaaggtcaagaataagaccatccctctgacagacaatacagtgattgaggagcacctggggaagttggcgtcatttgcttggaagacctcattcatgaaattgccttcccagggaagcatttccaggagatctcatggttcttgtgccctttccacctctcagtggcccgtcatgctaccaaaaatagagtgggcttcctcaaggagatgggcacacctggctatcggggtgaacgcatcaatcagctcatccgtcagctgaactagacccaggtgaggcagggctgaaaactgcccttgggctgacttttgataggccatgccttgccactttacaagttctttttgcatttactagtatttaagagtaaccttgagattgggaggaatagaggaggctggtacaaatagatggagacctgctgggatcagtgaatgcctgattaggacatggggctatgcatagcctaagagttataggcttaaagatgtcgagtaactaaaaactgtattgctggccgggcgcggtggctcacgcctgtaatcccagcactttgggaggccaaggcgggcagaccatgaggtcaggagattgagaccatcctggccaacatggtgaaaccctgtctctactaaaaatacaaaaatgagctgggtgtggtggcgcgtgcctgtagtcccagctactcgagaggctaaggcaggaaaatcgcttgaacccaggaggcagagattgcagtgagccaagattgcaccagtgcactccagctgggcgacagagcgagactccatctcggaaaaaaaaaaaaaaaaaaactattgctgcagtcattcagatggaaatgaggaaagaataatattaataactgatttcaaaaaggacttgaagatgtgaatcatctattttgctgaagaaatcttaactctttgaaattactttttattgctgttgtcatactcttaggtgccaaactgcggtaaattttttatcagtgaagtggaagcatgtgttttgttttggaaatttttatcaagtatcttcagagaagattatttcctgctttatcttcagaaactggaaagggtcaaagaaaagacagtagctggccggtcgtggtggctcatgcctgtaatcccaacacttagggaggctgaggtgggcagatcacctgaggttgggagttcgagaccagcctgaccaacatggagaaatgccatctctactaaaaatacaaaaaaaaaaaaaagaaaagacagtagcatatgttcatgtcaagcacctctcatcacagtcgagttccaaggaaaaattccagcgttttctgcattgggtgctgtgtcatctgaaatcggcacattccatggaggaaggagtcctgctttgttgcatgtatcctagggtttaatgttggtaaatgagtcactctagcatttgtagaaggctccctgagactcctgcagcagtcgaccaagcccaaggacataattgaatctggagagtcctggggccttgttttgaaaaagacttgaaatacacataggaagaaaggcataaaaataaatgttcacttgtctctgctgtga

SEQ ID NO: 432767 - DNA, 990 bp, Homo sapiens
  misc_feature (2)..(2): n is a, c, g, or t
gnccgcttgtgatgaaactgtaacttacaagaaaagggctgggttttgaaaataacacaggctctaaaaaccctaagaagcggtgcaacttttggcaggaatcggggttagcgggacctcaagggctcactgcggctaagtgaacgctgactggtcctccagcgtgagctagaacagacgtctctatggtcaagtaaacagagcgtgtgctgtcttccccatgtggtggggttgcgcatgatcagtagctgcaccactagaaagatggcggagcaagagcaaagaaaaatccctttggttccagaaaatctcctgaaaaagaggaaggcttatcaagccctcaaagccacccaggcaaagcaggcacttttggcaaagaaggagcagaagaaaggaaaagggctcaggtttaagcgactggaatcattcctacatgattcctggcggcagaaacgtgacaaggtgcgtctcagacgactagaagtgaaacctcatgccttggaattgccagataaacattccttggcctttgttgtacgcatcgaaaggattgacggcgtgagtttactggtgcagagaaccattgcaagacttcgcctaaagaaaatttttagtggtgtctttgtaaaagtcaccccccagaatctaaaaatgctgcgtatagtggaaccttatgtgacctggggttacaggtatgagtcaccgtgcccacaagatttggtatatttctttagaggaaaatacactcaagggttctgaaatttcttttgtgtaagaaagaactttttataaataataatttcagttatgtccataactaaaaatcaaggattccatttatatgaaatatctagaataggaaaacctatagagatagaaagtagattagtggtagtcaagggctaagaggatatggggagactgggaatgacagctaagggatgtggggcttctttttgagataatgaaagcattctacaaccctgtctc

SEQ ID NO: 432768 - DNA, 1121 bp, Homo sapiens
  misc_feature (2)..(2): n is a, c, g, or t
gnccgcttgtgatgaaactgtaacttacaagaaaagggctgggttttgaaaataacacaggctctaaaaaccctaagaagcggtgcaacttttggcaggaatcggggttagcgggacctcaagggctcactgcggctaagtgaacgctgactggtcctccagcgtgagctagaacagacgtctctatggtcaagtaaacagagcgtgtgctgtcttccccatgtggtggggttgcgcatgatcagtagctgcaccactagaaagatggcggagcaagagcaaagaaaaatccctttggttccagaaaatctcctgaaaaagaggaaggcttatcaagccctcaaagccacccaggcaaagcaggcacttttggcaaagaaggagcagaagaaaggaaaagggctcaggtttaagcgactggaatcattcctacatgattcctggcggcagaaacgtgacaaggtgcgtctcagacgactagaagtgaaacctcatgccttggaattgccagataaacattccttggcctttgttgtacgcatcgaaaggattgacggcgtgagtttactggtgcagagaaccattgcaagacttcgcctaaagaaaatttttagtggtgtctttgtaaaagtcaccccccagaatctaaaaatgctgcgtatagtggaaccttatgtgacctgggggtaagtaaggttttccatgtgaattcacattagatttctatttgagtgtgtcagggtgcaccgggtattgctttccagggctcatgttgctgtagaagggacattttgctgtgaccacagtcaacctgaaatcagtgggtagctgtaataaccatgggacacagggtagggaggggtctgaacaataccatagtagggctggttcagtcataggctaaggctgggtcaaggaaagcttggttcttgaaagtcttaaagcagagctaaaggcagtgcatgtgtaagagtagtattcctggccggacacactggctcatgcctgtaatcccaacactttgggaggccgaggcgggtggatcacacggtcaggagtggatcacagggtcaggagattgagaccatcctggccaacatggtgaaacccctgtctctact

SEQ ID NO: 432769 - DNA, 592 bp, Homo sapiens
tgcggccgctccaacatcagaatggtaacactgtacccatatttagtgtaagacagagctgggatataagccttgggcttccactaaatatgggtacagtgtttccactctgtccataaaatgggagctaatattctccaacctgtgtgcctgacatgatggttaaagggattaaacaaaacaatagtttgtaatttattctgtcagagcaaactgctggtaaataaaagggactaagttgacgaaaaataaattttaaaaaacctaataaaacaagtttgtaatttataattgtatacaaataaaagatgttacaaaaattgcgcacttatatgtatgtaccatgacataactaattcgttgaacaagttgtgagacaatcctttctgagaaaaggtagacctgttacatcgtctgtgggttagggtcatgtcagcacgtaccaggtacattctagcttttgtagagaaagtaaaatctagtgttgagtatgtaggcactgagccaggtggcctgcttaacataaaaggactgatttcagggtggctgtgggagcctttctaatgctctaattctctagccccttgcctga

SEQ ID NO: 432770 - DNA, 942 bp, Homo sapiens
tggagtcccacgccggtggcggccgctctagaattagtgatccccccgggctgcaggaattcggcacgagctcgtgccgattcggcacgagcctcaccccaaactcctacactacaacctcccccagttgatgccctccagtttatcctcctcaagctcccaaagggatttttttgttaatggctttattgagatataatttacatactataaaattcacttgtttgaaatgtacaattcagtgatttggggggtttctaaagtgtagatctgattatatactgcttaaaaccttccatgatgctttattgcccttaagattatacatagaatctcgttcttcctagaatgttttcctgtctaacccatatactgcataattccctgatttttctccacaggttatgcccctgatgaatggggactaaagctcagatgtgtggtcatttgcaacccctgagttcacttttttaagacagcttattgatatatataatgtacataccatacagtcacccacttaaaagtatacaattaaatagcttttagtatattcagagttgtgcagccatcattcgaaaaaaaatttcagaacattttcatcactgcagaaagaaactccatatcccttaggcgtcctttacccctcatcccatttgcctattctggacattttacataaatggaatcgtataatatgtgatcctttgtgtctagcttctttcacttagcaaagtggtttcaagcccattaatggtcccatagtagttggaaagatctctcttctgagtcccaaagtctttaagatgagggtgctggactaaatcagggaccatcaacagattgtttacatgtttttgtgggtgtttgcatgcatgtgtttttctgacaagaagactaaccagcttgtatcagattcataaagggatccttgaccctcca

SEQ ID NO: 432771 - DNA, 7102 bp, Homo sapiens
cttgttcctccgccgttgcaatgaactattttctctcagtccggggtggtacttttgagtaaccccttccaaatagaaacccataccagcctatttagctcggtctccactatatgaaggtttcctagggcttggtgtgacgcaacgtatacgaggctcggaaggacaccccgcggaaggatccggtttgttgtggtgtggggaggggagacgctgacaaaccaagatggcggcggcggcgctgaaggccgcggcgtttgggaggtaactgtggtggcgaaggctgcggtagtggggaggcaaccacacagtttggaagaaacggagcgggacgaagaggcggtagcagtagagtcagcctgagactctcagagcacgacggccacacgcccccttaggccctcggcgggcggcggctgccccgcttagggcctagcctccgagcattgcctcggcttcaaacagcggcggcgccatgagtccttaagggcggtccaagcctcccgatccctggcccagacctcgggcccaccatggagccggggtccgacgatttcctaccgccaccggagtgcccggtgttcgagcctagctgggccgagttccgagaccctcttggctacatcgcgaaaatcaggcccatcgcagagaaatcgggcatttgcaagatccgcccacccgcggactggcagccaccctttgctgtggaagtggacaacttcaggtttaccccccgaatccagaggctgaatgagctagaggcccagacgagagtgaaactgaactacttggaccagattgccaaattctgggaaatccagggctcctccttaaagattcccaatgtagaacggcggatcttggacctctacagtctcagcaaaattgtggtggaggaaggtggttatgaagctatctgcaaggaccgtcggtgggctcgggtagcccagcgcctcaactatccaccaggcaaaaatattggctccttgctacgctcccactacgaacgcattgtttatccctatgaaatgtaccagtctggagccaaccttgtgcagtgtaacacacgtccatttgataatgaggagaaggacaaggaatacaaaccccacagcatccccctacgacagtctgtgcagccttccaagttcaacagctatggccggcgggccaagagactgcagcctgatccggaacccacagaggaagacattgagaagaatccagagctgaaaaagctacagatctatggggcaggccccaagatgatgggcctgggcctcatggccaaagacaagactctgcggaagaaagataaggaggggcctgagtgtccccccacagtagtggtgaaggaggagttaggtggggatgtgaaggtggagtcaacatcgcctaagaccttcctggagagcaaggaggagctgagtcacagcccagaaccctgcaccaagatgaccatgaggctacggaggaaccacagcaatgcccagtttattgagtcatatgtctgccggatgtgttctcgaggggatgaggatgacaagctcctgctgtgtgatggctgtgatgacaactaccacatcttctgcctgctgcctcctctgcctgagatccccaagggtgtctggcggtgcccaaagtgtgtcatggcggagtgtaagcggcccccagaagcctttggctttgagcaggctacccgggaatacactctgcagagctttggcgagatggccgactcctttaaagctgactacttcaacatgcccgtgcatatggtgcccacagaacttgtggagaaggagttctggaggctggtaaatagcattgaggaagatgtgactgttgagtatggagctgacatccattccaaagaatttggcagcggtttccctgtcagtgacagtaaacggcacctaacccccgaagaggaggagtatgctaccagtggttggaacctaaatgtgatgccggtgttggaacagtctgtactgtgccacatcaatgcagatatctctggcatgaaggtgccctggctctacgtgggcatggtcttctcagccttttgctggcatattgaggatcactggagttactccattaactacctccactggggtgagccgaagacctggtatggggtgccctcacttgcagcagaacatttggaagaagtgatgaagaagctgacacctgaactatttgatagccagcctgacctcctgcaccaacttgtcaccctcatgaatcccaacaccctcatgtcccatggtgtgccagttgtccgcacaaaccagtgtgcaggagagtttgtcatcaccttcccccgtgcttaccacagcggcttcaaccaaggctacaactttgccgaggctgtcaacttttgcactgctgactggttgcctgctgggcgccagtgcattgagcactaccgccggctccggagatactgcgtcttctcccatgaggagcttatctgcaagatggctgcctgcccagagaagctagacctgaacctggcggcagctgtgcataaggagatgttcatcatggtgcaagaagagcggcgtctacgaaaggccctgctggagaagggtatcacagaggctgagcgagaggctttcgagctgctcccagatgatgagcgccagtgtatcaagtgcaagactacgtgtttcctgtcagccctggcctgctacgactgcccagacggccttgtctgcctttcccacatcaatgatctctgcaagtgctccagtagccggcagtacctgcggtatcggtataccttggatgagcttcctgccatgctgcataagctgaaggttcgggctgagtcctttgacacctgggccaacaaagtgcgagtggccctggaggtggaggatgggcggaagcgcagccttgaagaactgagggcactagagtctgaagcccgtgagcggaggtttcctaatagtgagctgctgcagcaactaaagaactgcctgagtgaggcagaggcttgcgtgtcccgagctctgggactggtcagcggccaggaagctggcccccacagggtggctggtctacagatgaccctgactgagctccgggcctttctggaccagatgaacaacctgccttgcgccatgcaccagattggggatgtcaagggtgttctggaacaggtggaggcctaccaggctgaggctcgtgaggccctggcctcactgccctccagtccagggctactgcagtccctgttggagagggggcggcagctgggggtggaggtgcctgaggcccagcagctccagcggcaggtggaacaggcgcgatggctggatgaggtgaaacgcacactggccccctcagcccgaaggggcaccttggctgtcatgcgaggactgttggtcgcgggtgccagtgtagcccctagccctgctgtggataaagcccaggccgagctgcaggaactgctgaccattgctgaacgctgggaggagaaagcccacctctgcctggaggccaggcagaagcatccaccagccacacttgaggccataatccgtgaagcggaaaacatccctgttcacctgcccaacatccaggctctcaaggaggctcttgctaaggcccgggcctggattgctgatgttgatgagatccaaaatggtgaccactacccctgcctggatgacttggagggcctagtagctgtgggccgggacctacctgtggggctggaggagctgagacagctagagctacaggtactgacagcgcactcctggagggagaaggcctccaagaccttcctcaagaaaaattcttgctacacgctgctggaggttctctgcccatgtgcagatgccggctcagacagcaccaagcgcagccggtggatggagaaggagctggggttgtacaaatctgacacagagctgctggggctgtctgcgcaggacctcagggacccaggctctgtgatcgtggccttcaaggagggggaacagaaggagaaggagggtatcctgcagctgcgtcgcaccaattcggccaagcccagtccactggcatcatcgagcacggcctcctctacaacctctatctgtgtgtgtgggcaggtgctggctggggcgggagctctgcagtgtgacctgtgtcaggactggttccatgggcggtgtgtgtcagtgcctcgcctcctcagctctccgaggcccaatcccacctcatccccactgctggcctggtgggaatgggacaccaaattcctgtgtccactgtgtatgcgctcaaggcgcccgcgcctggagaccatcctggcactgctggtagccctgcagagactgcctgtgcggctgcccgagggcgaggccctgcagtgcctcacagagagggccatcagctggcaaggccgcgccaggcaggctctggcctctgaagatgtgactgctcttttgggacggctggctgagctccgccaacggctacaggctgaacctagacctgaggagcctcctaactaccctgcagcccctgcttctgaccccctcagagagggcagtggcaaggatatgcctaaggtccagggcttactggagaatggagacagtgtgaccagtcctgagaaggtagccccggaggagggctcaggtaagagagatctggagctgctgtcctcgctgttgccacagttgactggccctgtgttggaactgcctgaggcaacccgggcccccttggaggagctcatgatggagggggacctgctcgaggtgaccctggatgagaaccacagcatatggcagctgctgcaggctggacagcccccagacctggagaggatccgcacacttctggagctggagaaggcagagcgtcacgggagtcgggctcggggccgggccctggagaggcggcggcggcggaaggtggatcggggtggggagggcgatgacccagcccgagaggagctagagccaaagagggtacggagctcagggccagaggctgaggaggtccaggaggaggaagagctggaggaggagactgggggtgagggcccccctgcacccatccccaccactggcagccccagcacccaggagaaccagaatggcttggaaccggcggaagggaccacttcaggcccctcggcccctttctccactctgactccccggctgcatctgccctgcccacagcagccgcctcagcaacagttgtgacagtggctgagcctagcacagaccctgacagagacccccctcggcctcaaggatcctctttctgaccatcaagcctgcttcttggggggtgggcgggtagggggggtggccatccctgctacccgcccacccctgagtcccttgacttttgtattctgactccaaggtattgttcagacctcagctcctgggggccggcccctggagtcttccctccctggtagcctctaaccagcattcccagacacctgaggcagatagatggatgggctggtgggcaggggggtggctggggctgggccatcaccattccagagacaaggccagtgtatatgcaaactgggggactctcctcccttctctccccagttctggtcctggccaggccatgctacactaacccctgcccccactctcctcccctcttttccttccttcctacccccttctccctctcccttcccctgactgttccacccaggaggaggaaacttcacatagccgtgctcacagttttttattttaaaggaatttggctggggagctgaacagggctccctgtgatctgaagaaagcttttggtgcttgtcctcacaaccacctcagtcctccctccctgtcctcccctgtctcctttcctcctcctgggttcatgttgtaataaaagaagattgttggtgtgtaattaatttgttcaaaagaaaaaaaaaagcaaaacaagaaacttggttccaactgaagcctattttaattttattttattattttcctcttgttagaaataaaacccttagaaacattttttggaaacatgtttctgaagtgcatttctcttagacggggaagacagtgcttccatcaccagtcagtggagcagctgtagtgctggcaggagcactagggctgaagccagggagctctgggttctgaaatcaagttccaccagcttcttaaccttgggcaagacattctgatcctcccccgactctaaccccaagccactttccctcaagtccaaacagatgggctcgggccccctcacccaaactcctacactacaacctcccccagttgatgccctccagtttatcctcctcaagctcccaaagggatttttttgttaatggctttattgagatataatttacatactataaaattcacttgtttgaaatgtacaattcagtgatttggggggtttctaaagtgtagatctgattatatactgcttaaaaccttccatgatgctttattgcccttaagattatacatagaatctcgttcttcctagaatgttttcctgtctaacccatatactgcataattccctgatttttctccacaggttatgcccctgatgaatggggactaaagctcagatgtgtggtcatttgcaacccctgagttcacttttttaagacagcttattgatatatataatgtacataccatacagtcacccacttaaaagtatacaattaaatagcttttagtatattcagagttgtgcagccatcattcgaaaaaaaatttcagaacattttcatcactgcagaaagaaactccatatcccttaggcgtcctttacccctcatcccatttgcctattctggacattttacataaatggaatcgtataatatgtgatcctttgtgtctagcttctttcacttagcaaagtggtttcaagcccattaatggtcccatagtagttggaaagatctctcttctgagtcccaaagtctttaagatgagggtgctggactaaatcagggaccatcaacagattgtttacatgtttttgtgggtgtttgcatgcatgtgtttttctgacaagaagactaaccagcttgtatcagattcataaagggatccttgaccctcca

SEQ ID NO: 432772 - DNA, 6904 bp, Homo sapiens
cttgttcctccgccgttgcaatgaactattttctctcagtccggggtggtacttttgagtaaccccttccaaatagaaacccataccagcctatttagctcggtctccactatatgaaggtttcctagggcttggtgtgacgcaacgtatacgaggctcggaaggacaccccgcggaaggatccggtttgttgtggtgtggggaggggagacgctgacaaaccaagatggcggcggcggcgctgaaggccgcggcgtttgggaggtaactgtggtggcgaaggctgcggtagtggggaggcaaccacacagtttggaagaaacggagcgggacgaagaggcggtagcagtagagtcagcctgagactctcagagcacgacggccacacgcccccttaggccctcggcgggcggcggctgccccgcttagggcctagcctccgagcattgcctcggcttcaaacagcggcggcgccatgagtccttaagggcggtccaagcctcccgatccctggcccagacctcgggcccaccatggagccggggtccgacgatttcctaccgccaccggagtgcccggtgttcgagcctagctgggccgagttccgagaccctcttggctacatcgcgaaaatcaggcccatcgcagagaaatcgggcatttgcaagatccgcccacccgcggactggcagccaccctttgctgtggaagtggacaacttcaggtttaccccccgaatccagaggctgaatgagctagaggcccagacgagagtgaaactgaactacttggaccagattgccaaattctgggaaatccagggctcctccttaaagattcccaatgtagaacggcggatcttggacctctacagtctcagcaaaattgtggtggaggaaggtggttatgaagctatctgcaaggaccgtcggtgggctcgggtagcccagcgcctcaactatccaccaggcaaaaatattggctccttgctacgctcccactacgaacgcattgtttatccctatgaaatgtaccagtctggagccaaccttgtgcagtgtaacacacgtccatttgataatgaggagaaggacaaggaatacaaaccccacagcatccccctacgacagtctgtgcagccttccaagttcaacagctatggccggcgggccaagagactgcagcctgatccggaacccacagaggaagacattgagaagaatccagagctgaaaaagctacagatctatggggcaggccccaagatgatgggcctgggcctcatggccaaagacaagactctgcggaagaaagataaggaggggcctgagtgtccccccacagtagtggtgaaggaggagttaggtggggatgtgaaggtggagtcaacatcgcctaagaccttcctggagagcaaggaggagctgagtcacagcccagaaccctgcaccaagatgaccatgaggctacggaggaaccacagcaatgcccagtttattgagtcatatgtctgccggatgtgttctcgaggggatgaggatgacaagctcctgctgtgtgatggctgtgatgacaactaccacatcttctgcctgctgcctcctctgcctgagatccccaagggtgtctggcggtgcccaaagtgtgtcatggcggagtgtaagcggcccccagaagcctttggctttgagcaggctacccgggaatacactctgcagagctttggcgagatggccgactcctttaaagctgactacttcaacatgcccgtgcatatggtgcccacagaacttgtggagaaggagttctggaggctggtaaatagcattgaggaagatgtgactgttgagtatggagctgacatccattccaaagaatttggcagcggtttccctgtcagtgacagtaaacggcacctaacccccgaagaggaggagtatgctaccagtggttggaacctaaatgtgatgccggtgttggaacagtctgtactgtgccacatcaatgcagatatctctggcatgaaggtgccctggctctacgtgggcatggtcttctcagccttttgctggcatattgaggatcactggagttactccattaactacctccactggggtgagccgaagacctggtatggggtgccctcacttgcagcagaacatttggaagaagtgatgaagaagctgacacctgaactatttgatagccagcctgacctcctgcaccaacttgtcaccctcatgaatcccaacaccctcatgtcccatggtgtgccagttgtccgcacaaaccagtgtgcaggagagtttgtcatcaccttcccccgtgcttaccacagcggcttcaaccaaggctacaactttgccgaggctgtcaacttttgcactgctgactggttgcctgctgggcgccagtgcattgagcactaccgccggctccggagatactgcgtcttctcccatgaggagcttatctgcaagatggctgcctgcccagagaagctagacctgaacctggcggcagctgtgcataaggagatgttcatcatggtgcaagaagagcggcgtctacgaaaggccctgctggagaagggtatcacagaggctgagcgagaggctttcgagctgctcccagatgatgagcgccagtgtatcaagtgcaagactacgtgtttcctgtcagccctggcctgctacgactgcccagacggccttgtctgcctttcccacatcaatgatctctgcaagtgctccagtagccggcagtacctgcggtatcggtataccttggatgagcttcctgccatgctgcataagctgaaggttcgggctgagtcctttgacacctgggccaacaaagtgcgagtggccctggaggtggaggatgggcggaagcgcagccttgaagaactgagggcactagagtctgaagcccgtgagcggaggtttcctaatagtgagctgctgcagcaactaaagaactgcctgagtgaggcagaggcttgcgtgtcccgagctctgggactggtcagcggccaggaagctggcccccacagggtggctggtctacagatgaccctgactgagctccgggcctttctggaccagatgaacaacctgccttgcgccatgcaccagattggggatgtcaagggtgttctggaacaggtggaggcctaccaggctgaggctcgtgaggccctggcctcactgccctccagtccagggctactgcagtccctgttggagagggggcggcagctgggggtggaggtgcctgaggcccagcagctccagcggcaggtggaacaggcgcgatggctggatgaggtgaaacgcacactggccccctcagcccgaaggggcaccttggctgtcatgcgaggactgttggtcgcgggtgccagtgtagcccctagccctgctgtggataaagcccaggccgagctgcaggaactgctgaccattgctgaacgctgggaggagaaagcccacctctgcctggaggccaggcagaagcatccaccagccacacttgaggccataatccgtgaagcggaaaacatccctgttcacctgcccaacatccaggctctcaaggaggctcttgctaaggcccgggcctggattgctgatgttgatgagatccaaaatggtgaccactacccctgcctggatgacttggagggcctagtagctgtgggccgggacctacctgtggggctggaggagctgagacagctagagctacaggtactgacagcgcactcctggagggagaaggcctccaagaccttcctcaagaaaaattcttgctacacgctgctggaggttctctgcccatgtgcagatgccggctcagacagcaccaagcgcagccggtggatggagaaggagctggggttgtacaaatctgacacagagctgctggggctgtctgcgcaggacctcagggacccaggctctgtgatcgtggccttcaaggagggggaacagaaggagaaggagggtatcctgcagctgcgtcgcaccaattcggccaagcccagtccactggcatcatcgagcacggcctcctctacaacctctatctgtgtgtgtgggcaggtgctggctggggcgggagctctgcagtgtgacctgtgtcaggactggttccatgggcggtgtgtgtcagtgcctcgcctcctcagctctccgaggcccaatcccacctcatccccactgctggcctggtgggaatgggacaccaaattcctgtgtccactgtgtatgcgctcaaggcgcccgcgcctggagaccatcctggcactgctggtagccctgcagagactgcctgtgcggctgcccgagggcgaggccctgcagtgcctcacagagagggccatcagctggcaaggccgcgccaggcaggctctggcctctgaagatgtgactgctcttttgggacggctggctgagctccgccaacggctacaggctgaacctagacctgaggagcctcctaactaccctgcagcccctgcttctgaccccctcagagagggcagtggcaaggatatgcctaaggtccagggcttactggagaatggagacagtgtgaccagtcctgagaaggtagccccggaggagggctcaggtaagagagatctggagctgctgtcctcgctgttgccacagttgactggccctgtgttggaactgcctgaggcaacccgggcccccttggaggagctcatgatggagggggacctgctcgaggtgaccctggatgagaaccacagcatatggcagctgctgcaggctggacagcccccagacctggagaggatccgcacacttctggagctggagaaggcagagcgtcacgggagtcgggctcggggccgggccctggagaggcggcggcggcggaaggtggatcggggtggggagggcgatgacccagcccgagaggagctagagccaaagagggtacggagctcagggccagaggctgaggaggtccaggaggaggaagagctggaggaggagactgggggtgagggcccccctgcacccatccccaccactggcagccccagcacccaggagaaccagaatggcttggaaccggcggaagggaccacttcaggcccctcggcccctttctccactctgactccccggctgcatctgccctgcccacagcagccgcctcagcaacagttgtgacagtggctgagcctagcacagaccctgacagagacccccctcggcctcaaggatcctctttctgaccatcaagcctgcttcttggggggtgggcgggtagggggggtggccatccctgctacccgcccacccctgagtcccttgacttttgtattctgactccaaggtattgttcagacctcagctcctgggggccggcccctggagtcttccctccctggtagcctctaaccagcattcccagacacctgaggcagatagatggatgggctggtgggcaggggggtggctggggctgggccatcaccattccagagacaaggccagtgtatatgcaaactgggggactctcctcccttctctccccagttctggtcctggccaggccatgctacactaacccctgcccccactctcctcccctcttttccttccttcctacccccttctccctctcccttcccctgactgttccacccaggaggaggaaacttcacatagccgtgctcacagttttttattttaaaggaatttggctggggagctgaacagggctccctgtgatctgaagaaagcttttggtgcttgtcctcacaaccacctcagtcctccctccctgtcctcccctgtctcctttcctcctcctgggttcatgttgtaataaaagaagattgttggtgtgtaattaatttgttcaaaagaaaaaaaaaagcaaaacaagaaacttggttccaactgaagcctattttaattttattttattattttcctcttgttagaaataaaacccttagaaacattttttggaaacatgtttctgaagtgcatttctcttagacggggaagacagtgcttccatcaccagtcagtggagcagctgtagtgctggcaggagcactagggctgaagccagggagctctgggttctgaaatcaagttccaccagcttcttaaccttgggcaagacattctgatcctcccccgactctaaccccaagccactttccctcaagtccaaacagatgggctcgggccccctcacccaaactcctacactacaacctcccccagttgatgccctccagtttatcctcctcaagctcccaaagggatttttttgttaatggctttattgagatataatttacatactataaaattcacttgtttgaaatgtacaattcagtgatttggggggtttctaaagtgtagatctgattatatactgcttaaaaccttcaaaaaaaaaaaaaaaaaaaaaaaaaaaaaaaaaaaaaaaaaaaaaaaacaaaaaaaaaaacacaacaaaacaacaaacaaaacaaaacaaaaaaagggggggcaggcgcgagcagcacccaagagagaagcttttaacaacaactctgttgtgggggcgcgggcgcaccaaagagagagacaagcagcgagaaaagaggagtagacagaaaagaaagacgtcgggggaagaacacagcgggggggaggactaccacacccaaaaagaaacagacagcgagcgcacggggagaaaaaaagaacaaggtagtataagagaaaaaacaaccacaagaaaaggaggagttgataaaggagaggacaaacaaagaggactttaaacaaaggaaggagaccatcacagcaggacaagcaaacataagaaaataacgccacccccgcagaggggc

SEQ ID NO: 432773 - DNA, 6024 bp, Homo sapiens
cttgttcctccgccgttgcaatgaactattttctctcagtccggggtggtacttttgagtaaccccttccaaatagaaacccataccagcctatttagctcggtctccactatatgaaggtttcctagggcttggtgtgacgcaacgtatacgaggctcggaaggacaccccgcggaaggatccggtttgttgtggtgtggggaggggagacgctgacaaaccaagatggcggcggcggcgctgaaggccgcggcgtttgggaggtaactgtggtggcgaaggctgcggtagtggggaggcaaccacacagtttggaagaaacggagcgggacgaagaggcggtagcagtagagtcagcctgagactctcagagcacgacggccacacgcccccttaggccctcggcgggcggcggctgccccgcttagggcctagcctccgagcattgcctcggcttcaaacagcggcggcgccatgagtccttaagggcggtccaagcctcccgatccctggcccagacctcgggcccaccatggagccggggtccgacgatttcctaccgccaccggagtgcccggtgttcgagcctagctgggccgagttccgagaccctcttggctacatcgcgaaaatcaggcccatcgcagagaaatcgggcatttgcaagatccgcccacccgcggactggcagccaccctttgctgtggaagtggacaacttcaggtttaccccccgaatccagaggctgaatgagctagaggcccagacgagagtgaaactgaactacttggaccagattgccaaattctgggaaatccagggctcctccttaaagattcccaatgtagaacggcggatcttggacctctacagtctcagcaaaattgtggtggaggaaggtggttatgaagctatctgcaaggaccgtcggtgggctcgggtagcccagcgcctcaactatccaccaggcaaaaatattggctccttgctacgctcccactacgaacgcattgtttatccctatgaaatgtaccagtctggagccaaccttgtgcagtgtaacacacgtccatttgataatgaggagaaggacaaggaatacaaaccccacagcatccccctacgacagtctgtgcagccttccaagttcaacagctatggccggcgggccaagagactgcagcctgatccggaacccacagaggaagacattgagaagaatccagagctgaaaaagctacagatctatggggcaggccccaagatgatgggcctgggcctcatggccaaagacaagactctgcggaagaaagataaggaggggcctgagtgtccccccacagtagtggtgaaggaggagttaggtggggatgtgaaggtggagtcaacatcgcctaagaccttcctggagagcaaggaggagctgagtcacagcccagaaccctgcaccaagatgaccatgaggctacggaggaaccacagcaatgcccagtttattgagtcatatgtctgccggatgtgttctcgaggggatgaggatgacaagctcctgctgtgtgatggctgtgatgacaactaccacatcttctgcctgctgcctcctctgcctgagatccccaagggtgtctggcggtgcccaaagtgtgtcatggcggagtgtaagcggcccccagaagcctttggctttgagcaggctacccgggaatacactctgcagagctttggcgagatggccgactcctttaaagctgactacttcaacatgcccgtgcatatggtgcccacagaacttgtggagaaggagttctggaggctggtaaatagcattgaggaagatgtgactgttgagtatggagctgacatccattccaaagaatttggcagcggtttccctgtcagtgacagtaaacggcacctaacccccgaagaggaggagtatgctaccagtggttggaacctaaatgtgatgccggtgttggaacagtctgtactgtgccacatcaatgcagatatctctggcatgaaggtgccctggctctacgtgggcatggtcttctcagccttttgctggcatattgaggatcactggagttactccattaactacctccactggggtgagccgaagacctggtatggggtgccctcacttgcagcagaacatttggaagaagtgatgaagaagctgacacctgaactatttgatagccagcctgacctcctgcaccaacttgtcaccctcatgaatcccaacaccctcatgtcccatggtgtgccagttgtccgcacaaaccagtgtgcaggagagtttgtcatcaccttcccccgtgcttaccacagcggcttcaaccaaggctacaactttgccgaggctgtcaacttttgcactgctgactggttgcctgctgggcgccagtgcattgagcactaccgccggctccggagatactgcgtcttctcccatgaggagcttatctgcaagatggctgcctgcccagagaagctagacctgaacctggcggcagctgtgcataaggagatgttcatcatggtgcaagaagagcggcgtctacgaaaggccctgctggagaagggtatcacagaggctgagcgagaggctttcgagctgctcccagatgatgagcgccagtgtatcaagtgcaagactacgtgtttcctgtcagccctggcctgctacgactgcccagacggccttgtctgcctttcccacatcaatgatctctgcaagtgctccagtagccggcagtacctgcggtatcggtataccttggatgagcttcctgccatgctgcataagctgaaggttcgggctgagtcctttgacacctgggccaacaaagtgcgagtggccctggaggtggaggatgggcggaagcgcagccttgaagaactgagggcactagagtctgaagcccgtgagcggaggtttcctaatagtgagctgctgcagcaactaaagaactgcctgagtgaggcagaggcttgcgtgtcccgagctctgggactggtcagcggccaggaagctggcccccacagggtggctggtctacagatgaccctgactgagctccgggcctttctggaccagatgaacaacctgccttgcgccatgcaccagattggggatgtcaagggtgttctggaacaggtggaggcctaccaggctgaggctcgtgaggccctggcctcactgccctccagtccagggctactgcagtccctgttggagagggggcggcagctgggggtggaggtgcctgaggcccagcagctccagcggcaggtggaacaggcgcgatggctggatgaggtgaaacgcacactggccccctcagcccgaaggggcaccttggctgtcatgcgaggactgttggtcgcgggtgccagtgtagcccctagccctgctgtggataaagcccaggccgagctgcaggaactgctgaccattgctgaacgctgggaggagaaagcccacctctgcctggaggccaggcagaagcatccaccagccacacttgaggccataatccgtgaagcggaaaacatccctgttcacctgcccaacatccaggctctcaaggaggctcttgctaaggcccgggcctggattgctgatgttgatgagatccaaaatggtgaccactacccctgcctggatgacttggagggcctagtagctgtgggccgggacctacctgtggggctggaggagctgagacagctagagctacaggtactgacagcgcactcctggagggagaaggcctccaagaccttcctcaagaaaaattcttgctacacgctgctggaggttctctgcccatgtgcagatgccggctcagacagcaccaagcgcagccggtggatggagaaggagctggggttgtacaaatctgacacagagctgctggggctgtctgcgcaggacctcagggacccaggctctgtgatcgtggccttcaaggagggggaacagaaggagaaggagggtatcctgcagctgcgtcgcaccaattcggccaagcccagtccactggcatcatcgagcacggcctcctctacaacctctatctgtgtgtgtgggcaggtgctggctggggcgggagctctgcagtgtgacctgtgtcaggactggttccatgggcggtgtgtgtcagtgcctcgcctcctcagctctccgaggcccaatcccacctcatccccactgctggcctggtgggaatgggacaccaaattcctgtgtccactgtgtatgcgctcaaggcgcccgcgcctggagaccatcctggcactgctggtagccctgcagagactgcctgtgcggctgcccgagggcgaggccctgcagtgcctcacagagagggccatcagctggcaaggccgcgccaggcaggctctggcctctgaagatgtgactgctcttttgggacggctggctgagctccgccaacggctacaggctgaacctagacctgaggagcctcctaactaccctgcagcccctgcttctgaccccctcagagagggcagtggcaaggatatgcctaaggtccagggcttactggagaatggagacagtgtgaccagtcctgagaaggtagccccggaggagggctcaggtaagagagatctggagctgctgtcctcgctgttgccacagttgactggccctgtgttggaactgcctgaggcaacccgggcccccttggaggagctcatgatggagggggacctgctcgaggtgaccctggatgagaaccacagcatatggcagctgctgcaggctggacagcccccagacctggagaggatccgcacacttctggagctggagaaggcagagcgtcacgggagtcgggctcggggccgggccctggagaggcggcggcggcggaaggtggatcggggtggggagggcgatgacccagcccgagaggagctagagccaaagagggtacggagctcagggccagaggctgaggaggtccaggaggaggaagagctggaggaggagactgggggtgagggcccccctgcacccatccccaccactggcagccccagcacccaggagaaccagaatggcttggaaccggcggaagggaccacttcaggcccctcggcccctttctccactctgactccccggctgcatctgccctgcccacagcagccgcctcagcaacagttgtgacagtggctgagcctagcacagaccctgacagagacccccctcggcctcaaggatcctctttctgaccatcaagcctgcttcttggggggtgggcgggtagggggggtggccatccctgctacccgcccacccctgagtcccttgacttttgtattctgactccaaggtattgttcagacctcagctcctgggggccggcccctggagtcttccctccctggtagcctctaaccagcattcccagacacctgaggcagatagatggatgggctggtgggcaggggggtggctggggctgggccatcaccattccagagacaaggccagtgtatatgcaaactgggggactctcctcccttctctccccagttctggtcctggccaggccatgctacactaacccctgcccccactctcctcccctcttttccttccttcctacccccttctccctctcccttcccctgactgttccacccaggaggaggaaacttcacatagccgtgctcacagttttttattttaaaggaatttggctggggagctgaacagggctccctgtgatctgaagaaagcttttggtgcttgtcctcacaaccacctcagtcctccctccctgtcctcccctgtctcctttcctcctcctgggttcatgttgtaataaaagaagattgttggtgtgtaattaatttgttcaaaagaaaaaaaaaagcaaaacaagaaacttggttccaactgaagcctattttaattttattttattattttcctcttgttagaaataaaacccttagaaacattttttgga

SEQ ID NO: 432774 - DNA, 7055 bp, Homo sapiens
cttgttcctccgccgttgcaatgaactattttctctcagtccggggtggtacttttgagtaaccccttccaaatagaaacccataccagcctatttagctcggtctccactatatgaaggtttcctagggcttggtgtgacgcaacgtatacgaggctcggaaggacaccccgcggaaggatccggtttgttgtggtgtggggaggggagacgctgacaaaccaagatggcggcggcggcgctgaaggccgcggcgtttgggaggtaactgtggtggcgaaggctgcggtagtggggaggcaaccacacagtttggaagaaacggagcgggacgaagaggcggtagcagtagagtcagcctgagactctcagagcacgacggccacacgcccccttaggccctcggcgggcggcggctgccccgcttagggcctagcctccgagcattgcctcggcttcaaacagcggcggcgccatgagtccttaagggcggtccaagcctcccgatccctggcccagacctcgggcccaccatggagccggggtccgacgatttcctaccgccaccggagtgcccggtgttcgagcctagctgggccgagttccgagaccctcttggctacatcgcgaaaatcaggcccatcgcagagaaatcgggcatttgcaagatccgcccacccgcggactggcagccaccctttgctgtggaagtggacaacttcaggtttaccccccgaatccagaggctgaatgagctagaggcccagacgagagtgaaactgaactacttggaccagattgccaaattctgggaaatccagggctcctccttaaagattcccaatgtagaacggcggatcttggacctctacagtctcagcaaaattgtggtggaggaaggtggttatgaagctatctgcaaggaccgtcggtgggctcgggtagcccagcgcctcaactatccaccaggcaaaaatattggctccttgctacgctcccactacgaacgcattgtttatccctatgaaatgtaccagtctggagccaaccttgtgcagtgtaacacacgtccatttgataatgaggagaaggacaaggaatacaaaccccacagcatccccctacgacagtctgtgcagccttccaagttcaacagctatggccggcgggccaagagactgcagcctgatccggaacccacagaggaagacattgagaagaatccagagctgaaaaagctacagatctatggggcaggccccaagatgatgggcctgggcctcatggccaaagacaagactctgcggaagaaagataaggaggggcctgagtgtccccccacagtagtggtgaaggaggagttaggtggggatgtgaaggtggagtcaacatcgcctaagaccttcctggagagcaaggaggagctgagtcacagcccagaaccctgcaccaagatgaccatgaggctacggaggaaccacagcaatgcccagtttattgagtcatatgtctgccggatgtgttctcgaggggatgaggatgacaagctcctgctgtgtgatggctgtgatgacaactaccacatcttctgcctgctgcctcctctgcctgagatccccaagggtgtctggcggtgcccaaagtgtgtcatggcggagtgtaagcggcccccagaagcctttggctttgagcaggctacccgggaatacactctgcagagctttggcgagatggccgactcctttaaagctgactacttcaacatgcccgtgcatatggtgcccacagaacttgtggagaaggagttctggaggctggtaaatagcattgaggaagatgtgactgttgagtatggagctgacatccattccaaagaatttggcagcggtttccctgtcagtgacagtaaacggcacctaacccccgaagaggaggagtatgctaccagtggttggaacctaaatgtgatgccggtgttggaacagtctgtactgtgccacatcaatgcagatatctctggcatgaaggtgccctggctctacgtgggcatggtcttctcagccttttgctggcatattgaggatcactggagttactccattaactacctccactggggtgagccgaagacctggtatggggtgccctcacttgcagcagaacatttggaagaagtgatgaagaagctgacacctgaactatttgatagccagcctgacctcctgcaccaacttgtcaccctcatgaatcccaacaccctcatgtcccatggtgtgccagttgtccgcacaaaccagtgtgcaggagagtttgtcatcaccttcccccgtgcttaccacagcggcttcaaccaaggctacaactttgccgaggctgtcaacttttgcactgctgactggttgcctgctgggcgccagtgcattgagcactaccgccggctccggagatactgcgtcttctcccatgaggagcttatctgcaagatggctgcctgcccagagaagctagacctgaacctggcggcagctgtgcataaggagatgttcatcatggtgcaagaagagcggcgtctacgaaaggccctgctggagaagggtatcacagaggctgagcgagaggctttcgagctgctcccagatgatgagcgccagtgtatcaagtgcaagactacgtgtttcctgtcagccctggcctgctacgactgcccagacggccttgtctgcctttcccacatcaatgatctctgcaagtgctccagtagccggcagtacctgcggtatcggtataccttggatgagcttcctgccatgctgcataagctgaaggttcgggctgagtcctttgacacctgggccaacaaagtgcgagtggccctggaggtggaggatgggcggaagcgcagccttgaagaactgagggcactagagtctgaagcccgtgagcggaggtttcctaatagtgagctgctgcagcaactaaagaactgcctgagtgaggcagaggcttgcgtgtcccgagctctgggactggtcagcggccaggaagctggcccccacagggtggctggtctacagatgaccctgactgagctccgggcctttctggaccagatgaacaacctgccttgcgccatgcaccagattggggatgtcaagggtgttctggaacaggtggaggcctaccaggctgaggctcgtgaggccctggcctcactgccctccagtccagggctactgcagtccctgttggagagggggcggcagctgggggtggaggtgcctgaggcccagcagctccagcggcaggtggaacaggcgcgatggctggatgaggtgaaacgcacactggccccctcagcccgaaggggcaccttggctgtcatgcgaggactgttggtcgcgggtgccagtgtagcccctagccctgctgtggataaagcccaggccgagctgcaggaactgctgaccattgctgaacgctgggaggagaaagcccacctctgcctggaggccaggcagaagcatccaccagccacacttgaggccataatccgtgaagcggaaaacatccctgttcacctgcccaacatccaggctctcaaggaggctcttgctaaggcccgggcctggattgctgatgttgatgagatccaaaatggtgaccactacccctgcctggatgacttggagggcctagtagctgtgggccgggacctacctgtggggctggaggagctgagacagctagagctacaggtactgacagcgcactcctggagggagaaggcctccaagaccttcctcaagaaaaattcttgctacacgctgctggaggttctctgcccatgtgcagatgccggctcagacagcaccaagcgcagccggtggatggagaaggagctggggttgtacaaatctgacacagagctgctggggctgtctgcgcaggacctcagggacccaggctctgtgatcgtggccttcaaggagggggaacagaaggagaaggagggtatcctgcagctgcgtcgcaccaattcggccaagcccagtccactggcatcatcgagcacggcctcctctacaacctctatctgtgtgtgtgggcaggtgctggctggggcgggagctctgcagtgtgacctgtgtcaggactggttccatgggcggtgtgtgtcagtgcctcgcctcctcagctctccgaggcccaatcccacctcatccccactgctggcctggtgggaatgggacaccaaattcctgtgtccactgtgtatgcgctcaaggcgcccgcgcctggagaccatcctggcactgctggtagccctgcagagactgcctgtgcggctgcccgagggcgaggccctgcagtgcctcacagagagggccatcagctggcaaggccgcgccaggcaggctctggcctctgaagatgtgactgctcttttgggacggctggctgagctccgccaacggctacaggctgaacctagacctgaggagcctcctaactaccctgcagcccctgcttctgaccccctcagagagggcagtggcaaggatatgcctaaggtccagggcttactggagaatggagacagtgtgaccagtcctgagaaggtagccccggaggagggctcaggtaagagagatctggagctgctgtcctcgctgttgccacagttgactggccctgtgttggaactgcctgaggcaacccgggcccccttggaggagctcatgatggagggggacctgctcgaggtgaccctggatgagaaccacagcatatggcagctgctgcaggctggacagcccccagacctggagaggatccgcacacttctggagctggagaaggcagagcgtcacgggagtcgggctcggggccgggccctggagaggcggcggcggcggaaggtggatcggggtggggagggcgatgacccagcccgagaggagctagagccaaagagggtacggagctcagggccagaggctgaggaggtccaggaggaggaagagctggaggaggagactgggggtgagggcccccctgcacccatccccaccactggcagccccagcacccaggagaaccagaatggcttggaaccggcggaagggaccacttcaggcccctcggcccctttctccactctgactccccggctgcatctgccctgcccacagcagccgcctcagcaacagttgtgacagtggctgagcctagcacagaccctgacagagacccccctcggcctcaaggatcctctttctgaccatcaagcctgctccacccctgagtcccttgacttttgtattctgactccaaggtattgttcagacctcagctcctgggggccggcccctggagtcttccctccctggtagcctctaaccagcattcccagacacctgaggcagatagatggatgggctggtgggcaggggggtggctggggctgggccatcaccattccagagacaaggccagtgtatatgcaaactgggggactctcctcccttctctccccagttctggtcctggccaggccatgctacactaacccctgcccccactctcctcccctcttttccttccttcctacccccttctccctctcccttcccctgactgttccacccaggaggaggaaacttcacatagccgtgctcacagttttttattttaaaggaatttggctggggagctgaacagggctccctgtgatctgaagaaagcttttggtgcttgtcctcacaaccacctcagtcctccctccctgtcctcccctgtctcctttcctcctcctgggttcatgttgtaataaaagaagattgttggtgtgtaattaatttgttcaaaagaaaaaaaaaagcaaaacaagaaacttggttccaactgaagcctattttaattttattttattattttcctcttgttagaaataaaacccttagaaacattttttggaaacatgtttctgaagtgcatttctcttagacggggaagacagtgcttccatcaccagtcagtggagcagctgtagtgctggcaggagcactagggctgaagccagggagctctgggttctgaaatcaagttccaccagcttcttaaccttgggcaagacattctgatcctcccccgactctaaccccaagccactttccctcaagtccaaacagatgggctcgggccccctcacccaaactcctacactacaacctcccccagttgatgccctccagtttatcctcctcaagctcccaaagggatttttttgttaatggctttattgagatataatttacatactataaaattcacttgtttgaaatgtacaattcagtgatttggggggtttctaaagtgtagatctgattatatactgcttaaaaccttccatgatgctttattgcccttaagattatacatagaatctcgttcttcctagaatgttttcctgtctaacccatatactgcataattccctgatttttctccacaggttatgcccctgatgaatggggactaaagctcagatgtgtggtcatttgcaacccctgagttcacttttttaagacagcttattgatatatataatgtacataccatacagtcacccacttaaaagtatacaattaaatagcttttagtatattcagagttgtgcagccatcattcgaaaaaaaatttcagaacattttcatcactgcagaaagaaactccatatcccttaggcgtcctttacccctcatcccatttgcctattctggacattttacataaatggaatcgtataatatgtgatcctttgtgtctagcttctttcacttagcaaagtggtttcaagcccattaatggtcccatagtagttggaaagatctctcttctgagtcccaaagtctttaagatgagggtgctggactaaatcagggaccatcaacagattgtttacatgtttttgtgggtgtttgcatgcatgtgtttttctgacaagaagactaaccagcttgtatcagattcataaagggatccttgaccctcca

SEQ ID NO: 432775 - DNA, 6891 bp, Homo sapiens
cttgttcctccgccgttgcaatgaactattttctctcagtccggggtggtacttttgagtaaccccttccaaatagaaacccataccagcctatttagctcggtctccactatatgaaggtttcctagggcttggtgtgacgcaacgtatacgaggctcggaaggacaccccgcggaaggatccggtttgttgtggtgtggggaggggagacgctgacaaaccaagatggcggcggcggcgctgaaggccgcggcgtttgggaggtaactgtggtggcgaaggctgcggtagtggggaggcaaccacacagtttggaagaaacggagcgggacgaagaggcggtagcagtagagtcagcctgagactctcagagcacgacggccacacgcccccttaggccctcggcgggcggcggctgccccgcttagggcctagcctccgagcattgcctcggcttcaaacagcggcggcgccatgagtccttaagggcggtccaagcctcccgatccctggcccagacctcgggcccaccatggagccggggtccgacgatttcctaccgccaccggagtgcccggtgttcgagcctagctgggccgagttccgagaccctcttggctacatcgcgaaaatcaggcccatcgcagagaaatcgggcatttgcaagatccgcccacccgcggactggcagccaccctttgctgtggaagtggacaacttcaggtttaccccccgaatccagaggctgaatgagctagaggcccagacgagagtgaaactgaactacttggaccagattgccaaattctgggaaatccagggctcctccttaaagattcccaatgtagaacggcggatcttggacctctacagtctcagcaaaattgtggtggaggaaggtggttatgaagctatctgcaaggaccgtcggtgggctcgggtagcccagcgcctcaactatccaccaggcaaaaatattggctccttgctacgctcccactacgaacgcattgtttatccctatgaaatgtaccagtctggagccaaccttgtgcagtgtaacacacgtccatttgataatgaggagaaggacaaggaatacaaaccccacagcatccccctacgacagtctgtgcagccttccaagttcaacagctatggccggcgggccaagagactgcagcctgatccggaacccacagaggaagacattgagaagaatccagagctgaaaaagctacagatctatggggcaggccccaagatgatgggcctgggcctcatggccaaagacaagactctgcggaagaaagataaggaggggcctgagtgtccccccacagtagtggtgaaggaggagttaggtggggatgtgaaggtggagtcaacatcgcctaagaccttcctggagagcaaggaggagctgagtcacagcccagaaccctgcaccaagatgaccatgaggctacggaggaaccacagcaatgcccagtttattgagtcatatgtctgccggatgtgttctcgaggggatgaggatgacaagctcctgctgtgtgatggctgtgatgacaactaccacatcttctgcctgctgcctcctctgcctgagatccccaagggtgtctggcggtgcccaaagtgtgtcatggcggagtgtaagcggcccccagaagcctttggctttgagcaggctacccgggaatacactctgcagagctttggcgagatggccgactcctttaaagctgactacttcaacatgcccgtgcatatggtgcccacagaacttgtggagaaggagttctggaggctggtaaatagcattgaggaagatgtgactgttgagtatggagctgacatccattccaaagaatttggcagcggtttccctgtcagtgacagtaaacggcacctaacccccgaagaggaggagtatgctaccagtggttggaacctaaatgtgatgccggtgttggaacagtctgtactgtgccacatcaatgcagatatctctggcatgaaggtgccctggctctacgtgggcatggtcttctcagccttttgctggcatattgaggatcactggagttactccattaactacctccactggggtgagccgaagacctggtatggggtgccctcacttgcagcagaacatttggaagaagtgatgaagaagctgacacctgaactatttgatagccagcctgacctcctgcaccaacttgtcaccctcatgaatcccaacaccctcatgtcccatggtgtgccagttgtccgcacaaaccagtgtgcaggagagtttgtcatcaccttcccccgtgcttaccacagcggcttcaaccaaggctacaactttgccgaggctgtcaacttttgcactgctgactggttgcctgctgggcgccagtgcattgagcactaccgccggctccggagatactgcgtcttctcccatgaggagcttatctgcaagatggctgcctgcccagagaagctagacctgaacctggcggcagctgtgcataaggagatgttcatcatggtgcaagaagagcggcgtctacgaaaggccctgctggagaagggtatcacagaggctgagcgagaggctttcgagctgctcccagatgatgagcgccagtgtatcaagtgcaagactacgtgtttcctgtcagccctggcctgctacgactgcccagacggccttgtctgcctttcccacatcaatgatctctgcaagtgctccagtagccggcagtacctgcggtatcggtataccttggatgagcttcctgccatgctgcataagctgaaggttcgggctgagtcctttgacacctgggccaacaaagtgcgagtggccctggaggtggaggatgggcggaagcgcagccttgaagaactgagggcactagagtctgaagcccgtgagcggaggtttcctaatagtgagctgctgcagcaactaaagaactgcctgagtgaggcagaggcttgcgtgtcccgagctctgggactggtcagcggccaggaagctggcccccacagggtggctggtctacagatgaccctgactgagctccgggcctttctggaccagatgaacaacctgccttgcgccatgcaccagattggggatgtcaagggtgttctggaacaggtggaggcctaccaggctgaggctcgtgaggccctggcctcactgccctccagtccagggctactgcagtccctgttggagagggggcggcagctgggggtggaggtgcctgaggcccagcagctccagcggcaggtggaacaggcgcgatggctggatgaggtgaaacgcacactggccccctcagcccgaaggggcaccttggctgtcatgcgaggactgttggtcgcgggtgccagtgtagcccctagccctgctgtggataaagcccaggccgagctgcaggaactgctgaccattgctgaacgctgggaggagaaagcccacctctgcctggaggccaggcagaagcatccaccagccacacttgaggccataatccgtgaagcggaaaacatccctgttcacctgcccaacatccaggctctcaaggaggctcttgctaaggcccgggcctggattgctgatgttgatgagatccaaaatggtgaccactacccctgcctggatgacttggagggcctagtagctgtgggccgggacctacctgtggggctggaggagctgagacagctagagctacaggtactgacagcgcactcctggagggagaaggcctccaagaccttcctcaagaaaaattcttgctacacgctgctggaggttctctgcccatgtgcagatgccggctcagacagcaccaagcgcagccggtggatggagaaggagctggggttgtacaaatctgacacagagctgctggggctgtctgcgcaggacctcagggacccaggctctgtgctcgcctcctcagctctccgaggcccaatcccacctcatccccactgctggcctggtgggaatgggacaccaaattcctgtgtccactgtgtatgcgctcaaggcgcccgcgcctggagaccatcctggcactgctggtagccctgcagagactgcctgtgcggctgcccgagggcgaggccctgcagtgcctcacagagagggccatcagctggcaaggccgcgccaggcaggctctggcctctgaagatgtgactgctcttttgggacggctggctgagctccgccaacggctacaggctgaacctagacctgaggagcctcctaactaccctgcagcccctgcttctgaccccctcagagagggcagtggcaaggatatgcctaaggtccagggcttactggagaatggagacagtgtgaccagtcctgagaaggtagccccggaggagggctcaggtaagagagatctggagctgctgtcctcgctgttgccacagttgactggccctgtgttggaactgcctgaggcaacccgggcccccttggaggagctcatgatggagggggacctgctcgaggtgaccctggatgagaaccacagcatatggcagctgctgcaggctggacagcccccagacctggagaggatccgcacacttctggagctggagaaggcagagcgtcacgggagtcgggctcggggccgggccctggagaggcggcggcggcggaaggtggatcggggtggggagggcgatgacccagcccgagaggagctagagccaaagagggtacggagctcagggccagaggctgaggaggtccaggaggaggaagagctggaggaggagactgggggtgagggcccccctgcacccatccccaccactggcagccccagcacccaggagaaccagaatggcttggaaccggcggaagggaccacttcaggcccctcggcccctttctccactctgactccccggctgcatctgccctgcccacagcagccgcctcagcaacagttgtgacagtggctgagcctagcacagaccctgacagagacccccctcggcctcaaggatcctctttctgaccatcaagcctgcttcttggggggtgggcgggtagggggggtggccatccctgctacccgcccacccctgagtcccttgacttttgtattctgactccaaggtattgttcagacctcagctcctgggggccggcccctggagtcttccctccctggtagcctctaaccagcattcccagacacctgaggcagatagatggatgggctggtgggcaggggggtggctggggctgggccatcaccattccagagacaaggccagtgtatatgcaaactgggggactctcctcccttctctccccagttctggtcctggccaggccatgctacactaacccctgcccccactctcctcccctcttttccttccttcctacccccttctccctctcccttcccctgactgttccacccaggaggaggaaacttcacatagccgtgctcacagttttttattttaaaggaatttggctggggagctgaacagggctccctgtgatctgaagaaagcttttggtgcttgtcctcacaaccacctcagtcctccctccctgtcctcccctgtctcctttcctcctcctgggttcatgttgtaataaaagaagattgttggtgtgtaattaatttgttcaaaagaaaaaaaaaagcaaaacaagaaacttggttccaactgaagcctattttaattttattttattattttcctcttgttagaaataaaacccttagaaacattttttggaaacatgtttctgaagtgcatttctcttagacggggaagacagtgcttccatcaccagtcagtggagcagctgtagtgctggcaggagcactagggctgaagccagggagctctgggttctgaaatcaagttccaccagcttcttaaccttgggcaagacattctgatcctcccccgactctaaccccaagccactttccctcaagtccaaacagatgggctcgggccccctcacccaaactcctacactacaacctcccccagttgatgccctccagtttatcctcctcaagctcccaaagggatttttttgttaatggctttattgagatataatttacatactataaaattcacttgtttgaaatgtacaattcagtgatttggggggtttctaaagtgtagatctgattatatactgcttaaaaccttccatgatgctttattgcccttaagattatacatagaatctcgttcttcctagaatgttttcctgtctaacccatatactgcataattccctgatttttctccacaggttatgcccctgatgaatggggactaaagctcagatgtgtggtcatttgcaacccctgagttcacttttttaagacagcttattgatatatataatgtacataccatacagtcacccacttaaaagtatacaattaaatagcttttagtatattcagagttgtgcagccatcattcgaaaaaaaatttcagaacattttcatcactgcagaaagaaactccatatcccttaggcgtcctttacccctcatcccatttgcctattctggacattttacataaatggaatcgtataatatgtgatcctttgtgtctagcttctttcacttagcaaagtggtttcaagcccattaatggtcccatagtagttggaaagatctctcttctgagtcccaaagtctttaagatgagggtgctggactaaatcagggaccatcaacagattgtttacatgtttttgtgggtgtttgcatgcatgtgtttttctgacaagaagactaaccagcttgtatcagattcataaagggatccttgaccctcca

SEQ ID NO: 432776 - DNA, 7048 bp, Homo sapiens
cttgttcctccgccgttgcaatgaactattttctctcagtccggggtggtacttttgagtaaccccttccaaatagaaacccataccagcctatttagctcggtctccactatatgaaggtttcctagggcttggtgtgacgcaacgtatacgaggctcggaaggacaccccgcggaaggatccggtttgttgtggtgtggggaggggagacgctgacaaaccaagatggcggcggcggcgctgaaggccgcggcgtttgggaggtaactgtggtggcgaaggctgcggtagtggggaggcaaccacacagtttggaagaaacggagcgggacgaagaggcggtagcagtagagtcagcctgagactctcagagcacgacggccacacgcccccttaggccctcggcgggcggcggctgccccgcttagggcctagcctccgagcattgcctcggcttcaaacagcggcggcgccatgagtccttaagggcggtccaagcctcccgatccctggcccagacctcgggcccaccatggagccggggtccgacgatttcctaccgccaccggagtgcccggtgttcgagcctagctgggccgagttccgagaccctcttggctacatcgcgaaaatcaggcccatcgcagagaaatcgggcatttgcaagatccgcccacccgcggactggcagccaccctttgctgtggaagtggacaacttcaggtttaccccccgaatccagaggctgaatgagctagaggcccagacgagagtgaaactgaactacttggaccagattgccaaattctgggaaatccagggctcctccttaaagattcccaatgtagaacggcggatcttggacctctacagtctcagcaaaattgtggtggaggaaggtggttatgaagctatctgcaaggaccgtcggtgggctcgggtagcccagcgcctcaactatccaccaggcaaaaatattggctccttgctacgctcccactacgaacgcattgtttatccctatgaaatgtaccagtctggagccaaccttgtgcagtgtaacacacgtccatttgataatgaggagaaggacaaggaatacaaaccccacagcatccccctacgacagtctgtgcagccttccaagttcaacagctatggccggcgggccaagagactgcagcctgatccggaacccacagaggaagacattgagaagaatccagagctgaaaaagctacagatctatggggcaggccccaagatgatgggcctgggcctcatggccaaagacaagactctgcggaagaaagataaggaggggcctgagtgtccccccacagtagtggtgaaggaggagttaggtggggatgtgaaggtggagtcaacatcgcctaagaccttcctggagagcaaggaggagctgagtcacagcccagaaccctgcaccaagatgaccatgaggctacggaggaaccacagcaatgcccagtttattgagtcatatgtctgccggatgtgttctcgaggggatgaggatgacaagctcctgctgtgtgatggctgtgatgacaactaccacatcttctgcctgctgcctcctctgcctgagatccccaagggtgtctggcggtgcccaaagtgtgtcatggcggagtgtaagcggcccccagaagcctttggctttgagcaggctacccgggaatacactctgcagagctttggcgagatggccgactcctttaaagctgactacttcaacatgcccgtgcatatggtgcccacagaacttgtggagaaggagttctggaggctggtaaatagcattgaggaagatgtgactgttgagtatggagctgacatccattccaaagaatttggcagcggtttccctgtcagtgacagtaaacggcacctaacccccgaagaggaggagtatgctaccagtggttggaacctaaatgtgatgccggtgttggaacagtctgtactgtgccacatcaatgcagatatctctggcatgaaggtgccctggctctacgtgggcatggtcttctcagccttttgctggcatattgaggatcactggagttactccattaactacctccactggggtgagccgaagacctggtatggggtgccctcacttgcagcagaacatttggaagaagtgatgaagaagctgacacctgaactatttgatagccagcctgacctcctgcaccaacttgtcaccctcatgaatcccaacaccctcatgtcccatggtgtgccagttgtccgcacaaaccagtgtgcaggagagtttgtcatcaccttcccccgtgcttaccacagcggcttcaaccaaggctacaactttgccgaggctgtcaacttttgcactgctgactggttgcctgctgggcgccagtgcattgagcactaccgccggctccggagatactgcgtcttctcccatgaggagcttatctgcaagatggctgcctgcccagagaagctagacctgaacctggcggcagctgtgcataaggagatgttcatcatggtgcaagaagagcggcgtctacgaaaggccctgctggagaagggtatcacagaggctgagcgagaggctttcgagctgctcccagatgatgagcgccagtgtatcaagtgcaagactacgtgtttcctgtcagccctggcctgctacgactgcccagacggccttgtctgcctttcccacatcaatgatctctgcaagtgctccagtagccggcagtacctgcggtatcggtataccttggatgagcttcctgccatgctgcataagctgaaggttcgggctgagtcctttgacacctgggccaacaaagtgcgagtggccctggaggtggaggatgggcggaagcgcagccttgaagaactgagggcactagagtctgaagcccgtgagcggaggtttcctaatagtgagctgctgcagcaactaaagaactgcctgagtgaggcagaggcttgcgtgtcccgagctctgggactggtcagcggccaggaagctggcccccacagggtggctggtctacagatgaccctgactgagctccgggcctttctggaccagatgaacaacctgccttgcgccatgcaccagattggggatgtcaagggtgttctggaacaggtggaggcctaccaggctgaggctcgtgaggccctggcctcactgccctccagtccagggctactgcagtccctgttggagagggggcggcagctgggggtggaggtgcctgaggcccagcagctccagcggcaggtggaacaggcgcgatggctggatgaggtgaaacgcacactggccccctcagcccgaaggggcaccttggctgtcatgcgaggactgttggtcgcgggtgccagtgtagcccctagccctgctgtggataaagcccaggccgagctgcaggaactgctgaccattgctgaacgctgggaggagaaagcccacctctgcctggaggccaggcagaagcatccaccagccacacttgaggccataatccgtgaagcggaaaacatccctgttcacctgcccaacatccaggctctcaaggaggctcttgctaaggcccgggcctggattgctgatgttgatgagatccaaaatggtgaccactacccctgcctggatgacttggagggcctagtagctgtgggccgggacctacctgtggggctggaggagctgagacagctagagctacaggtactgacagcgcactcctggagggagaaggcctccaagaccttcctcaagacagacagcaccaagcgcagccggtggatggagaaggagctggggttgtacaaatctgacacagagctgctggggctgtctgcgcaggacctcagggacccaggctctgtgatcgtggccttcaaggagggggaacagaaggagaaggagggtatcctgcagctgcgtcgcaccaattcggccaagcccagtccactggcatcatcgagcacggcctcctctacaacctctatctgtgtgtgtgggcaggtgctggctggggcgggagctctgcagtgtgacctgtgtcaggactggttccatgggcggtgtgtgtcagtgcctcgcctcctcagctctccgaggcccaatcccacctcatccccactgctggcctggtgggaatgggacaccaaattcctgtgtccactgtgtatgcgctcaaggcgcccgcgcctggagaccatcctggcactgctggtagccctgcagagactgcctgtgcggctgcccgagggcgaggccctgcagtgcctcacagagagggccatcagctggcaaggccgcgccaggcaggctctggcctctgaagatgtgactgctcttttgggacggctggctgagctccgccaacggctacaggctgaacctagacctgaggagcctcctaactaccctgcagcccctgcttctgaccccctcagagagggcagtggcaaggatatgcctaaggtccagggcttactggagaatggagacagtgtgaccagtcctgagaaggtagccccggaggagggctcaggtaagagagatctggagctgctgtcctcgctgttgccacagttgactggccctgtgttggaactgcctgaggcaacccgggcccccttggaggagctcatgatggagggggacctgctcgaggtgaccctggatgagaaccacagcatatggcagctgctgcaggctggacagcccccagacctggagaggatccgcacacttctggagctggagaaggcagagcgtcacgggagtcgggctcggggccgggccctggagaggcggcggcggcggaaggtggatcggggtggggagggcgatgacccagcccgagaggagctagagccaaagagggtacggagctcagggccagaggctgaggaggtccaggaggaggaagagctggaggaggagactgggggtgagggcccccctgcacccatccccaccactggcagccccagcacccaggagaaccagaatggcttggaaccggcggaagggaccacttcaggcccctcggcccctttctccactctgactccccggctgcatctgccctgcccacagcagccgcctcagcaacagttgtgacagtggctgagcctagcacagaccctgacagagacccccctcggcctcaaggatcctctttctgaccatcaagcctgcttcttggggggtgggcgggtagggggggtggccatccctgctacccgcccacccctgagtcccttgacttttgtattctgactccaaggtattgttcagacctcagctcctgggggccggcccctggagtcttccctccctggtagcctctaaccagcattcccagacacctgaggcagatagatggatgggctggtgggcaggggggtggctggggctgggccatcaccattccagagacaaggccagtgtatatgcaaactgggggactctcctcccttctctccccagttctggtcctggccaggccatgctacactaacccctgcccccactctcctcccctcttttccttccttcctacccccttctccctctcccttcccctgactgttccacccaggaggaggaaacttcacatagccgtgctcacagttttttattttaaaggaatttggctggggagctgaacagggctccctgtgatctgaagaaagcttttggtgcttgtcctcacaaccacctcagtcctccctccctgtcctcccctgtctcctttcctcctcctgggttcatgttgtaataaaagaagattgttggtgtgtaattaatttgttcaaaagaaaaaaaaaagcaaaacaagaaacttggttccaactgaagcctattttaattttattttattattttcctcttgttagaaataaaacccttagaaacattttttggaaacatgtttctgaagtgcatttctcttagacggggaagacagtgcttccatcaccagtcagtggagcagctgtagtgctggcaggagcactagggctgaagccagggagctctgggttctgaaatcaagttccaccagcttcttaaccttgggcaagacattctgatcctcccccgactctaaccccaagccactttccctcaagtccaaacagatgggctcgggccccctcacccaaactcctacactacaacctcccccagttgatgccctccagtttatcctcctcaagctcccaaagggatttttttgttaatggctttattgagatataatttacatactataaaattcacttgtttgaaatgtacaattcagtgatttggggggtttctaaagtgtagatctgattatatactgcttaaaaccttccatgatgctttattgcccttaagattatacatagaatctcgttcttcctagaatgttttcctgtctaacccatatactgcataattccctgatttttctccacaggttatgcccctgatgaatggggactaaagctcagatgtgtggtcatttgcaacccctgagttcacttttttaagacagcttattgatatatataatgtacataccatacagtcacccacttaaaagtatacaattaaatagcttttagtatattcagagttgtgcagccatcattcgaaaaaaaatttcagaacattttcatcactgcagaaagaaactccatatcccttaggcgtcctttacccctcatcccatttgcctattctggacattttacataaatggaatcgtataatatgtgatcctttgtgtctagcttctttcacttagcaaagtggtttcaagcccattaatggtcccatagtagttggaaagatctctcttctgagtcccaaagtctttaagatgagggtgctggactaaatcagggaccatcaacagattgtttacatgtttttgtgggtgtttgcatgcatgtgtttttctgacaagaagactaaccagcttgtatcagattcataaagggatccttgaccctcca

SEQ ID NO: 432777 - DNA, 6836 bp, Homo sapiens
tgcatctgcagtgtgacctagagtgatcccagattaaacttatagactgagtctttgatatgacacacatgtcacaaagaggcgactcagtatatacaggctgagaacttatatccgactgcatcgcccgctttgtcctcgcttggcggccctgcccgcttcaggccatccctccgagcattgcctcggcttcaaacagcggcggcgccatgagtccttaagggcggtccaagcctcccgatccctggcccagacctcgggcccaccatggagccggggtccgacgatttcctaccgccaccggagtgcccggtgttcgagcctagctgggccgagttccgagaccctcttggctacatcgcgaaaatcaggcccatcgcagagaaatcgggcatttgcaagatccgcccacccgcggactggcagccaccctttgctgtggaagtggacaacttcaggtttaccccccgaatccagaggctgaatgagctagaggcccagacgagagtgaaactgaactacttggaccagattgccaaattctgggaaatccagggctcctccttaaagattcccaatgtagaacggcggatcttggacctctacagtctcagcaaaattgtggtggaggaaggtggttatgaagctatctgcaaggaccgtcggtgggctcgggtagcccagcgcctcaactatccaccaggcaaaaatattggctccttgctacgctcccactacgaacgcattgtttatccctatgaaatgtaccagtctggagccaaccttgtgcagtgtaacacacgtccatttgataatgaggagaaggacaaggaatacaaaccccacagcatccccctacgacagtctgtgcagccttccaagttcaacagctatggccggcgggccaagagactgcagcctgatccggaacccacagaggaagacattgagaagaatccagagctgaaaaagctacagatctatggggcaggccccaagatgatgggcctgggcctcatggccaaagacaagactctgcggaagaaagataaggaggggcctgagtgtccccccacagtagtggtgaaggaggagttaggtggggatgtgaaggtggagtcaacatcgcctaagaccttcctggagagcaaggaggagctgagtcacagcccagaaccctgcaccaagatgaccatgaggctacggaggaaccacagcaatgcccagtttattgagtcatatgtctgccggatgtgttctcgaggggatgaggatgacaagctcctgctgtgtgatggctgtgatgacaactaccacatcttctgcctgctgcctcctctgcctgagatccccaagggtgtctggcggtgcccaaagtgtgtcatggcggagtgtaagcggcccccagaagcctttggctttgagcaggctacccgggaatacactctgcagagctttggcgagatggccgactcctttaaagctgactacttcaacatgcccgtgcatatggtgcccacagaacttgtggagaaggagttctggaggctggtaaatagcattgaggaagatgtgactgttgagtatggagctgacatccattccaaagaatttggcagcggtttccctgtcagtgacagtaaacggcacctaacccccgaagaggaggagtatgctaccagtggttggaacctaaatgtgatgccggtgttggaacagtctgtactgtgccacatcaatgcagatatctctggcatgaaggtgccctggctctacgtgggcatggtcttctcagccttttgctggcatattgaggatcactggagttactccattaactacctccactggggtgagccgaagacctggtatggggtgccctcacttgcagcagaacatttggaagaagtgatgaagaagctgacacctgaactatttgatagccagcctgacctcctgcaccaacttgtcaccctcatgaatcccaacaccctcatgtcccatggtgtgccagttgtccgcacaaaccagtgtgcaggagagtttgtcatcaccttcccccgtgcttaccacagcggcttcaaccaaggctacaactttgccgaggctgtcaacttttgcactgctgactggttgcctgctgggcgccagtgcattgagcactaccgccggctccggagatactgcgtcttctcccatgaggagcttatctgcaagatggctgcctgcccagagaagctagacctgaacctggcggcagctgtgcataaggagatgttcatcatggtgcaagaagagcggcgtctacgaaaggccctgctggagaagggtatcacagaggctgagcgagaggctttcgagctgctcccagatgatgagcgccagtgtatcaagtgcaagactacgtgtttcctgtcagccctggcctgctacgactgcccagacggccttgtctgcctttcccacatcaatgatctctgcaagtgctccagtagccggcagtacctgcggtatcggtataccttggatgagcttcctgccatgctgcataagctgaaggttcgggctgagtcctttgacacctgggccaacaaagtgcgagtggccctggaggtggaggatgggcggaagcgcagccttgaagaactgagggcactagagtctgaagcccgtgagcggaggtttcctaatagtgagctgctgcagcaactaaagaactgcctgagtgaggcagaggcttgcgtgtcccgagctctgggactggtcagcggccaggaagctggcccccacagggtggctggtctacagatgaccctgactgagctccgggcctttctggaccagatgaacaacctgccttgcgccatgcaccagattggggatgtcaagggtgttctggaacaggtggaggcctaccaggctgaggctcgtgaggccctggcctcactgccctccagtccagggctactgcagtccctgttggagagggggcggcagctgggggtggaggtgcctgaggcccagcagctccagcggcaggtggaacaggcgcgatggctggatgaggtgaaacgcacactggccccctcagcccgaaggggcaccttggctgtcatgcgaggactgttggtcgcgggtgccagtgtagcccctagccctgctgtggataaagcccaggccgagctgcaggaactgctgaccattgctgaacgctgggaggagaaagcccacctctgcctggaggccaggcagaagcatccaccagccacacttgaggccataatccgtgaagcggaaaacatccctgttcacctgcccaacatccaggctctcaaggaggctcttgctaaggcccgggcctggattgctgatgttgatgagatccaaaatggtgaccactacccctgcctggatgacttggagggcctagtagctgtgggccgggacctacctgtggggctggaggagctgagacagctagagctacaggtactgacagcgcactcctggagggagaaggcctccaagaccttcctcaagaaaaattcttgctacacgctgctggaggttctctgcccatgtgcagatgccggctcagacagcaccaagcgcagccggtggatggagaaggagctggggttgtacaaatctgacacagagctgctggggctgtctgcgcaggacctcagggacccaggctctgtgatcgtggccttcaaggagggggaacagaaggagaaggagggtatcctgcagctgcgtcgcaccaattcggccaagcccagtccactggcatcatcgagcacggcctcctctacaacctctatctgtgtgtgtgggcaggtgctggctggggcgggagctctgcagtgtgacctgtgtcaggactggttccatgggcggtgtgtgtcagtgcctcgcctcctcagctctccgaggcccaatcccacctcatccccactgctggcctggtgggaatgggacaccaaattcctgtgtccactgtgtatgcgctcaaggcgcccgcgcctggagaccatcctggcactgctggtagccctgcagagactgcctgtgcggctgcccgagggcgaggccctgcagtgcctcacagagagggccatcagctggcaaggccgcgccaggcaggctctggcctctgaagatgtgactgctcttttgggacggctggctgagctccgccaacggctacaggctgaacctagacctgaggagcctcctaactaccctgcagcccctgcttctgaccccctcagagagggcagtggcaaggatatgcctaaggtccagggcttactggagaatggagacagtgtgaccagtcctgagaaggtagccccggaggagggctcaggtaagagagatctggagctgctgtcctcgctgttgccacagttgactggccctgtgttggaactgcctgaggcaacccgggcccccttggaggagctcatgatggagggggacctgctcgaggtgaccctggatgagaaccacagcatatggcagctgctgcaggctggacagcccccagacctggagaggatccgcacacttctggagctggagaaggcagagcgtcacgggagtcgggctcggggccgggccctggagaggcggcggcggcggaaggtggatcggggtggggagggcgatgacccagcccgagaggagctagagccaaagagggtacggagctcagggccagaggctgaggaggtccaggaggaggaagagctggaggaggagactgggggtgagggcccccctgcacccatccccaccactggcagccccagcacccaggagaaccagaatggcttggaaccggcggaagggaccacttcaggcccctcggcccctttctccactctgactccccggctgcatctgccctgcccacagcagccgcctcagcaacagttgtgacagtggctgagcctagcacagaccctgacagagacccccctcggcctcaaggatcctctttctgaccatcaagcctgcttcttggggggtgggcgggtagggggggtggccatccctgctacccgcccacccctgagtcccttgacttttgtattctgactccaaggtattgttcagacctcagctcctgggggccggcccctggagtcttccctccctggtagcctctaaccagcattcccagacacctgaggcagatagatggatgggctggtgggcaggggggtggctggggctgggccatcaccattccagagacaaggccagtgtatatgcaaactgggggactctcctcccttctctccccagttctggtcctggccaggccatgctacactaacccctgcccccactctcctcccctcttttccttccttcctacccccttctccctctcccttcccctgactgttccacccaggaggaggaaacttcacatagccgtgctcacagttttttattttaaaggaatttggctggggagctgaacagggctccctgtgatctgaagaaagcttttggtgcttgtcctcacaaccacctcagtcctccctccctgtcctcccctgtctcctttcctcctcctgggttcatgttgtaataaaagaagattgttggtgtgtaattaatttgttcaaaagaaaaaaaaaagcaaaacaagaaacttggttccaactgaagcctattttaattttattttattattttcctcttgttagaaataaaacccttagaaacattttttggaaacatgtttctgaagtgcatttctcttagacggggaagacagtgcttccatcaccagtcagtggagcagctgtagtgctggcaggagcactagggctgaagccagggagctctgggttctgaaatcaagttccaccagcttcttaaccttgggcaagacattctgatcctcccccgactctaaccccaagccactttccctcaagtccaaacagatgggctcgggccccctcacccaaactcctacactacaacctcccccagttgatgccctccagtttatcctcctcaagctcccaaagggatttttttgttaatggctttattgagatataatttacatactataaaattcacttgtttgaaatgtacaattcagtgatttggggggtttctaaagtgtagatctgattatatactgcttaaaaccttccatgatgctttattgcccttaagattatacatagaatctcgttcttcctagaatgttttcctgtctaacccatatactgcataattccctgatttttctccacaggttatgcccctgatgaatggggactaaagctcagatgtgtggtcatttgcaacccctgagttcacttttttaagacagcttattgatatatataatgtacataccatacagtcacccacttaaaagtatacaattaaatagcttttagtatattcagagttgtgcagccatcattcgaaaaaaaatttcagaacattttcatcactgcagaaagaaactccatatcccttaggcgtcctttacccctcatcccatttgcctattctggacattttacataaatggaatcgtataatatgtgatcctttgtgtctagcttctttcacttagcaaagtggtttcaagcccattaatggtcccatagtagttggaaagatctctcttctgagtcccaaagtctttaagatgagggtgctggactaaatcagggaccatcaacagattgtttacatgtttttgtgggtgtttgcatgcatgtgtttttctgacaagaagactaaccagcttgtatcagattcataaagggatccttgaccctcca

SEQ ID NO: 432778 - DNA, 6550 bp, Homo sapiens
atcctcccattctttgccaccacagtcaggcatcccagcacttacccccaccccctggggcttcctcccctgcctcttcctgtaccaggcaggtgtatgagagaggatctacaggaagccttccagactgggactggcagccaccctttgctgtggaagtggacaacttcaggtttaccccccgaatccagaggctgaatgagctagaggcccagacgagagtgaaactgaactacttggaccagattgccaaattctgggaaatccagggctcctccttaaagattcccaatgtagaacggcggatcttggacctctacagtctcagcaaaattgtggtggaggaaggtggttatgaagctatctgcaaggaccgtcggtgggctcgggtagcccagcgcctcaactatccaccaggcaaaaatattggctccttgctacgctcccactacgaacgcattgtttatccctatgaaatgtaccagtctggagccaaccttgtgcagtgtaacacacgtccatttgataatgaggagaaggacaaggaatacaaaccccacagcatccccctacgacagtctgtgcagccttccaagttcaacagctatggccggcgggccaagagactgcagcctgatccggaacccacagaggaagacattgagaagaatccagagctgaaaaagctacagatctatggggcaggccccaagatgatgggcctgggcctcatggccaaagacaagactctgcggaagaaagataaggaggggcctgagtgtccccccacagtagtggtgaaggaggagttaggtggggatgtgaaggtggagtcaacatcgcctaagaccttcctggagagcaaggaggagctgagtcacagcccagaaccctgcaccaagatgaccatgaggctacggaggaaccacagcaatgcccagtttattgagtcatatgtctgccggatgtgttctcgaggggatgaggatgacaagctcctgctgtgtgatggctgtgatgacaactaccacatcttctgcctgctgcctcctctgcctgagatccccaagggtgtctggcggtgcccaaagtgtgtcatggcggagtgtaagcggcccccagaagcctttggctttgagcaggctacccgggaatacactctgcagagctttggcgagatggccgactcctttaaagctgactacttcaacatgcccgtgcatatggtgcccacagaacttgtggagaaggagttctggaggctggtaaatagcattgaggaagatgtgactgttgagtatggagctgacatccattccaaagaatttggcagcggtttccctgtcagtgacagtaaacggcacctaacccccgaagaggaggagtatgctaccagtggttggaacctaaatgtgatgccggtgttggaacagtctgtactgtgccacatcaatgcagatatctctggcatgaaggtgccctggctctacgtgggcatggtcttctcagccttttgctggcatattgaggatcactggagttactccattaactacctccactggggtgagccgaagacctggtatggggtgccctcacttgcagcagaacatttggaagaagtgatgaagaagctgacacctgaactatttgatagccagcctgacctcctgcaccaacttgtcaccctcatgaatcccaacaccctcatgtcccatggtgtgccagttgtccgcacaaaccagtgtgcaggagagtttgtcatcaccttcccccgtgcttaccacagcggcttcaaccaaggctacaactttgccgaggctgtcaacttttgcactgctgactggttgcctgctgggcgccagtgcattgagcactaccgccggctccggagatactgcgtcttctcccatgaggagcttatctgcaagatggctgcctgcccagagaagctagacctgaacctggcggcagctgtgcataaggagatgttcatcatggtgcaagaagagcggcgtctacgaaaggccctgctggagaagggtatcacagaggctgagcgagaggctttcgagctgctcccagatgatgagcgccagtgtatcaagtgcaagactacgtgtttcctgtcagccctggcctgctacgactgcccagacggccttgtctgcctttcccacatcaatgatctctgcaagtgctccagtagccggcagtacctgcggtatcggtataccttggatgagcttcctgccatgctgcataagctgaaggttcgggctgagtcctttgacacctgggccaacaaagtgcgagtggccctggaggtggaggatgggcggaagcgcagccttgaagaactgagggcactagagtctgaagcccgtgagcggaggtttcctaatagtgagctgctgcagcaactaaagaactgcctgagtgaggcagaggcttgcgtgtcccgagctctgggactggtcagcggccaggaagctggcccccacagggtggctggtctacagatgaccctgactgagctccgggcctttctggaccagatgaacaacctgccttgcgccatgcaccagattggggatgtcaagggtgttctggaacaggtggaggcctaccaggctgaggctcgtgaggccctggcctcactgccctccagtccagggctactgcagtccctgttggagagggggcggcagctgggggtggaggtgcctgaggcccagcagctccagcggcaggtggaacaggcgcgatggctggatgaggtgaaacgcacactggccccctcagcccgaaggggcaccttggctgtcatgcgaggactgttggtcgcgggtgccagtgtagcccctagccctgctgtggataaagcccaggccgagctgcaggaactgctgaccattgctgaacgctgggaggagaaagcccacctctgcctggaggccaggcagaagcatccaccagccacacttgaggccataatccgtgaagcggaaaacatccctgttcacctgcccaacatccaggctctcaaggaggctcttgctaaggcccgggcctggattgctgatgttgatgagatccaaaatggtgaccactacccctgcctggatgacttggagggcctagtagctgtgggccgggacctacctgtggggctggaggagctgagacagctagagctacaggtactgacagcgcactcctggagggagaaggcctccaagaccttcctcaagaaaaattcttgctacacgctgctggaggttctctgcccatgtgcagatgccggctcagacagcaccaagcgcagccggtggatggagaaggagctggggttgtacaaatctgacacagagctgctggggctgtctgcgcaggacctcagggacccaggctctgtgatcgtggccttcaaggagggggaacagaaggagaaggagggtatcctgcagctgcgtcgcaccaattcggccaagcccagtccactggcatcatcgagcacggcctcctctacaacctctatctgtgtgtgtgggcaggtgctggctggggcgggagctctgcagtgtgacctgtgtcaggactggttccatgggcggtgtgtgtcagtgcctcgcctcctcagctctccgaggcccaatcccacctcatccccactgctggcctggtgggaatgggacaccaaattcctgtgtccactgtgtatgcgctcaaggcgcccgcgcctggagaccatcctggcactgctggtagccctgcagagactgcctgtgcggctgcccgagggcgaggccctgcagtgcctcacagagagggccatcagctggcaaggccgcgccaggcaggctctggcctctgaagatgtgactgctcttttgggacggctggctgagctccgccaacggctacaggctgaacctagacctgaggagcctcctaactaccctgcagcccctgcttctgaccccctcagagagggcagtggcaaggatatgcctaaggtccagggcttactggagaatggagacagtgtgaccagtcctgagaaggtagccccggaggagggctcaggtaagagagatctggagctgctgtcctcgctgttgccacagttgactggccctgtgttggaactgcctgaggcaacccgggcccccttggaggagctcatgatggagggggacctgctcgaggtgaccctggatgagaaccacagcatatggcagctgctgcaggctggacagcccccagacctggagaggatccgcacacttctggagctggagaaggcagagcgtcacgggagtcgggctcggggccgggccctggagaggcggcggcggcggaaggtggatcggggtggggagggcgatgacccagcccgagaggagctagagccaaagagggtacggagctcagggccagaggctgaggaggtccaggaggaggaagagctggaggaggagactgggggtgagggcccccctgcacccatccccaccactggcagccccagcacccaggagaaccagaatggcttggaaccggcggaagggaccacttcaggcccctcggcccctttctccactctgactccccggctgcatctgccctgcccacagcagccgcctcagcaacagttgtgacagtggctgagcctagcacagaccctgacagagacccccctcggcctcaaggatcctctttctgaccatcaagcctgcttcttggggggtgggcgggtagggggggtggccatccctgctacccgcccacccctgagtcccttgacttttgtattctgactccaaggtattgttcagacctcagctcctgggggccggcccctggagtcttccctccctggtagcctctaaccagcattcccagacacctgaggcagatagatggatgggctggtgggcaggggggtggctggggctgggccatcaccattccagagacaaggccagtgtatatgcaaactgggggactctcctcccttctctccccagttctggtcctggccaggccatgctacactaacccctgcccccactctcctcccctcttttccttccttcctacccccttctccctctcccttcccctgactgttccacccaggaggaggaaacttcacatagccgtgctcacagttttttattttaaaggaatttggctggggagctgaacagggctccctgtgatctgaagaaagcttttggtgcttgtcctcacaaccacctcagtcctccctccctgtcctcccctgtctcctttcctcctcctgggttcatgttgtaataaaagaagattgttggtgtgtaattaatttgttcaaaagaaaaaaaaaagcaaaacaagaaacttggttccaactgaagcctattttaattttattttattattttcctcttgttagaaataaaacccttagaaacattttttggaaacatgtttctgaagtgcatttctcttagacggggaagacagtgcttccatcaccagtcagtggagcagctgtagtgctggcaggagcactagggctgaagccagggagctctgggttctgaaatcaagttccaccagcttcttaaccttgggcaagacattctgatcctcccccgactctaaccccaagccactttccctcaagtccaaacagatgggctcgggccccctcacccaaactcctacactacaacctcccccagttgatgccctccagtttatcctcctcaagctcccaaagggatttttttgttaatggctttattgagatataatttacatactataaaattcacttgtttgaaatgtacaattcagtgatttggggggtttctaaagtgtagatctgattatatactgcttaaaaccttccatgatgctttattgcccttaagattatacatagaatctcgttcttcctagaatgttttcctgtctaacccatatactgcataattccctgatttttctccacaggttatgcccctgatgaatggggactaaagctcagatgtgtggtcatttgcaacccctgagttcacttttttaagacagcttattgatatatataatgtacataccatacagtcacccacttaaaagtatacaattaaatagcttttagtatattcagagttgtgcagccatcattcgaaaaaaaatttcagaacattttcatcactgcagaaagaaactccatatcccttaggcgtcctttacccctcatcccatttgcctattctggacattttacataaatggaatcgtataatatgtgatcctttgtgtctagcttctttcacttagcaaagtggtttcaagcccattaatggtcccatagtagttggaaagatctctcttctgagtcccaaagtctttaagatgagggtgctggactaaatcagggaccatcaacagattgtttacatgtttttgtgggtgtttgcatgcatgtgtttttctgacaagaagactaaccagcttgtatcagattcataaagggatccttgaccctcca

SEQ ID NO: 432779 - DNA, 6683 bp, Homo sapiens
agccgggcgtggtggcgtgcgcctatagttccagctactcaggaggctgaggcaggaggatcacttgagcccaggaggtcaagtctacagtcagccgtgattgcaccactccattccagcttgggcgacagagcaagaccgtctcaaaaaaacaaaaacgaaagaaatgagagtgaggtggggctaagcactgcctagagtctgggatccggttcattgggagaaaccctgggtagtgaaagtgtggagtgctgtattcctctgttctcccctaagactggacccaaagatagtggtcagtgggagggggtggccagcctctttgagccatttcttcttcaggcccagacgagagtgaaactgaactacttggaccagattgccaaattctgggaaatccagggctcctccttaaagattcccaatgtagaacggcggatcttggacctctacagtctcagcaaaattgtggtggaggaaggtggttatgaagctatctgcaaggaccgtcggtgggctcgggtagcccagcgcctcaactatccaccaggcaaaaatattggctccttgctacgctcccactacgaacgcattgtttatccctatgaaatgtaccagtctggagccaaccttgtgcagtgtaacacacgtccatttgataatgaggagaaggacaaggaatacaaaccccacagcatccccctacgacagtctgtgcagccttccaagttcaacagctatggccggcgggccaagagactgcagcctgatccggaacccacagaggaagacattgagaagaatccagagctgaaaaagctacagatctatggggcaggccccaagatgatgggcctgggcctcatggccaaagacaagactctgcggaagaaagataaggaggggcctgagtgtccccccacagtagtggtgaaggaggagttaggtggggatgtgaaggtggagtcaacatcgcctaagaccttcctggagagcaaggaggagctgagtcacagcccagaaccctgcaccaagatgaccatgaggctacggaggaaccacagcaatgcccagtttattgagtcatatgtctgccggatgtgttctcgaggggatgaggatgacaagctcctgctgtgtgatggctgtgatgacaactaccacatcttctgcctgctgcctcctctgcctgagatccccaagggtgtctggcggtgcccaaagtgtgtcatggcggagtgtaagcggcccccagaagcctttggctttgagcaggctacccgggaatacactctgcagagctttggcgagatggccgactcctttaaagctgactacttcaacatgcccgtgcatatggtgcccacagaacttgtggagaaggagttctggaggctggtaaatagcattgaggaagatgtgactgttgagtatggagctgacatccattccaaagaatttggcagcggtttccctgtcagtgacagtaaacggcacctaacccccgaagaggaggagtatgctaccagtggttggaacctaaatgtgatgccggtgttggaacagtctgtactgtgccacatcaatgcagatatctctggcatgaaggtgccctggctctacgtgggcatggtcttctcagccttttgctggcatattgaggatcactggagttactccattaactacctccactggggtgagccgaagacctggtatggggtgccctcacttgcagcagaacatttggaagaagtgatgaagaagctgacacctgaactatttgatagccagcctgacctcctgcaccaacttgtcaccctcatgaatcccaacaccctcatgtcccatggtgtgccagttgtccgcacaaaccagtgtgcaggagagtttgtcatcaccttcccccgtgcttaccacagcggcttcaaccaaggctacaactttgccgaggctgtcaacttttgcactgctgactggttgcctgctgggcgccagtgcattgagcactaccgccggctccggagatactgcgtcttctcccatgaggagcttatctgcaagatggctgcctgcccagagaagctagacctgaacctggcggcagctgtgcataaggagatgttcatcatggtgcaagaagagcggcgtctacgaaaggccctgctggagaagggtatcacagaggctgagcgagaggctttcgagctgctcccagatgatgagcgccagtgtatcaagtgcaagactacgtgtttcctgtcagccctggcctgctacgactgcccagacggccttgtctgcctttcccacatcaatgatctctgcaagtgctccagtagccggcagtacctgcggtatcggtataccttggatgagcttcctgccatgctgcataagctgaaggttcgggctgagtcctttgacacctgggccaacaaagtgcgagtggccctggaggtggaggatgggcggaagcgcagccttgaagaactgagggcactagagtctgaagcccgtgagcggaggtttcctaatagtgagctgctgcagcaactaaagaactgcctgagtgaggcagaggcttgcgtgtcccgagctctgggactggtcagcggccaggaagctggcccccacagggtggctggtctacagatgaccctgactgagctccgggcctttctggaccagatgaacaacctgccttgcgccatgcaccagattggggatgtcaagggtgttctggaacaggtggaggcctaccaggctgaggctcgtgaggccctggcctcactgccctccagtccagggctactgcagtccctgttggagagggggcggcagctgggggtggaggtgcctgaggcccagcagctccagcggcaggtggaacaggcgcgatggctggatgaggtgaaacgcacactggccccctcagcccgaaggggcaccttggctgtcatgcgaggactgttggtcgcgggtgccagtgtagcccctagccctgctgtggataaagcccaggccgagctgcaggaactgctgaccattgctgaacgctgggaggagaaagcccacctctgcctggaggccaggcagaagcatccaccagccacacttgaggccataatccgtgaagcggaaaacatccctgttcacctgcccaacatccaggctctcaaggaggctcttgctaaggcccgggcctggattgctgatgttgatgagatccaaaatggtgaccactacccctgcctggatgacttggagggcctagtagctgtgggccgggacctacctgtggggctggaggagctgagacagctagagctacaggtactgacagcgcactcctggagggagaaggcctccaagaccttcctcaagaaaaattcttgctacacgctgctggaggttctctgcccatgtgcagatgccggctcagacagcaccaagcgcagccggtggatggagaaggagctggggttgtacaaatctgacacagagctgctggggctgtctgcgcaggacctcagggacccaggctctgtgatcgtggccttcaaggagggggaacagaaggagaaggagggtatcctgcagctgcgtcgcaccaattcggccaagcccagtccactggcatcatcgagcacggcctcctctacaacctctatctgtgtgtgtgggcaggtgctggctggggcgggagctctgcagtgtgacctgtgtcaggactggttccatgggcggtgtgtgtcagtgcctcgcctcctcagctctccgaggcccaatcccacctcatccccactgctggcctggtgggaatgggacaccaaattcctgtgtccactgtgtatgcgctcaaggcgcccgcgcctggagaccatcctggcactgctggtagccctgcagagactgcctgtgcggctgcccgagggcgaggccctgcagtgcctcacagagagggccatcagctggcaaggccgcgccaggcaggctctggcctctgaagatgtgactgctcttttgggacggctggctgagctccgccaacggctacaggctgaacctagacctgaggagcctcctaactaccctgcagcccctgcttctgaccccctcagagagggcagtggcaaggatatgcctaaggtccagggcttactggagaatggagacagtgtgaccagtcctgagaaggtagccccggaggagggctcaggtaagagagatctggagctgctgtcctcgctgttgccacagttgactggccctgtgttggaactgcctgaggcaacccgggcccccttggaggagctcatgatggagggggacctgctcgaggtgaccctggatgagaaccacagcatatggcagctgctgcaggctggacagcccccagacctggagaggatccgcacacttctggagctggagaaggcagagcgtcacgggagtcgggctcggggccgggccctggagaggcggcggcggcggaaggtggatcggggtggggagggcgatgacccagcccgagaggagctagagccaaagagggtacggagctcagggccagaggctgaggaggtccaggaggaggaagagctggaggaggagactgggggtgagggcccccctgcacccatccccaccactggcagccccagcacccaggagaaccagaatggcttggaaccggcggaagggaccacttcaggcccctcggcccctttctccactctgactccccggctgcatctgccctgcccacagcagccgcctcagcaacagttgtgacagtggctgagcctagcacagaccctgacagagacccccctcggcctcaaggatcctctttctgaccatcaagcctgcttcttggggggtgggcgggtagggggggtggccatccctgctacccgcccacccctgagtcccttgacttttgtattctgactccaaggtattgttcagacctcagctcctgggggccggcccctggagtcttccctccctggtagcctctaaccagcattcccagacacctgaggcagatagatggatgggctggtgggcaggggggtggctggggctgggccatcaccattccagagacaaggccagtgtatatgcaaactgggggactctcctcccttctctccccagttctggtcctggccaggccatgctacactaacccctgcccccactctcctcccctcttttccttccttcctacccccttctccctctcccttcccctgactgttccacccaggaggaggaaacttcacatagccgtgctcacagttttttattttaaaggaatttggctggggagctgaacagggctccctgtgatctgaagaaagcttttggtgcttgtcctcacaaccacctcagtcctccctccctgtcctcccctgtctcctttcctcctcctgggttcatgttgtaataaaagaagattgttggtgtgtaattaatttgttcaaaagaaaaaaaaaagcaaaacaagaaacttggttccaactgaagcctattttaattttattttattattttcctcttgttagaaataaaacccttagaaacattttttggaaacatgtttctgaagtgcatttctcttagacggggaagacagtgcttccatcaccagtcagtggagcagctgtagtgctggcaggagcactagggctgaagccagggagctctgggttctgaaatcaagttccaccagcttcttaaccttgggcaagacattctgatcctcccccgactctaaccccaagccactttccctcaagtccaaacagatgggctcgggccccctcacccaaactcctacactacaacctcccccagttgatgccctccagtttatcctcctcaagctcccaaagggatttttttgttaatggctttattgagatataatttacatactataaaattcacttgtttgaaatgtacaattcagtgatttggggggtttctaaagtgtagatctgattatatactgcttaaaaccttccatgatgctttattgcccttaagattatacatagaatctcgttcttcctagaatgttttcctgtctaacccatatactgcataattccctgatttttctccacaggttatgcccctgatgaatggggactaaagctcagatgtgtggtcatttgcaacccctgagttcacttttttaagacagcttattgatatatataatgtacataccatacagtcacccacttaaaagtatacaattaaatagcttttagtatattcagagttgtgcagccatcattcgaaaaaaaatttcagaacattttcatcactgcagaaagaaactccatatcccttaggcgtcctttacccctcatcccatttgcctattctggacattttacataaatggaatcgtataatatgtgatcctttgtgtctagcttctttcacttagcaaagtggtttcaagcccattaatggtcccatagtagttggaaagatctctcttctgagtcccaaagtctttaagatgagggtgctggactaaatcagggaccatcaacagattgtttacatgtttttgtgggtgtttgcatgcatgtgtttttctgacaagaagactaaccagcttgtatcagattcataaagggatccttgaccctcca

SEQ ID NO: 432780 - DNA, 6002 bp, Homo sapiens
cttgttcctccgccgttgcaatgaactattttctctcagtccggggtggtacttttgagtaaccccttccaaatagaaacccataccagcctatttagctcggtctccactatatgaaggtttcctagggcttggtgtgacgcaacgtatacgaggctcggaaggacaccccgcggaaggatccggtttgttgtggtgtggggaggggagacgctgacaaaccaagatggcggcggcggcgctgaaggccgcggcgtttgggaggtaactgtggtggcgaaggctgcggtagtggggaggcaaccacacagtttggaagaaacggagcgggacgaagaggcggtagcagtagagtcagcctgagactctcagagcacgacggccacacgcccccttaggccctcggcgggcggcggctgccccgcttagggcctagcctccgagcattgcctcggcttcaaacagcggcggcgccatgagtccttaagggcggtccaagcctcccgatccctggcccagacctcgggcccaccatggagccggggtccgacgatttcctaccgccaccggagtgcccggtgttcgagcctagctgggccgagttccgagaccctcttggctacatcgcgaaaatcaggcccatcgcagagaaatcgggcatttgcaagatccgcccacccgcggactggcagccaccctttgctgtggaagtggacaacttcaggtttaccccccgaatccagaggctgaatgagctagaggcccagacgagagtgaaactgaactacttggaccagattgccaaattctgggaaatccagggctcctccttaaagattcccaatgtagaacggcggatcttggacctctacagtctcagcaaaattgtggtggaggaaggtggttatgaagctatctgcaaggaccgtcggtgggctcgggtagcccagcgcctcaactatccaccaggcaaaaatattggctccttgctacgctcccactacgaacgcattgtttatccctatgaaatgtaccagtctggagccaaccttgtgcagtgtaacacacgtccatttgataatgaggagaaggacaaggaatacaaaccccacagcatccccctacgacagtctgtgcagccttccaagttcaacagctatggccggcgggccaagagactgcagcctgatccggaacccacagaggaagacattgagaagaatccagagctgaaaaagctacagatctatggggcaggccccaagatgatgggcctgggcctcatggccaaagacaagactctgcggaagaaagataaggaggggcctgagtgtccccccacagtagtggtgaaggaggagttaggtggggatgtgaaggtggagtcaacatcgcctaagaccttcctggagagcaaggaggagctgagtcacagcccagaaccctgcaccaagatgaccatgaggctacggaggaaccacagcaatgcccagtttattgagtcatatgtctgccggatgtgttctcgaggggatgaggatgacaagctcctgctgtgtgatggctgtgatgacaactaccacatcttctgcctgctgcctcctctgcctgagatccccaagggtgtctggcggtgcccaaagtgtgtcatggcggagtgtaagcggcccccagaagcctttggctttgagcaggctacccgggaatacactctgcagagctttggcgagatggccgactcctttaaagctgactacttcaacatgcccgtgcatatggtgcccacagaacttgtggagaaggagttctggaggctggtaaatagcattgaggaagatgtgactgttgagtatggagctgacatccattccaaagaatttggcagcggtttccctgtcagtgacagtaaacggcacctaacccccgaagaggaggagtatgctaccagtggttggaacctaaatgtgatgccggtgttggaacagtctgtactgtgccacatcaatgcagatatctctggcatgaaggtgccctggctctacgtgggcatggtcttctcagccttttgctggcatattgaggatcactggagttactccattaactacctccactggggtgagccgaagacctggtatggggtgccctcacttgcagcagaacatttggaagaagtgatgaagaagctgacacctgaactatttgatagccagcctgacctcctgcaccaacttgtcaccctcatgaatcccaacaccctcatgtcccatggtgtgccagttgtccgcacaaaccagtgtgcaggagagtttgtcatcaccttcccccgtgcttaccacagcggcttcaaccaaggctacaactttgccgaggctgtcaacttttgcactgctgactggttgcctgctgggcgccagtgcattgagcactaccgccggctccggagatactgcgtcttctcccatgaggagcttatctgcaagatggctgcctgcccagagaagctagacctgaacctggcggcagctgtgcataaggagatgttcatcatggtgcaagaagagcggcgtctacgaaaggccctgctggagaagggtatcacagaggctgagcgagaggctttcgagctgctcccagatgatgagcgccagtgtatcaagtgcaagactacgtgtttcctgtcagccctggcctgctacgactgcccagacggccttgtctgcctttcccacatcaatgatctctgcaagtgctccagtagccggcagtacctgcggtatcggtataccttggatgagcttcctgccatgctgcataagctgaaggttcgggctgagtcctttgacacctgggccaacaaagtgcgagtggccctggaggtggaggatgggcggaagcgcagccttgaagaactgagggcactagagtctgaagcccgtgagcggaggtttcctaatagtgagctgctgcagcaactaaagaactgcctgagtgaggcagaggcttgcgtgtcccgagctctgggactggtcagcggccaggaagctggcccccacagggtggctggtctacagatgaccctgactgagctccgggcctttctggaccagatgaacaacctgccttgcgccatgcaccagattggggatgtcaagggtgttctggaacaggtggaggcctaccaggctgaggctcgtgaggccctggcctcactgccctccagtccagggctactgcagtccctgttggagagggggcggcagctgggggtggaggtgcctgaggcccagcagctccagcggcaggtggaacaggcgcgatggctggatgaggtgaaacgcacactggccccctcagcccgaaggggcaccttggctgtcatgcgaggactgttggtcgcgggtgccagtgtagcccctagccctgctgtggataaagcccaggccgagctgcaggaactgctgaccattgctgaacgctgggaggagaaagcccacctctgcctggaggccaggcagaagcatccaccagccacacttgaggccataatccgtgaagcggaaaacatccctgttcacctgcccaacatccaggctctcaaggaggctcttgctaaggcccgggcctggattgctgatgttgatgagatccaaaatggtgaccactacccctgcctggatgacttggagggcctagtagctgtgggccgggacctacctgtggggctggaggagctgagacagctagagctacaggtactgacagcgcactcctggagggagaaggcctccaagaccttcctcaagaaaaattcttgctacacgctgctggaggttctctgcccatgtgcagatgccggctcagacagcaccaagcgcagccggtggatggagaaggagctggggttgtacaaatctgacacagagctgctggggctgtctgcgcaggacctcagggacccaggctctgtgatcgtggccttcaaggagggggaacagaaggagaaggagggtatcctgcagctgcgtcgcaccaattcggccaagcccagtccactggcatcatcgagcacggcctcctctacaacctctatctgtgtgtgtgggcaggtgctggctggggcgggagctctgcagtgtgacctgtgtcaggactggttccatgggcggtgtgtgtcagtgcctcgcctcctcagctctccgaggcccaatcccacctcatccccactgctggcctggtgggaatgggacaccaaattcctgtgtccactgtgtatgcgctcaaggcgcccgcgcctggagaccatcctggcactgctggtagccctgcagagactgcctgtgcggctgcccgagggcgaggccctgcagtgcctcacagagagggccatcagctggcaaggccgcgccaggcaggctctggcctctgaagatgtgactgctcttttgggacggctggctgagctccgccaacggctacaggctgaacctagacctgaggagcctcctaactaccctgcagcccctgcttctgaccccctcagagagggcagtggcaaggatatgcctaaggtccagggcttactggagaatggagacagtgtgaccagtcctgagaaggtagccccggaggagggctcaggtaagagagatctggagctgctgtcctcgctgttgccacagttgactggccctgtgttggaactgcctgaggcaacccgggcccccttggaggagctcatgatggagggggacctgctcgaggtgaccctggatgagaaccacagcatatggcagctgctgcaggctggacagcccccagacctggagaggatccgcacacttctggagctggagaaggcagagcgtcacgggagtcgggctcggggccgggccctggagaggcggcggcggcggaaggtggatcggggtggggagggcgatgacccagcccgagaggagctagagccaaagagggtacggagctcagggccagaggctgaggaggtccaggaggaggaagagctggaggaggagactgggggtgagggcccccctgcacccatccccaccactggcagccccagcacccaggagaaccagaatggcttggaaccggcggaagggaccacttcaggcccctcggcccctttctccactctgactccccggctgcatctgccctgcccacagcagccgcctcagcaacagttgtgacagtggctgagcctagcacagaccctgacagagacccccctcggcctcaaggatcctctttctgaccatcaagcctgctgggggtggccatccctgctacccgcccacccctgagtcccttgacttttgtattctgactccaaggtattgttcagacctcagctcctgggggccggcccctggagtcttccctccctggtagcctctaaccagcattcccagacacctgaggcagatagatggatgggctggtgggcaggggggtggctggggctgggccatcaccattccagagacaaggccagtgtatatgcaaactgggggactctcctcccttctctccccagttctggtcctggccaggccatgctacactaacccctgcccccactctcctcccctcttttccttccttcctacccccttctccctctcccttcccctgactgttccacccaggaggaggaaacttcacatagccgtgctcacagttttttattttaaaggaatttggctggggagctgaacagggctccctgtgatctgaagaaagcttttggtgcttgtcctcacaaccacctcagtcctccctccctgtcctcccctgtctcctttcctcctcctgggttcatgttgtaataaaagaagattgttggtgtgtaattaatttgttcaaaagaaaaaaaaaagcaaaacaagaaacttggttccaactgaagcctattttaattttattttattattttcctcttgttagaaataaaacccttagaaacattttttgga

SEQ ID NO: 432781 - DNA, 6807 bp, Homo sapiens
cttgttcctccgccgttgcaatgaactattttctctcagtccggggtggtacttttgagtaaccccttccaaatagaaacccataccagcctatttagctcggtctccactatatgaaggtttcctagggcttggtgtgacgcaacgtatacgaggctcggaaggacaccccgcggaaggatccggtttgttgtggtgtggggaggggagacgctgacaaaccaagatggcggcggcggcgctgaaggccgcggcgtttgggaggtaactgtggtggcgaaggctgcggtagtggggaggcaaccacacagtttggaagaaacggagcgggacgaagaggcggtagcagtagagtcagcctgagactctcagagcacgacggccacacgcccccttaggccctcggcgggcggcggctgccccgcttagggcctagcctccgagcattgcctcggcttcaaacagcggcggcgccatgagtccttaagggcggtccaagcctcccgatccctggcccagacctcgggcccaccatggagccggggtccgacgatttcctaccgccaccggagtgcccggtgttcgagcctagctgggccgagttccgagaccctcttggctacatcgcgaaaatcaggcccatcgcagagaaatcgggcatttgcaagatccgcccacccgcggactggcagccaccctttgctgtggaagtggacaacttcaggtttaccccccgaatccagaggctgaatgagctagaggcccagacgagagtgaaactgaactacttggaccagattgccaaattctgggaaatccagggctcctccttaaagattcccaatgtagaacggcggatcttggacctctacagtctcagcaaaattgtggtggaggaaggtggttatgaagctatctgcaaggaccgtcggtgggctcgggtagcccagcgcctcaactatccaccaggcaaaaatattggctccttgctacgctcccactacgaacgcattgtttatccctatgaaatgtaccagtctggagccaaccttgtgcagtgtaacacacgtccatttgataatgaggagaaggacaaggaatacaaaccccacagcatccccctacgacagtctgtgcagccttccaagttcaacagctatggccggcgggccaagagactgcagcctgatccggaacccacagaggaagacattgagaagaatccagagctgaaaaagctacagatctatggggcaggccccaagatgatgggcctgggcctcatggccaaagacaagactctgcggaagaaagataaggaggggcctgagtgtccccccacagtagtggtgaaggaggagttaggtggggatgtgaaggtggagtcaacatcgcctaagaccttcctggagagcaaggaggagctgagtcacagcccagaaccctgcaccaagatgaccatgaggctacggaggaaccacagcaatgcccagtttattgagtcatatgtctgccggatgtgttctcgaggggatgaggatgacaagctcctgctgtgtgatggctgtgatgacaactaccacatcttctgcctgctgcctcctctgcctgagatccccaagggtgtctggcggtgcccaaagtgtgtcatggcggagtgtaagcggcccccagaagcctttggctttgagcaggctacccgggaatacactctgcagagctttggcgagatggccgactcctttaaagctgactacttcaacatgcccgtgcatatggtgcccacagaacttgtggagaaggagttctggaggctggtaaatagcattgaggaagatgtgactgttgagtatggagctgacatccattccaaagaatttggcagcggtttccctgtcagtgacagtaaacggcacctaacccccgaagaggaggagtatgctaccagtggttggaacctaaatgtgatgccggtgttggaacagtctgtactgtgccacatcaatgcagatatctctggcatgaaggtgccctggctctacgtgggcatggtcttctcagccttttgctggcatattgaggatcactggagttactccattaactacctccactggggtgagccgaagacctggtatggggtgccctcacttgcagcagaacatttggaagaagtgatgaagaagctgacacctgaactatttgatagccagcctgacctcctgcaccaacttgtcaccctcatgaatcccaacaccctcatgtcccatggtgtgccagttgtccgcacaaaccagtgtgcaggagagtttgtcatcaccttcccccgtgcttaccacagcggcttcaaccaaggctacaactttgccgaggctgtcaacttttgcactgctgactggttgcctgctgggcgccagtgcattgagcactaccgccggctccggagatactgcgtcttctcccatgaggagcttatctgcaagatggctgcctgcccagagaagctagacctgaacctggcggcagctgtgcataaggagatgttcatcatggtgcaagaagagcggcgtctacgaaaggccctgctggagaagggtatcacagaggctgagcgagaggctttcgagctgctcccagatgatgagcgccagtgtatcaagtgcaagactacgtgtttcctgtcagccctggcctgctacgactgcccagacggccttgtctgcctttcccacatcaatgatctctgcaagtgctccagtagccggcagtacctgcggtatcggtataccttggatgagcttcctgccatgctgcataagctgaaggttcgggctgagtcctttgacacctgggccaacaaagtgcgagtggccctggaggtggaggatgggcggaagcgcagccttgaagaactgagggcactagagtctgaagcccgtgagcggaggtttcctaatagtgagctgctgcagcaactaaagaactgcctgagtgaggcagaggcttgcgtgtcccgagctctgggactggtcagcggccaggaagctggcccccacagggtggctggtctacagatgaccctgactgagctccgggcctttctggaccagatgaacaacctgccttgcgccatgcaccagattggggatgtcaagggtgttctggaacaggtggaggcctaccaggctgaggctcgtgaggccctggcctcactgccctccagtccagggctactgcagtccctgttggagagggggcggcagctgggggtggaggtgcctgaggcccagcagctccagcggcaggtggaacaggcgcgatggctggatgaggtgaaacgcacactggccccctcagcccgaaggggcaccttggctgtcatgcgaggactgttggtcgcgggtgccagtgtagcccctagccctgctgtggataaagcccaggccgagctgcaggaactgctgaccattgctgaacgctgggaggagaaagcccacctctgcctggaggccaggcagaagcatccaccagccacacttgaggccataatccgtgaagcggaaaacatccctgttcacctgcccaacatccaggctctcaaggaggctcttgctaaggcccgggcctggattgctgatgttgatgagatccaaaatggtgaccactacccctgcctggatgacttggagggcctagtagctgtgggccgggacctacctgtggggctggaggagctgagacagctagagctacaggtactgacagcgcactcctggagggagaaggcctccaagaccttcctcaagaaaaattcttgctacacgctgctggaggttctctgcccatgtgcagatgccggctcagacagcaccaagcgcagccggtggatggagaaggagctggggttgtacaaatctgacacagagctgctggggctgtctgcgcaggacctcagggacccaggctctgtgatcgtggccttcaaggagggggaacagaaggagaaggagggtatcctgcagctgcgtcgcaccaattcggccaagcccagtccactggcatcatcgagcacggcctcctctacaacctctatctgtgtgtgtgggcaggtgctggctggggcgggagctctgcagtgtgacctgtgtcaggactggttccatgggcggtgtgtgtcagtgcctcgcctcctcagctctccgaggcccaatcccacctcatccccactgctggcctggtgggaatgggacaccaaattcctgtgtccactgtgtatgcgctcaaggcgcccgcgcctggagaccatcctggcactgctggtagccctgcagagactgcctgtgcggctgcccgagggcgaggccctgcagtgcctcacagagagggccatcagctggcaaggccgcgccaggcaggctctggcctctgaagatgtgactgctcttttgggacggctggctgagctccgccaacggctacaggctgaacctagacctgaggagcctcctaactaccctgcagcccctgcttctgaccccctcagagagggcagtggcaaggatatgcctaaggtccagggcttactggagaatggagacagtgtgaccagtcctgagaaggtagccccggaggagggctcaggtaagagagatctggagctgctgtcctcgctgttgccacagttgactggccctgtgttggaactgcctgaggcaacccgggcccccttggaggagctcatgatggagggggacctgctcgaggtgaccctggatgagaaccacagcatatggcagctgctgcaggctggacagcccccagacctggagaggatccgcacacttctggagctggagaaggcagagcgtcacgggagtcgggctcggggccgggccctggagaggcggcggcggcggaaggtggatcggggtggggagggcgatgacccagcccgagaggagctagagccaaagagggtacggagctcagggccagaggctgaggaggtccaggaggaggaagagctggaggaggagactgggggtgagggcccccctgcacccatccccaccactggcagccccagcacccaggagaaccagaatggcttggaaccggcggaagggaccacttcaggcccctcggcccctttctccactctgactccccggctgcatctgccctgcccacagcagccgcctcagcaacagttgtgacagtggctgagcctagcacagaccctgacagagacccccctcggcctcaaggatctcctcccttctctccccagttctggtcctggccaggccatgctacactaacccctgcccccactctcctcccctcttttccttccttcctacccccttctccctctcccttcccctgactgttccacccaggaggaggaaacttcacatagccgtgctcacagttttttattttaaaggaatttggctggggagctgaacagggctccctgtgatctgaagaaagcttttggtgcttgtcctcacaaccacctcagtcctccctccctgtcctcccctgtctcctttcctcctcctgggttcatgttgtaataaaagaagattgttggtgtgtaattaatttgttcaaaagaaaaaaaaaagcaaaacaagaaacttggttccaactgaagcctattttaattttattttattattttcctcttgttagaaataaaacccttagaaacattttttggaaacatgtttctgaagtgcatttctcttagacggggaagacagtgcttccatcaccagtcagtggagcagctgtagtgctggcaggagcactagggctgaagccagggagctctgggttctgaaatcaagttccaccagcttcttaaccttgggcaagacattctgatcctcccccgactctaaccccaagccactttccctcaagtccaaacagatgggctcgggccccctcacccaaactcctacactacaacctcccccagttgatgccctccagtttatcctcctcaagctcccaaagggatttttttgttaatggctttattgagatataatttacatactataaaattcacttgtttgaaatgtacaattcagtgatttggggggtttctaaagtgtagatctgattatatactgcttaaaaccttccatgatgctttattgcccttaagattatacatagaatctcgttcttcctagaatgttttcctgtctaacccatatactgcataattccctgatttttctccacaggttatgcccctgatgaatggggactaaagctcagatgtgtggtcatttgcaacccctgagttcacttttttaagacagcttattgatatatataatgtacataccatacagtcacccacttaaaagtatacaattaaatagcttttagtatattcagagttgtgcagccatcattcgaaaaaaaatttcagaacattttcatcactgcagaaagaaactccatatcccttaggcgtcctttacccctcatcccatttgcctattctggacattttacataaatggaatcgtataatatgtgatcctttgtgtctagcttctttcacttagcaaagtggtttcaagcccattaatggtcccatagtagttggaaagatctctcttctgagtcccaaagtctttaagatgagggtgctggactaaatcagggaccatcaacagattgtttacatgtttttgtgggtgtttgcatgcatgtgtttttctgacaagaagactaaccagcttgtatcagattcataaagggatccttgaccctcca

SEQ ID NO: 432782 - DNA, 5959 bp, Homo sapiens
cttgttcctccgccgttgcaatgaactattttctctcagtccggggtggtacttttgagtaaccccttccaaatagaaacccataccagcctatttagctcggtctccactatatgaaggtttcctagggcttggtgtgacgcaacgtatacgaggctcggaaggacaccccgcggaaggatccggtttgttgtggtgtggggaggggagacgctgacaaaccaagatggcggcggcggcgctgaaggccgcggcgtttgggaggtaactgtggtggcgaaggctgcggtagtggggaggcaaccacacagtttggaagaaacggagcgggacgaagaggcggtagcagtagagtcagcctgagactctcagagcacgacggccacacgcccccttaggccctcggcgggcggcggctgccccgcttagggcctagcctccgagcattgcctcggcttcaaacagcggcggcgccatgagtccttaagggcggtccaagcctcccgatccctggcccagacctcgggcccaccatggagccggggtccgacgatttcctaccgccaccggagtgcccggtgttcgagcctagctgggccgagttccgagaccctcttggctacatcgcgaaaatcaggcccatcgcagagaaatcgggcatttgcaagatccgcccacccgcggactggcagccaccctttgctgtggaagtggacaacttcaggtttaccccccgaatccagaggctgaatgagctagaggcccagacgagagtgaaactgaactacttggaccagattgccaaattctgggaaatccagggctcctccttaaagattcccaatgtagaacggcggatcttggacctctacagtctcagcaaaattgtggtggaggaaggtggttatgaagctatctgcaaggaccgtcggtgggctcgggtagcccagcgcctcaactatccaccaggcaaaaatattggctccttgctacgctcccactacgaacgcattgtttatccctatgaaatgtaccagtctggagccaaccttgtgcagtgtaacacacgtccatttgataatgaggagaaggacaaggaatacaaaccccacagcatccccctacgacagtctgtgcagccttccaagttcaacagctatggccggcgggccaagagactgcagcctgatccggaacccacagaggaagacattgagaagaatccagagctgaaaaagctacagatctatggggcaggccccaagatgatgggcctgggcctcatggccaaagacaagactctgcggaagaaagataaggaggggcctgagtgtccccccacagtagtggtgaaggaggagttaggtggggatgtgaaggtggagtcaacatcgcctaagaccttcctggagagcaaggaggagctgagtcacagcccagaaccctgcaccaagatgaccatgaggctacggaggaaccacagcaatgcccagtttattgagtcatatgtctgccggatgtgttctcgaggggatgaggatgacaagctcctgctgtgtgatggctgtgatgacaactaccacatcttctgcctgctgcctcctctgcctgagatccccaagggtgtctggcggtgcccaaagtgtgtcatggcggagtgtaagcggcccccagaagcctttggctttgagcaggctacccgggaatacactctgcagagctttggcgagatggccgactcctttaaagctgactacttcaacatgcccgtgcatatggtgcccacagaacttgtggagaaggagttctggaggctggtaaatagcattgaggaagatgtgactgttgagtatggagctgacatccattccaaagaatttggcagcggtttccctgtcagtgacagtaaacggcacctaacccccgaagaggaggagtatgctaccagtggttggaacctaaatgtgatgccggtgttggaacagtctgtactgtgccacatcaatgcagatatctctggcatgaaggtgccctggctctacgtgggcatggtcttctcagccttttgctggcatattgaggatcactggagttactccattaactacctccactggggtgagccgaagacctggtatggggtgccctcacttgcagcagaacatttggaagaagtgatgaagaagctgacacctgaactatttgatagccagcctgacctcctgcaccaacttgtcaccctcatgaatcccaacaccctcatgtcccatggtgtgccagttgtccgcacaaaccagtgtgcaggagagtttgtcatcaccttcccccgtgcttaccacagcggcttcaaccaaggctacaactttgccgaggctgtcaacttttgcactgctgactggttgcctgctgggcgccagtgcattgagcactaccgccggctccggagatactgcgtcttctcccatgaggagcttatctgcaagatggctgcctgcccagagaagctagacctgaacctggcggcagctgtgcataaggagatgttcatcatggtgcaagaagagcggcgtctacgaaaggccctgctggagaagggtatcacagaggctgagcgagaggctttcgagctgctcccagatgatgagcgccagtgtatcaagtgcaagactacgtgtttcctgtcagccctggcctgctacgactgcccagacggccttgtctgcctttcccacatcaatgatctctgcaagtgctccagtagccggcagtacctgcggtatcggtataccttggatgagcttcctgccatgctgcataagctgaaggttcgggctgagtcctttgacacctgggccaacaaagtgcgagtggccctggaggtggaggatgggcggaagcgcagccttgaagaactgagggcactagagtctgaagcccgtgagcggaggtttcctaatagtgagctgctgcagcaactaaagaactgcctgagtgaggcagaggcttgcgtgtcccgagctctgggactggtcagcggccaggaagctggcccccacagggtggctggtctacagatgaccctgactgagctccgggcctttctggaccagatgaacaacctgccttgcgccatgcaccagattggggatgtcaagggtgttctggaacaggtggaggcctaccaggctgaggctcgtgaggccctggcctcactgccctccagtccagggctactgcagtccctgttggagagggggcggcagctgggggtggaggtgcctgaggcccagcagctccagcggcaggtggaacaggcgcgatggctggatgaggtgaaacgcacactggccccctcagcccgaaggggcaccttggctgtcatgcgaggactgttggtcgcgggtgccagtgtagcccctagccctgctgtggataaagcccaggccgagctgcaggaactgctgaccattgctgaacgctgggaggagaaagcccacctctgcctggaggccaggcagaagcatccaccagccacacttgaggccataatccgtgaagcggaaaacatccctgttcacctgcccaacatccaggctctcaaggaggctcttgctaaggcccgggcctggattgctgatgttgatgagatccaaaatggtgaccactacccctgcctggatgacttggagggcctagtagctgtgggccgggacctacctgtggggctggaggagctgagacagctagagctacaggtactgacagcgcactcctggagggagaaggcctccaagaccttcctcaagaaaaattcttgctacacgctgctggaggttctctgcccatgtgcagatgccggctcagacagcaccaagcgcagccggtggatggagaaggagctggggttgtacaaatctgacacagagctgctggggctgtctgcgcaggacctcagggacccaggctctgtgatcgtggccttcaaggagggggaacagaaggagaaggagggtatcctgcagctgcgtcgcaccaattcggccaagcccagtccactggcatcatcgagcacggcctcctctacaacctctatctgtgtgtgtgggcaggtgctggctggggcgggagctctgcagtgtgacctgtgtcaggactggttccatgggcggtgtgtgtcagtgcctcgcctcctcagctctccgaggcccaatcccacctcatccccactgctggcctggtgggaatgggacaccaaattcctgtgtccactgtgtatgcgctcaaggcgcccgcgcctggagaccatcctggcactgctggtagccctgcagagactgcctgtgcggctgcccgagggcgaggccctgcagtgcctcacagagagggccatcagctggcaaggccgcgccaggcaggctctggcctctgaagatgtgactgctcttttgggacggctggctgagctccgccaacggctacaggctgaacctagacctgaggagcctcctaactaccctgcagcccctgcttctgaccccctcagagagggcagtggcaaggatatgcctaaggtccagggcttactggagaatggagacagtgtgaccagtcctgagaaggtagccccggaggagggctcaggtaagagagatctggagctgctgtcctcgctgttgccacagttgactggccctgtgttggaactgcctgaggcaacccgggcccccttggaggagctcatgatggagggggacctgctcgaggtgaccctggatgagaaccacagcatatggcagctgctgcaggctggacagcccccagacctggagaggatccgcacacttctggagctggagaaggcagagcgtcacgggagtcgggctcggggccgggccctggagaggcggcggcggcggaaggtggatcggggtggggagggcgatgacccagcccgagaggagctagagccaaagagggtacggagctcagggccagaggctgaggaggtccaggaggaggaagagctggaggaggagactgggggtgagggcccccctgcacccatccccaccactggcagccccagcacccaggagaaccagaatggcttggaaccggcggaagggaccacttcaggcccctcggcccctttctccactctgactccccggctgcatctgccctgcccacagcagccgcctcagcaacagttgtgacagtggctgagcctagcacagaccctgacagagacccccctcggcctcaaggatcctctttctgaccatcaagcctgcttcttggggggtgggcgggtagggggggtggccatccctgctacccgcccacccctgagtcccttgacttttgtattctgactccaaggtattgttcagacctcagctcctgggggccggcccctggagtcttccctccctggtagcctctaaccagcattcccagacacctgaggcagatagatggatgggctggtgggcaggggggtggctggggctgggccatcaccattccagagacaaggccagtgtatatgcaaactgggggactctcctcccctcttttccttccttcctacccccttctccctctcccttcccctgactgttccacccaggaggaggaaacttcacatagccgtgctcacagttttttattttaaaggaatttggctggggagctgaacagggctccctgtgatctgaagaaagcttttggtgcttgtcctcacaaccacctcagtcctccctccctgtcctcccctgtctcctttcctcctcctgggttcatgttgtaataaaagaagattgttggtgtgtaattaatttgttcaaaagaaaaaaaaaagcaaaacaagaaacttggttccaactgaagcctattttaattttattttattattttcctcttgttagaaataaaacccttagaaacattttttgga

SEQ ID NO: 432783 - DNA, 6877 bp, Homo sapiens
cttgttcctccgccgttgcaatgaactattttctctcagtccggggtggtacttttgagtaaccccttccaaatagaaacccataccagcctatttagctcggtctccactatatgaaggtttcctagggcttggtgtgacgcaacgtatacgaggctcggaaggacaccccgcggaaggatccggtttgttgtggtgtggggaggggagacgctgacaaaccaagatggcggcggcggcgctgaaggccgcggcgtttgggaggtaactgtggtggcgaaggctgcggtagtggggaggcaaccacacagtttggaagaaacggagcgggacgaagaggcggtagcagtagagtcagcctgagactctcagagcacgacggccacacgcccccttaggccctcggcgggcggcggctgccccgcttagggcctagcctccgagcattgcctcggcttcaaacagcggcggcgccatgagtccttaagggcggtccaagcctcccgatccctggcccagacctcgggcccaccatggagccggggtccgacgatttcctaccgccaccggagtgcccggtgttcgagcctagctgggccgagttccgagaccctcttggctacatcgcgaaaatcaggcccatcgcagagaaatcgggcatttgcaagatccgcccacccgcggactggcagccaccctttgctgtggaagtggacaacttcaggtttaccccccgaatccagaggctgaatgagctagaggcccagacgagagtgaaactgaactacttggaccagattgccaaattctgggaaatccagggctcctccttaaagattcccaatgtagaacggcggatcttggacctctacagtctcagcaaaattgtggtggaggaaggtggttatgaagctatctgcaaggaccgtcggtgggctcgggtagcccagcgcctcaactatccaccaggcaaaaatattggctccttgctacgctcccactacgaacgcattgtttatccctatgaaatgtaccagtctggagccaaccttgtgcagtgtaacacacgtccatttgataatgaggagaaggacaaggaatacaaaccccacagcatccccctacgacagtctgtgcagccttccaagttcaacagctatggccggcgggccaagagactgcagcctgatccggaacccacagaggaagacattgagaagaatccagagctgaaaaagctacagatctatggggcaggccccaagatgatgggcctgggcctcatggccaaagacaagactctgcggaagaaagataaggaggggcctgagtgtccccccacagtagtggtgaaggaggagttaggtggggatgtgaaggtggagtcaacatcgcctaagaccttcctggagagcaaggaggagctgagtcacagcccagaaccctgcaccaagatgaccatgaggctacggaggaaccacagcaatgcccagtttattgagtcatatgtctgccggatgtgttctcgaggggatgaggatgacaagctcctgctgtgtgatggctgtgatgacaactaccacatcttctgcctgctgcctcctctgcctgagatccccaagggtgtctggcggtgcccaaagtgtgtcatggcggagtgtaagcggcccccagaagcctttggctttgagcaggctacccgggaatacactctgcagagctttggcgagatggccgactcctttaaagctgactacttcaacatgcccgtgcatatggtgcccacagaacttgtggagaaggagttctggaggctggtaaatagcattgaggaagatgtgactgttgagtatggagctgacatccattccaaagaatttggcagcggtttccctgtcagtgacagtaaacggcacctaacccccgaagaggaggagtatgctaccagtggttggaacctaaatgtgatgccggtgttggaacagtctgtactgtgccacatcaatgcagatatctctggcatgaaggtgccctggctctacgtgggcatggtcttctcagccttttgctggcatattgaggatcactggagttactccattaactacctccactggggtgagccgaagacctggtatggggtgccctcacttgcagcagaacatttggaagaagtgatgaagaagctgacacctgaactatttgatagccagcctgacctcctgcaccaacttgtcaccctcatgaatcccaacaccctcatgtcccatggtgtgccagttgtccgcacaaaccagtgtgcaggagagtttgtcatcaccttcccccgtgcttaccacagcggcttcaaccaaggctacaactttgccgaggctgtcaacttttgcactgctgactggttgcctgctgggcgccagtgcattgagcactaccgccggctccggagatactgcgtcttctcccatgaggagcttatctgcaagatggctgcctgcccagagaagctagacctgaacctggcggcagctgtgcataaggagatgttcatcatggtgcaagaagagcggcgtctacgaaaggccctgctggagaagggtatcacagaggctgagcgagaggctttcgagctgctcccagatgatgagcgccagtgtatcaagtgcaagactacgtgtttcctgtcagccctggcctgctacgactgcccagacggccttgtctgcctttcccacatcaatgatctctgcaagtgctccagtagccggcagtacctgcggtatcggtataccttggatgagcttcctgccatgctgcataagctgaaggttcgggctgagtcctttgacacctgggccaacaaagtgcgagtggccctggaggtggaggatgggcggaagcgcagccttgaagaactgagggcactagagtctgaagcccgtgagcggaggtttcctaatagtgagctgctgcagcaactaaagaactgcctgagtgaggcagaggcttgcgtgtcccgagctctgggactggtcagcggccaggaagctggcccccacagggtggctggtctacagatgaccctgactgagctccgggcctttctggaccagatgaacaacctgccttgcgccatgcaccagattggggatgtcaagggtgttctggaacaggtggaggcctaccaggctgaggctcgtgaggccctggcctcactgccctccagtccagggctactgcagtccctgttggagagggggcggcagctgggggtggaggtgcctgaggcccagcagctccagcggcaggtggaacaggcgcgatggctggatgaggtgaaacgcacactggccccctcagcccgaaggggcaccttggctgtcatgcgaggactgttggtcgcgggtgccagtgtagcccctagccctgctgtggataaagcccaggccgagctgcaggaactgctgaccattgctgaacgctgggaggagaaagcccacctctgcctggaggccaggcagaagcatccaccagccacacttgaggccataatccgtgaagcggaaaacatccctgttcacctgcccaacatccaggctctcaaggaggctcttgctaaggcccgggcctggattgctgatgttgatgagatccaaaatggtgaccactacccctgcctggatgacttggagggcctagtagctgtgggccgggacctacctgtggggctggaggagctgagacagctagagctacaggtactgacagcgcactcctggagggagaaggcctccaagaccttcctcaagaaaaattcttgctacacgctgctggaggttctctgcccatgtgcagatgccggctcagacagcaccaagcgcagccggtggatggagaaggagctggggttgtacaaatctgacacagagctgctggggctgtctgcgcaggacctcagggacccaggctctgtgatcgtggccttcaaggagggggaacagaaggagaaggagggtatcctgcagctgcgtcgcaccaattcggccaagcccagtccactggcatcatcgagcacggcctcctctacaacctctatctgtgtgtgtgggcaggtgctggctggggcgggagctctgcagtgtgacctgtgtcaggactggttccatgggcggtgtgtgtcagtgcctcgcctcctcagctctccgaggcccaatcccacctcatccccactgctggcctggtgggaatgggacaccaaattcctgtgtccactgtgtatgcgctcaaggcgcccgcgcctggagaccatcctggcactgctggtagccctgcagagactgcctgtgcggctgcccgagggcgaggccctgcagtgcctcacagagagggccatcagctggcaaggccgcgccaggcaggctctggcctctgaagatgtgactgctcttttgggacggctggctgagctccgccaacggctacaggctgaacctagacctgaggagcctcctaactaccctgcagcccctgcttctgaccccctcagagagggcagtggcaaggatatgcctaaggtccagggcttactggagaatggagacagtgtgaccagtcctgagaaggtagccccggaggagggctcaggtaagagagatctggagctgctgtcctcgctgttgccacagttgactggccctgtgttggaactgcctgaggcaacccgggcccccttggaggagctcatgatggagggggacctgctcgaggtgaccctggatgagaaccacagcatatggcagctgctgcaggctggacagcccccagacctggagaggatccgcacacttctggagctggagaaggcagagcgtcacgggagtcgggctcggggccgggccctggagaggcggcggcggcggaaggtggatcggggtggggagggcgatgacccagcccgagaggagctagagccaaagagggtacggagctcagggccagaggctgaggaggtccaggaggaggaagagctggaggaggagactgggggtgagggcccccctgcacccatccccaccactggcagccccagcacccaggagaaccagaatggcttggaaccggcggaagggaccacttcaggcccctcggcccctttctccactctgactccccggctgcatctgccctgcccacagcagccgcctcagcaacagttgtgacagtggctgagcctagcacagaccctgacagagacccccctcggcctcaaggatcctctttctgaccatcaagcctgctccacccctgagtcccttgacttttgtattctgactccaaggtattgttcagacctcagctcctgggggccggcccctggagtcttccctccctggtagcctctaaccagcattcccagacacctgaggcagatagatggatgggctggtgggcaggggggtggctggggctgggccatcaccattccagagacaaggccagtgtatatgcaaactgggggactctcctcccttctctccccagttctggtcctggccaggccatgctacactaacccctgcccccactctcctcccctcttttccttccttcctacccccttctccctctcccttcccctgactgttcatgttgtaataaaagaagattgttggtgtgtaattaatttgttcaaaagaaaaaaaaaagcaaaacaagaaacttggttccaactgaagcctattttaattttattttattattttcctcttgttagaaataaaacccttagaaacattttttggaaacatgtttctgaagtgcatttctcttagacggggaagacagtgcttccatcaccagtcagtggagcagctgtagtgctggcaggagcactagggctgaagccagggagctctgggttctgaaatcaagttccaccagcttcttaaccttgggcaagacattctgatcctcccccgactctaaccccaagccactttccctcaagtccaaacagatgggctcgggccccctcacccaaactcctacactacaacctcccccagttgatgccctccagtttatcctcctcaagctcccaaagggatttttttgttaatggctttattgagatataatttacatactataaaattcacttgtttgaaatgtacaattcagtgatttggggggtttctaaagtgtagatctgattatatactgcttaaaaccttccatgatgctttattgcccttaagattatacatagaatctcgttcttcctagaatgttttcctgtctaacccatatactgcataattccctgatttttctccacaggttatgcccctgatgaatggggactaaagctcagatgtgtggtcatttgcaacccctgagttcacttttttaagacagcttattgatatatataatgtacataccatacagtcacccacttaaaagtatacaattaaatagcttttagtatattcagagttgtgcagccatcattcgaaaaaaaatttcagaacattttcatcactgcagaaagaaactccatatcccttaggcgtcctttacccctcatcccatttgcctattctggacattttacataaatggaatcgtataatatgtgatcctttgtgtctagcttctttcacttagcaaagtggtttcaagcccattaatggtcccatagtagttggaaagatctctcttctgagtcccaaagtctttaagatgagggtgctggactaaatcagggaccatcaacagattgtttacatgtttttgtgggtgtttgcatgcatgtgtttttctgacaagaagactaaccagcttgtatcagattcataaagggatccttgaccctcca

SEQ ID NO: 432784 - DNA, 5846 bp, Homo sapiens
cttgttcctccgccgttgcaatgaactattttctctcagtccggggtggtacttttgagtaaccccttccaaatagaaacccataccagcctatttagctcggtctccactatatgaaggtttcctagggcttggtgtgacgcaacgtatacgaggctcggaaggacaccccgcggaaggatccggtttgttgtggtgtggggaggggagacgctgacaaaccaagatggcggcggcggcgctgaaggccgcggcgtttgggaggtaactgtggtggcgaaggctgcggtagtggggaggcaaccacacagtttggaagaaacggagcgggacgaagaggcggtagcagtagagtcagcctgagactctcagagcacgacggccacacgcccccttaggccctcggcgggcggcggctgccccgcttagggcctagcctccgagcattgcctcggcttcaaacagcggcggcgccatgagtccttaagggcggtccaagcctcccgatccctggcccagacctcgggcccaccatggagccggggtccgacgatttcctaccgccaccggagtgcccggtgttcgagcctagctgggccgagttccgagaccctcttggctacatcgcgaaaatcaggcccatcgcagagaaatcgggcatttgcaagatccgcccacccgcggactggcagccaccctttgctgtggaagtggacaacttcaggtttaccccccgaatccagaggctgaatgagctagaggcccagacgagagtgaaactgaactacttggaccagattgccaaattctgggaaatccagggctcctccttaaagattcccaatgtagaacggcggatcttggacctctacagtctcagcaaaattgtggtggaggaaggtggttatgaagctatctgcaaggaccgtcggtgggctcgggtagcccagcgcctcaactatccaccaggcaaaaatattggctccttgctacgctcccactacgaacgcattgtttatccctatgaaatgtaccagtctggagccaaccttgtgcagtgtaacacacgtccatttgataatgaggagaaggacaaggaatacaaaccccacagcatccccctacgacagtctgtgcagccttccaagttcaacagctatggccggcgggccaagagactgcagcctgatccggaacccacagaggaagacattgagaagaatccagagctgaaaaagctacagatctatggggcaggccccaagatgatgggcctgggcctcatggccaaagacaagactctgcggaagaaagataaggaggggcctgagtgtccccccacagtagtggtgaaggaggagttaggtggggatgtgaaggtggagtcaacatcgcctaagaccttcctggagagcaaggaggagctgagtcacagcccagaaccctgcaccaagatgaccatgaggctacggaggaaccacagcaatgcccagtttattgagtcatatgtctgccggatgtgttctcgaggggatgaggatgacaagctcctgctgtgtgatggctgtgatgacaactaccacatcttctgcctgctgcctcctctgcctgagatccccaagggtgtctggcggtgcccaaagtgtgtcatggcggagtgtaagcggcccccagaagcctttggctttgagcaggctacccgggaatacactctgcagagctttggcgagatggccgactcctttaaagctgactacttcaacatgcccgtgcatatggtgcccacagaacttgtggagaaggagttctggaggctggtaaatagcattgaggaagatgtgactgttgagtatggagctgacatccattccaaagaatttggcagcggtttccctgtcagtgacagtaaacggcacctaacccccgaagaggaggagtatgctaccagtggttggaacctaaatgtgatgccggtgttggaacagtctgtactgtgccacatcaatgcagatatctctggcatgaaggtgccctggctctacgtgggcatggtcttctcagccttttgctggcatattgaggatcactggagttactccattaactacctccactggggtgagccgaagacctggtatggggtgccctcacttgcagcagaacatttggaagaagtgatgaagaagctgacacctgaactatttgatagccagcctgacctcctgcaccaacttgtcaccctcatgaatcccaacaccctcatgtcccatggtgtgccagttgtccgcacaaaccagtgtgcaggagagtttgtcatcaccttcccccgtgcttaccacagcggcttcaaccaaggctacaactttgccgaggctgtcaacttttgcactgctgactggttgcctgctgggcgccagtgcattgagcactaccgccggctccggagatactgcgtcttctcccatgaggagcttatctgcaagatggctgcctgcccagagaagctagacctgaacctggcggcagctgtgcataaggagatgttcatcatggtgcaagaagagcggcgtctacgaaaggccctgctggagaagggtatcacagaggctgagcgagaggctttcgagctgctcccagatgatgagcgccagtgtatcaagtgcaagactacgtgtttcctgtcagccctggcctgctacgactgcccagacggccttgtctgcctttcccacatcaatgatctctgcaagtgctccagtagccggcagtacctgcggtatcggtataccttggatgagcttcctgccatgctgcataagctgaaggttcgggctgagtcctttgacacctgggccaacaaagtgcgagtggccctggaggtggaggatgggcggaagcgcagccttgaagaactgagggcactagagtctgaagcccgtgagcggaggtttcctaatagtgagctgctgcagcaactaaagaactgcctgagtgaggcagaggcttgcgtgtcccgagctctgggactggtcagcggccaggaagctggcccccacagggtggctggtctacagatgaccctgactgagctccgggcctttctggaccagatgaacaacctgccttgcgccatgcaccagattggggatgtcaagggtgttctggaacaggtggaggcctaccaggctgaggctcgtgaggccctggcctcactgccctccagtccagggctactgcagtccctgttggagagggggcggcagctgggggtggaggtgcctgaggcccagcagctccagcggcaggtggaacaggcgcgatggctggatgaggtgaaacgcacactggccccctcagcccgaaggggcaccttggctgtcatgcgaggactgttggtcgcgggtgccagtgtagcccctagccctgctgtggataaagcccaggccgagctgcaggaactgctgaccattgctgaacgctgggaggagaaagcccacctctgcctggaggccaggcagaagcatccaccagccacacttgaggccataatccgtgaagcggaaaacatccctgttcacctgcccaacatccaggctctcaaggaggctcttgctaaggcccgggcctggattgctgatgttgatgagatccaaaatggtgaccactacccctgcctggatgacttggagggcctagtagctgtgggccgggacctacctgtggggctggaggagctgagacagctagagctacaggtactgacagcgcactcctggagggagaaggcctccaagaccttcctcaagaaaaattcttgctacacgctgctggaggttctctgcccatgtgcagatgccggctcagacagcaccaagcgcagccggtggatggagaaggagctggggttgtacaaatctgacacagagctgctggggctgtctgcgcaggacctcagggacccaggctctgtgatcgtggccttcaaggagggggaacagaaggagaaggagggtatcctgcagctgcgtcgcaccaattcggccaagcccagtccactggcatcatcgagcacggcctcctctacaacctctatctgtgtgtgtgggcaggtgctggctggggcgggagctctgcagtgtgacctgtgtcaggactggttccatgggcggtgtgtgtcagtgcctcgcctcctcagctctccgaggcccaatcccacctcatccccactgctggcctggtgggaatgggacaccaaattcctgtgtccactgtgtatgcgctcaaggcgcccgcgcctggagaccatcctggcactgctggtagccctgcagagactgcctgtgcggctgcccgagggcgaggccctgcagtgcctcacagagagggccatcagctggcaaggccgcgccaggcaggctctggcctctgaagatgtgactgctcttttgggacggctggctgagctccgccaacggctacaggctgaacctagacctgaggagcctcctaactaccctgcagcccctgcttctgaccccctcagagagggcagtggcaaggatatgcctaaggtccagggcttactggagaatggagacagtgtgaccagtcctgagaaggtagccccggaggagggctcaggtaagagagatctggagctgctgtcctcgctgttgccacagttgactggccctgtgttggaactgcctgaggcaacccgggcccccttggaggagctcatgatggagggggacctgctcgaggtgaccctggatgagaaccacagcatatggcagctgctgcaggctggacagcccccagacctggagaggatccgcacacttctggagctggagaaggcagagcgtcacgggagtcgggctcggggccgggccctggagaggcggcggcggcggaaggtggatcggggtggggagggcgatgacccagcccgagaggagctagagccaaagagggtacggagctcagggccagaggctgaggaggtccaggaggaggaagagctggaggaggagactgggggtgagggcccccctgcacccatccccaccactggcagccccagcacccaggagaaccagaatggcttggaaccggcggaagggaccacttcaggcccctcggcccctttctccactctgactccccggctgcatctgccctgcccacagcagccgcctcagcaacagttgtgacagtggctgagcctagcacagaccctgacagagacccccctcggcctcaaggatcctctttctgaccatcaagcctgcttcttggggggtgggcgggtagggggggtggccatccctgctacccgcccacccctgagtcccttgacttttgtattctgactccaaggtattgttcagacctcagctcctgggggccggcccctggagtcttccctccctggtagcctctaaccagcattcccagacacctgaggcagatagatggatgggctggtgggcaggggggtggctggggctgggccatcaccattccagagacaaggccagtgtatatgcaaactgggggactctcctcccttctctccccagttctggtcctggccaggccatgctacactaacccctgcccccactctcctcccctcttttccttccttcctacccccttctccctctcccttcccctgactgttcatgttgtaataaaagaagattgttggtgtgtaattaatttgttcaaaagaaaaaaaaaagcaaaacaagaaacttggttccaactgaagcctattttaattttattttattattttcctcttgttagaaataaaacccttagaaacattttttgga

SEQ ID NO: 432785 - DNA, 4084 bp, Homo sapiens
tggctcacgcctgtaatcccagcactttgggaggccgaggcgggtggatcatgaggtcaggagattgagaccatcctggctaacacagtgaaaccccgtctctaacaaaaatacaaaaaattagccgggcatggtggcggatgcctgtagtcccagctactcgggaggctgaggctcgtgaggccctggcctcactgccctccagtccagggctactgcagtccctgttggagagggggcggcagctgggggtggaggtgcctgaggcccagcagctccagcggcaggtggaacaggcgcgatggctggatgaggtgaaacgcacactggccccctcagcccgaaggggcaccttggctgtcatgcgaggactgttggtcgcgggtgccagtgtagcccctagccctgctgtggataaagcccaggccgagctgcaggaactgctgaccattgctgaacgctgggaggagaaagcccacctctgcctggaggccaggcagaagcatccaccagccacacttgaggccataatccgtgaagcggaaaacatccctgttcacctgcccaacatccaggctctcaaggaggctcttgctaaggcccgggcctggattgctgatgttgatgagatccaaaatggtgaccactacccctgcctggatgacttggagggcctagtagctgtgggccgggacctacctgtggggctggaggagctgagacagctagagctacaggtactgacagcgcactcctggagggagaaggcctccaagaccttcctcaagaaaaattcttgctacacgctgctggaggttctctgcccatgtgcagatgccggctcagacagcaccaagcgcagccggtggatggagaaggagctggggttgtacaaatctgacacagagctgctggggctgtctgcgcaggacctcagggacccaggctctgtgatcgtggccttcaaggagggggaacagaaggagaaggagggtatcctgcagctgcgtcgcaccaattcggccaagcccagtccactggcatcatcgagcacggcctcctctacaacctctatctgtgtgtgtgggcaggtgctggctggggcgggagctctgcagtgtgacctgtgtcaggactggttccatgggcggtgtgtgtcagtgcctcgcctcctcagctctccgaggcccaatcccacctcatccccactgctggcctggtgggaatgggacaccaaattcctgtgtccactgtgtatgcgctcaaggcgcccgcgcctggagaccatcctggcactgctggtagccctgcagagactgcctgtgcggctgcccgagggcgaggccctgcagtgcctcacagagagggccatcagctggcaaggccgcgccaggcaggctctggcctctgaagatgtgactgctcttttgggacggctggctgagctccgccaacggctacaggctgaacctagacctgaggagcctcctaactaccctgcagcccctgcttctgaccccctcagagagggcagtggcaaggatatgcctaaggtccagggcttactggagaatggagacagtgtgaccagtcctgagaaggtagccccggaggagggctcaggtaagagagatctggagctgctgtcctcgctgttgccacagttgactggccctgtgttggaactgcctgaggcaacccgggcccccttggaggagctcatgatggagggggacctgctcgaggtgaccctggatgagaaccacagcatatggcagctgctgcaggctggacagcccccagacctggagaggatccgcacacttctggagctggagaaggcagagcgtcacgggagtcgggctcggggccgggccctggagaggcggcggcggcggaaggtggatcggggtggggagggcgatgacccagcccgagaggagctagagccaaagagggtacggagctcagggccagaggctgaggaggtccaggaggaggaagagctggaggaggagactgggggtgagggcccccctgcacccatccccaccactggcagccccagcacccaggagaaccagaatggcttggaaccggcggaagggaccacttcaggcccctcggcccctttctccactctgactccccggctgcatctgccctgcccacagcagccgcctcagcaacagttgtgacagtggctgagcctagcacagaccctgacagagacccccctcggcctcaaggatcctctttctgaccatcaagcctgcttcttggggggtgggcgggtagggggggtggccatccctgctacccgcccacccctgagtcccttgacttttgtattctgactccaaggtattgttcagacctcagctcctgggggccggcccctggagtcttccctccctggtagcctctaaccagcattcccagacacctgaggcagatagatggatgggctggtgggcaggggggtggctggggctgggccatcaccattccagagacaaggccagtgtatatgcaaactgggggactctcctcccttctctccccagttctggtcctggccaggccatgctacactaacccctgcccccactctcctcccctcttttccttccttcctacccccttctccctctcccttcccctgactgttccacccaggaggaggaaacttcacatagccgtgctcacagttttttattttaaaggaatttggctggggagctgaacagggctccctgtgatctgaagaaagcttttggtgcttgtcctcacaaccacctcagtcctccctccctgtcctcccctgtctcctttcctcctcctgggttcatgttgtaataaaagaagattgttggtgtgtaattaatttgttcaaaagaaaaaaaaaagcaaaacaagaaacttggttccaactgaagcctattttaattttattttattattttcctcttgttagaaataaaacccttagaaacattttttggaaacatgtttctgaagtgcatttctcttagacggggaagacagtgcttccatcaccagtcagtggagcagctgtagtgctggcaggagcactagggctgaagccagggagctctgggttctgaaatcaagttccaccagcttcttaaccttgggcaagacattctgatcctcccccgactctaaccccaagccactttccctcaagtccaaacagatgggctcgggccccctcacccaaactcctacactacaacctcccccagttgatgccctccagtttatcctcctcaagctcccaaagggatttttttgttaatggctttattgagatataatttacatactataaaattcacttgtttgaaatgtacaattcagtgatttggggggtttctaaagtgtagatctgattatatactgcttaaaaccttccatgatgctttattgcccttaagattatacatagaatctcgttcttcctagaatgttttcctgtctaacccatatactgcataattccctgatttttctccacaggttatgcccctgatgaatggggactaaagctcagatgtgtggtcatttgcaacccctgagttcacttttttaagacagcttattgatatatataatgtacataccatacagtcacccacttaaaagtatacaattaaatagcttttagtatattcagagttgtgcagccatcattcgaaaaaaaatttcagaacattttcatcactgcagaaagaaactccatatcccttaggcgtcctttacccctcatcccatttgcctattctggacattttacataaatggaatcgtataatatgtgatcctttgtgtctagcttctttcacttagcaaagtggtttcaagcccattaatggtcccatagtagttggaaagatctctcttctgagtcccaaagtctttaagatgagggtgctggactaaatcagggaccatcaacagattgtttacatgtttttgtgggtgtttgcatgcatgtgtttttctgacaagaagactaaccagcttgtatcagattcataaagggatccttgaccctcca

SEQ ID NO: 432786 - DNA, 5330 bp, Homo sapiens
cttgttcctccgccgttgcaatgaactattttctctcagtccggggtggtacttttgagtaaccccttccaaatagaaacccataccagcctatttagctcggtctccactatatgaaggtttcctagggcttggtgtgacgcaacgtatacgaggctcggaaggacaccccgcggaaggatccggtttgttgtggtgtggggaggggagacgctgacaaaccaagatggcggcggcggcgctgaaggccgcggcgtttgggaggtaactgtggtggcgaaggctgcggtagtggggaggcaaccacacagtttggaagaaacggagcgggacgaagaggcggtagcagtagagtcagcctgagactctcagagcacgacggccacacgcccccttaggccctcggcgggcggcggctgccccgcttagggcctagcctccgagcattgcctcggcttcaaacagcggcggcgccatgagtccttaagggcggtccaagcctcccgatccctggcccagacctcgggcccaccatggagccggggtccgacgatttcctaccgccaccggagtgcccggtgttcgagcctagctgggccgagttccgagaccctcttggctacatcgcgaaaatcaggcccatcgcagagaaatcgggcatttgcaagatccgcccacccgcggactggcagccaccctttgctgtggaagtggacaacttcaggtttaccccccgaatccagaggctgaatgagctagaggcccagacgagagtgaaactgaactacttggaccagattgccaaattctgggaaatccagggctcctccttaaagattcccaatgtagaacggcggatcttggacctctacagtctcagcaaaattgtggtggaggaaggtggttatgaagctatctgcaaggaccgtcggtgggctcgggtagcccagcgcctcaactatccaccaggcaaaaatattggctccttgctacgctcccactacgaacgcattgtttatccctatgaaatgtaccagtctggagccaaccttgtgcagtgtaacacacgtccatttgataatgaggagaaggacaaggaatacaaaccccacagcatccccctacgacagtctgtgcagccttccaagttcaacagctatggccggcgggccaagagactgcagcctgatccggaacccacagaggaagacattgagaagaatccagagctgaaaaagctacagatctatggggcaggccccaagatgatgggcctgggcctcatggccaaagacaagactctgcggaagaaagataaggaggggcctgagtgtccccccacagtagtggtgaaggaggagttaggtggggatgtgaaggtggagtcaacatcgcctaagaccttcctggagagcaaggaggagctgagtcacagcccagaaccctgcaccaagatgaccatgaggctacggaggaaccacagcaatgcccagtttattgagtcatatgtctgccggatgtgttctcgaggggatgaggatgacaagctcctgctgtgtgatggctgtgatgacaactaccacatcttctgcctgctgcctcctctgcctgagatccccaagggtgtctggcggtgcccaaagtgtgtcatggcggagtgtaagcggcccccagaagcctttggctttgagcaggctacccgggaatacactctgcagagctttggcgagatggccgactcctttaaagctgactacttcaacatgcccgtgcatatggtgcccacagaacttgtggagaaggagttctggaggctggtaaatagcattgaggaagatgtgactgttgagtatggagctgacatccattccaaagaatttggcagcggtttccctgtcagtgacagtaaacggcacctaacccccgaagaggaggagtatgctaccagtggttggaacctaaatgtgatgccggtgttggaacagtctgtactgtgccacatcaatgcagatatctctggcatgaaggtgccctggctctacgtgggcatggtcttctcagccttttgctggcatattgaggatcactggagttactccattaactacctccactggggtgagccgaagacctggtatggggtgccctcacttgcagcagaacatttggaagaagtgatgaagaagctgacacctgaactatttgatagccagcctgacctcctgcaccaacttgtcaccctcatgaatcccaacaccctcatgtcccatggtgtgccagttgtccgcacaaaccagtgtgcaggagagtttgtcatcaccttcccccgtgcttaccacagcggcttcaaccaaggctacaactttgccgaggctgtcaacttttgcactgctgactggttgcctgctgggcgccagtgcattgagcactaccgccggctccggagatactgcgtcttctcccatgaggagcttatctgcaagatggctgcctgcccagagaagctagacctgaacctggcggcagctgtgcataaggagatgttcatcatggtgcaagaagagcggcgtctacgaaaggccctgctggagaagggtatcacagaggctgagcgagaggctttcgagctgctcccagatgatgagcgccagtgtatcaagtgcaagactacgtgtttcctgtcagccctggcctgctacgactgcccagacggccttgtctgcctttcccacatcaatgatctctgcaagtgctccagtagccggcagtacctgcggtatcggtataccttggatgagcttcctgccatgctgcataagctgaaggttcgggctgagtcctttgacacctgggccaacaaagtgcgagtggccctggaggtggaggatgggcggaagcgcagccttgaagaactgagggcactagagtctgaagcccgtgagcggaggtttcctaatagtgagctgctgcagcaactaaagaactgcctgagtgaggcagaggcttgcgtgtcccgagctctgggactggtcagcggccaggaagctggcccccacagggtggctggtctacagatgaccctgactgagctccgggcctttctggaccagatgaacaacctgccttgcgccatgcaccagattggggatgtcaagggtgttctggaacaggtggaggcctaccaggctgaggctcgtgaggccctggcctcactgccctccagtccagggctactgcagtccctgttggagagggggcggcagctgggggtggaggtgcctgaggcccagcagctccagcggcaggtggaacaggcgcgatggctggatgaggtgaaacgcacactggccccctcagcccgaaggggcaccttggctgtcatgcgaggactgttggtcgcgggtgccagtgtagcccctagccctgctgtggataaagcccaggccgagctgcaggaactgctgaccattgctgaacgctgggaggagaaagcccacctctgcctggaggccaggcagaagcatccaccagccacacttgaggccataatccgtgaagcggaaaacatccccacccctgagtcccttgacttttgtattctgactccaaggtattgttcagacctcagctcctgggggccggcccctggagtcttccctccctggtagcctctaaccagcattcccagacacctgaggcagatagatggatgggctggtgggcaggggggtggctggggctgggccatcaccattccagagacaaggccagtgtatatgcaaactgggggactctcctcccttctctccccagttctggtcctggccaggccatgctacactaacccctgcccccactctcctcccctcttttccttccttcctacccccttctccctctcccttcccctgactgttccacccaggaggaggaaacttcacatagccgtgctcacagttttttattttaaaggaatttggctggggagctgaacagggctccctgtgatctgaagaaagcttttggtgcttgtcctcacaaccacctcagtcctccctccctgtcctcccctgtctcctttcctcctcctgggttcatgttgtaataaaagaagattgttggtgtgtaattaatttgttcaaaagaaaaaaaaaagcaaaacaagaaacttggttccaactgaagcctattttaattttattttattattttcctcttgttagaaataaaacccttagaaacattttttggaaacatgtttctgaagtgcatttctcttagacggggaagacagtgcttccatcaccagtcagtggagcagctgtagtgctggcaggagcactagggctgaagccagggagctctgggttctgaaatcaagttccaccagcttcttaaccttgggcaagacattctgatcctcccccgactctaaccccaagccactttccctcaagtccaaacagatgggctcgggccccctcacccaaactcctacactacaacctcccccagttgatgccctccagtttatcctcctcaagctcccaaagggatttttttgttaatggctttattgagatataatttacatactataaaattcacttgtttgaaatgtacaattcagtgatttggggggtttctaaagtgtagatctgattatatactgcttaaaaccttccatgatgctttattgcccttaagattatacatagaatctcgttcttcctagaatgttttcctgtctaacccatatactgcataattccctgatttttctccacaggttatgcccctgatgaatggggactaaagctcagatgtgtggtcatttgcaacccctgagttcacttttttaagacagcttattgatatatataatgtacataccatacagtcacccacttaaaagtatacaattaaatagcttttagtatattcagagttgtgcagccatcattcgaaaaaaaatttcagaacattttcatcactgcagaaagaaactccatatcccttaggcgtcctttacccctcatcccatttgcctattctggacattttacataaatggaatcgtataatatgtgatcctttgtgtctagcttctttcacttagcaaagtggtttcaagcccattaatggtcccatagtagttggaaagatctctcttctgagtcccaaagtctttaagatgagggtgctggactaaatcagggaccatcaacagattgtttacatgtttttgtgggtgtttgcatgcatgtgtttttctgacaagaagactaaccagcttgtatcagattcataaagggatccttgaccctcca

SEQ ID NO: 432787 - DNA, 5195 bp, Homo sapiens
cttgttcctccgccgttgcaatgaactattttctctcagtccggggtggtacttttgagtaaccccttccaaatagaaacccataccagcctatttagctcggtctccactatatgaaggtttcctagggcttggtgtgacgcaacgtatacgaggctcggaaggacaccccgcggaaggatccggtttgttgtggtgtggggaggggagacgctgacaaaccaagatggcggcggcggcgctgaaggccgcggcgtttgggaggtaactgtggtggcgaaggctgcggtagtggggaggcaaccacacagtttggaagaaacggagcgggacgaagaggcggtagcagtagagtcagcctgagactctcagagcacgacggccacacgcccccttaggccctcggcgggcggcggctgccccgcttagggcctagcctccgagcattgcctcggcttcaaacagcggcggcgccatgagtccttaagggcggtccaagcctcccgatccctggcccagacctcgggcccaccatggagccggggtccgacgatttcctaccgccaccggagtgcccggtgttcgagcctagctgggccgagttccgagaccctcttggctacatcgcgaaaatcaggcccatcgcagagaaatcgggcatttgcaagatccgcccacccgcggactggcagccaccctttgctgtggaagtggacaacttcaggtttaccccccgaatccagaggctgaatgagctagaggcccagacgagagtgaaactgaactacttggaccagattgccaaattctgggaaatccagggctcctccttaaagattcccaatgtagaacggcggatcttggacctctacagtctcagcaaaattgtggtggaggaaggtggttatgaagctatctgcaaggaccgtcggtgggctcgggtagcccagcgcctcaactatccaccaggcaaaaatattggctccttgctacgctcccactacgaacgcattgtttatccctatgaaatgtaccagtctggagccaaccttgtgcagtgtaacacacgtccatttgataatgaggagaaggacaaggaatacaaaccccacagcatccccctacgacagtctgtgcagccttccaagttcaacagctatggccggcgggccaagagactgcagcctgatccggaacccacagaggaagacattgagaagaatccagagctgaaaaagctacagatctatggggcaggccccaagatgatgggcctgggcctcatggccaaagacaagactctgcggaagaaagataaggaggggcctgagtgtccccccacagtagtggtgaaggaggagttaggtggggatgtgaaggtggagtcaacatcgcctaagaccttcctggagagcaaggaggagctgagtcacagcccagaaccctgcaccaagatgaccatgaggctacggaggaaccacagcaatgcccagtttattgagtcatatgtctgccggatgtgttctcgaggggatgaggatgacaagctcctgctgtgtgatggctgtgatgacaactaccacatcttctgcctgctgcctcctctgcctgagatccccaagggtgtctggcggtgcccaaagtgtgtcatggcggagtgtaagcggcccccagaagcctttggctttgagcaggctacccgggaatacactctgcagagctttggcgagatggccgactcctttaaagctgactacttcaacatgcccgtgcatatggtgcccacagaacttgtggagaaggagttctggaggctggtaaatagcattgaggaagatgtgactgttgagtatggagctgacatccattccaaagaatttggcagcggtttccctgtcagtgacagtaaacggcacctaacccccgaagaggaggagtatgctaccagtggttggaacctaaatgtgatgccggtgttggaacagtctgtactgtgccacatcaatgcagatatctctggcatgaaggtgccctggctctacgtgggcatggtcttctcagccttttgctggcatattgaggatcactggagttactccattaactacctccactggggtgagccgaagacctggtatggggtgccctcacttgcagcagaacatttggaagaagtgatgaagaagctgacacctgaactatttgatagccagcctgacctcctgcaccaacttgtcaccctcatgaatcccaacaccctcatgtcccatggtgtgccagttgtccgcacaaaccagtgtgcaggagagtttgtcatcaccttcccccgtgcttaccacagcggcttcaaccaaggctacaactttgccgaggctgtcaacttttgcactgctgactggttgcctgctgggcgccagtgcattgagcactaccgccggctccggagatactgcgtcttctcccatgaggagcttatctgcaagatggctgcctgcccagagaagctagacctgaacctggcggcagctgtgcataaggagatgttcatcatggtgcaagaagagcggcgtctacgaaaggccctgctggagaagggtatcacagaggctgagcgagaggctttcgagctgctcccagatgatgagcgccagtgtatcaagtgcaagactacgtgtttcctgtcagccctggcctgctacgactgcccagacggccttgtctgcctttcccacatcaatgatctctgcaagtgctccagtagccggcagtacctgcggtatcggtataccttggatgagcttcctgccatgctgcataagctgaaggttcgggctgagtcctttgacacctgggccaacaaagtgcgagtggccctggaggtggaggatgggcggaagcgcagccttgaagaactgagggcactagagtctgaagcccgtgagcggaggtttcctaatagtgagctgctgcagcaactaaagaactgcctgagtgaggcagaggcttgcgtgtcccgagctctgggactggtcagcggccaggaagctggcccccacagggtggctggtctacagatgaccctgactgagctccgggcctttctggaccagatgaacaacctgccttgcgccatgcaccagattggggatgtcaagggtgttctggaacaggtggaggcctaccaggctgaggctcgtgaggccctggcctcactgccctccagtccagggctactgcagtccctgttggagagggggcggcagctgggggtggaggtgcctgaggcccagcagctccagcggcaggtggaacaggcgcgatggctggatgaggtgaaacgcacactggccccctcagcccgaaggggcaccttggctgtcatgcgaggactgttggtcgcgggtgccagtgtagcccctagccctgctgtggataaagcccaggccgagctgcaggaactgctgaccattgctgaacgctgggaggagaaagcccacctctgcctggaggccaggcagaagcatccaccagccacacttgaggccataatccgtgaagcggaaaacatccctgttcacctgcccaacatccaggctctcaaggaggctcttgctaaggcccgggcctggattgctgatgttgatgagatccaaaatggtgaccactacccctgcctggatgacttggagggcctagtagctgtgggccgggacctacctgtggggctggaggagctgagacagctagagctacaggtactgacagcgcactcctggagggagaaggcctccaagaccttcctcaagaaaaattcttgctacacgctgctggaggttctctgcccatgtgcagatgccggctcagacagcaccaagcgcagccggtggatggagaaggagctggggttgtacaaatctgacacagagctgctggggctgtctgcgcaggacctcagggacccaggctctgtgatcgtggccttcaaggagggggaacagaaggagaaggagggtatcctgcagctgcgtcgcaccaattcggccaagcccagtccactggcatcatcgagcacggcctcctctacaacctctatctgtgtgtgtgggcaggtgctggctggggcgggagctctgcagtgtgacctgtgtcaggactggttccatgggcggtgtgtgtcagtgcctcgcctcctcagctctccgaggcccaatcccacctcatccccactgctggcctggtgggaatgggacaccaaattcctgtgtccactgtgtatgcgctcaaggcgcccgcgcctggagaccatcctggcactgctggtagccctgcagagactgcctgtgcggctgcccgagggcgaggccctgcagtgcctcacagagagggccatcagctggcaaggccgcgccaggcaggctctggcctctgaagatgtgactgctcttttgggacggctggctgagctccgccaacggctacaggctgaacctagacctgaggagcctcctaactaccctgcagcccctgcttctgaccccctcagagagggcagtggcaaggatatgcctaaggtccagggcttactggagaatggagacagtgtgaccagtcctgagaaggtagccccggaggagggctcaggtaagagagatctggagctgctgtcctcgctgttgccacagttgactggccctgtgttggaactgcctgaggcaacccgggcccccttggaggagctcatgatggagggggacctgctcgaggtgaccctggatgagaaccacagcatatggcagctgctgcaggctggacagcccccagacctggagaggatccgcacacttctggaggaaaccaaccatcaggcctcccagagagaatcgaggaactgaaatctcccatatcaccacatccagacaatgagacatggctgctgcctgttgacaaactcctcttctttatacctcccgaatttctgttttcctgcatatggttacggtgagacaccagacccctcatccaaccacctgctgcccgttgaccaactcctcttccttactcctccctaattcttgttttacgttccttccctactatataaacccctaactttagtcaattggagagatggatttgagactggtctcccatctcctggctgacattactggcattaaagctgttcttccctggca

SEQ ID NO: 432788 - DNA, 2443 bp, Homo sapiens
cttgttcctccgccgttgcaatgaactattttctctcagtccggggtggtacttttgagtaaccccttccaaatagaaacccataccagcctatttagctcggtctccactatatgaaggtttcctagggcttggtgtgacgcaacgtatacgaggctcggaaggacaccccgcggaaggatccggtttgttgtggtgtggggaggggagacgctgacaaaccaagatggcggcggcggcgctgaaggccgcggcgtttgggaggtaactgtggtggcgaaggctgcggtagtggggaggcaaccacacagtttggaagaaacggagcgggacgaagaggcggtagcagtagagtcagcctgagactctcagagcacgacggccacacgcccccttaggccctcggcgggcggcggctgccccgcttagggcctagcctccgagcattgcctcggcttcaaacagcggcggcgccatgagtccttaagggcggtccaagcctcccgatccctggcccagacctcgggcccaccatggagccggggtccgacgatttcctaccgccaccggagtgcccggtgttcgagcctagctgggccgagttccgagaccctcttggctacatcgcgaaaatcaggcccatcgcagagaaatcgggcatttgcaagatccgcccacccgcgccacccctgagtcccttgacttttgtattctgactccaaggtattgttcagacctcagctcctgggggccggcccctggagtcttccctccctggtagcctctaaccagcattcccagacacctgaggcagatagatggatgggctggtgggcaggggggtggctggggctgggccatcaccattccagagacaaggccagtgtatatgcaaactgggggactctcctcccttctctccccagttctggtcctggccaggccatgctacactaacccctgcccccactctcctcccctcttttccttccttcctacccccttctccctctcccttcccctgactgttccacccaggaggaggaaacttcacatagccgtgctcacagttttttattttaaaggaatttggctggggagctgaacagggctccctgtgatctgaagaaagcttttggtgcttgtcctcacaaccacctcagtcctccctccctgtcctcccctgtctcctttcctcctcctgggttcatgttgtaataaaagaagattgttggtgtgtaattaatttgttcaaaagaaaaaaaaaagcaaaacaagaaacttggttccaactgaagcctattttaattttattttattattttcctcttgttagaaataaaacccttagaaacattttttggaaacatgtttctgaagtgcatttctcttagacggggaagacagtgcttccatcaccagtcagtggagcagctgtagtgctggcaggagcactagggctgaagccagggagctctgggttctgaaatcaagttccaccagcttcttaaccttgggcaagacattctgatcctcccccgactctaaccccaagccactttccctcaagtccaaacagatgggctcgggccccctcacccaaactcctacactacaacctcccccagttgatgccctccagtttatcctcctcaagctcccaaagggatttttttgttaatggctttattgagatataatttacatactataaaattcacttgtttgaaatgtacaattcagtgatttggggggtttctaaagtgtagatctgattatatactgcttaaaaccttccatgatgctttattgcccttaagattatacatagaatctcgttcttcctagaatgttttcctgtctaacccatatactgcataattccctgatttttctccacaggttatgcccctgatgaatggggactaaagctcagatgtgtggtcatttgcaacccctgagttcacttttttaagacagcttattgatatatataatgtacataccatacagtcacccacttaaaagtatacaattaaatagcttttagtatattcagagttgtgcagccatcattcgaaaaaaaatttcagaacattttcatcactgcagaaagaaactccatatcccttaggcgtcctttacccctcatcccatttgcctattctggacattttacataaatggaatcgtataatatgtgatcctttgtgtctagcttctttcacttagcaaagtggtttcaagcccattaatggtcccatagtagttggaaagatctctcttctgagtcccaaagtctttaagatgagggtgctggactaaatcagggaccatcaacagattgtttacatgtttttgtgggtgtttgcatgcatgtgtttttctgacaagaagactaaccagcttgtatcagattcataaagggatccttgaccctcca

SEQ ID NO: 432789 - DNA, 3269 bp, Homo sapiens
cttgttcctccgccgttgcaatgaactattttctctcagtccggggtggtacttttgagtaaccccttccaaatagaaacccataccagcctatttagctcggtctccactatatgaaggtttcctagggcttggtgtgacgcaacgtatacgaggctcggaaggacaccccgcggaaggatccggtttgttgtggtgtggggaggggagacgctgacaaaccaagatggcggcggcggcgctgaaggccgcggcgtttgggaggtaactgtggtggcgaaggctgcggtagtggggaggcaaccacacagtttggaagaaacggagcgggacgaagaggcggtagcagtagagtcagcctgagactctcagagcacgacggccacacgcccccttaggccctcggcgggcggcggctgccccgcttagggcctagcctccgagcattgcctcggcttcaaacagcggcggcgccatgagtccttaagggcggtccaagcctcccgatccctggcccagacctcgggcccaccatggagccggggtccgacgatttcctaccgccaccggagtgcccggtgttcgagcctagctgggccgagttccgagaccctcttggctacatcgcgaaaatcaggcccatcgcagagaaatcgggcatttgcaagatccgcccacccgcggactggcagccaccctttgctgtggaagtggacaacttcaggtttaccccccgaatccagaggctgaatgagctagaggcccagacgagagtgaaactgaactacttggaccagattgccaaattctgggaaatccagggctcctccttaaagattcccaatgtagaacggcggatcttggacctctacagtctcagcaaaattgtggtggaggaaggtggttatgaagctatctgcaaggaccgtcggtgggctcgggtagcccagcgcctcaactatccaccaggcaaaaatattggctccttgctacgctcccactacgaacgcattgtttatccctatgaaatgtaccagtctggagccaaccttgtgcagtgtaacacacgtccatttgataatgaggagaaggacaaggaatacaaaccccacagcatccccctacgacagtctgtgcagccttccaagttcaacagctatggccggcgggccaagagactgcagcctgatccggaacccacagaggaagacattgagaagaatccagagctgaaaaagctacagatctatggggcaggccccaagatgatgggcctgggcctcatggccaaagacaagactctgcggaagaaagataaggaggggcctgagtgtccccccacagtagtggtgaaggaggagttaggtggggatgtgaaggtggagtcaacatcgcctaagaccttcctggagagcaaggaggagctgagtcacagcccagaaccctgcaccaagatgaccatgaggctacggaggaaccacagcaatgcccagtttattgagtcatatgtctgccggatgtgttctcgaggggatgaggatgacaagctcctgctgtgtgatggctgtgatgacaactaccacatcttctgcctgctgcctcctctgcctgagatccccaagggtgtctggcggtgcccaaagtgtgtcatggcggagtgtaagcggcccccagaagcctttggctttgagcaggctacccgggaatacactctgcagagctttggcgagatggccgactcctttaaagctgactacttcaacatgcccgtgcatatggtgcccacagaacttgtggagaaggagttctggaggctggtaaatagcattgaggaagatgtgactgttgagtatggagctgacatccattccaaagaatttggcagcggtttccctgtcagtgacagtaaacggcacctaacccccgaagaggaggagtatgctaccagtggttggaacctaaatgtgatgccggtgttggaacagtctgtactgtgccacatcaatgcagatatctctggcatgaaggtgccctggctctacgtgggcatggtcttctcagccttttgctggcatattgaggatcactggagttactccattaactacctccactggggtgagccgaagacctggtatggggtgccctcacttgcagcagaacatttggaagaagtgatgaagaagctgacacctgaactatttgatagccagcctgacctcctgcaccaacttgtcaccctcatgaatcccaacaccctcatgtcccatggtgtgccagttgtccgcacaaaccagtgtgcaggagagtttgtcatcaccttcccccgtgcttaccacagcggcttcaaccaaggctacaactttgccgaggctgtcaacttttgcactgctgactggttgcctgctgggcgccagtgcattgagcactaccgccggctccggagatactgcgtcttctcccatgaggagcttatctgcaagatggctgcctgcccagagaagctagacctgaacctggcggcagctgtgcataaggagatgttcatcatggtgcaagaagagcggcgtctacgaaaggccctgctggagaagggtatcacagaggctgagcgagaggctttcgagctgctcccagatgatgagcgccagtgtatcaagtgcaagactacgtgtttcctgtcagccctggcctgctacgactgcccagacggccttgtctgcctttcccacatcaatgatctctgcaagtgctccagtagccggcagtacctgcggtatcggtataccttggatgagcttcctgccatgctgcataagctgaaggttcgggctgagtcctttgacacctgggccaacaaagtgcgagtggccctggaggtggaggatgggcggaagcgcagccttgaagaactgagggcactagagtctgaagcccgtgagcggaggtttcctaatagtgagctgctgcagcaactaaagaactgcctgagtgaggcagaggcttgcgtgtcccgagctctgggactggtcagcggccaggaagctggcccccacagggtggctggtctacagatgaccctgactgagctccgggcctttctggaccagatgaacaacctgccttgcgccatgcaccagattggggatgtcaaggtgaggacgcttggagtgctgatgagggatcaaggggaccaggggacctgagcagcaggccatgcttggctcctttcaaaagcttaaagtgttcaggcaagacaggacacacgt

SEQ ID NO: 432790 - DNA, 2877 bp, Homo sapiens
cttgttcctccgccgttgcaatgaactattttctctcagtccggggtggtacttttgagtaaccccttccaaatagaaacccataccagcctatttagctcggtctccactatatgaaggtttcctagggcttggtgtgacgcaacgtatacgaggctcggaaggacaccccgcggaaggatccggtttgttgtggtgtggggaggggagacgctgacaaaccaagatggcggcggcggcgctgaaggccgcggcgtttgggaggtaactgtggtggcgaaggctgcggtagtggggaggcaaccacacagtttggaagaaacggagcgggacgaagaggcggtagcagtagagtcagcctgagactctcagagcacgacggccacacgcccccttaggccctcggcgggcggcggctgccccgcttagggcctagcctccgagcattgcctcggcttcaaacagcggcggcgccatgagtccttaagggcggtccaagcctcccgatccctggcccagacctcgggcccaccatggagccggggtccgacgatttcctaccgccaccggagtgcccggtgttcgagcctagctgggccgagttccgagaccctcttggctacatcgcgaaaatcaggcccatcgcagagaaatcgggcatttgcaagatccgcccacccgcggactggcagccaccctttgctgtggaagtggacaacttcaggtttaccccccgaatccagaggctgaatgagctagaggcccagacgagagtgaaactgaactacttggaccagattgccaaattctgggaaatccagggctcctccttaaagattcccaatgtagaacggcggatcttggacctctacagtctcagcaaaattgtggtggaggaaggtggttatgaagctatctgcaaggaccgtcggtgggctcgggtagcccagcgcctcaactatccaccaggcaaaaatattggctccttgctacgctcccactacgaacgcattgtttatccctatgaaatgtaccagtctggagccaaccttgtgcagtgtaacacacgtccatttgataatgaggagaaggacaaggaatacaaaccccacagcatccccctacgacagtctgtgcagccttccaagttcaacagctatggccggcgggccaagagactgcagcctgatccggaacccacagaggaagacattgagaagaatccagagctgaaaaagctacagatctatggggcaggccccaagatgatgggcctgggcctcatggccaaagacaagactctgcggaagaaagataaggaggggcctgagtgtccccccacagtagtggtgaaggaggagttaggtggggatgtgaaggtggagtcaacatcgcctaagaccttcctggagagcaaggaggagctgagtcacagcccagaaccctgcaccaagatgaccatgaggctacggaggaaccacagcaatgcccagtttattgagtcatatgtctgccggatgtgttctcgaggggatgaggatgacaagctcctgctgtgtgatggctgtgatgacaactaccacatcttctgcctgctgcctcctctgcctgagatccccaagggtgtctggcggtgcccaaagtgtgtcatggcggagtgtaagcggcccccagaagcctttggctttgagcaggctacccgggaatacactctgcagagctttggcgagatggccgactcctttaaagctgactacttcaacatgcccgtgcatatggtgcccacagaacttgtggagaaggagttctggaggctggtaaatagcattgaggaagatgtgactgttgagtatggagctgacatccattccaaagaatttggcagcggtttccctgtcagtgacagtaaacggcacctaacccccgaagaggaggagtatgctaccagtggttggaacctaaatgtgatgccggtgttggaacagtctgtactgtgccacatcaatgcagatatctctggcatgaaggtgccctggctctacgtgggcatggtcttctcagccttttgctggcatattgaggatcactggagttactccattaactacctccactggggtgagccgaagacctggtatggggtgccctcacttgcagcagaacatttggaagaagtgatgaagaagctgacacctgaactatttgatagccagcctgacctcctgcaccaacttgtcaccctcatgaatcccaacaccctcatgtcccatggtgtgccagttgtccgcacaaaccagtgtgcaggagagtttgtcatcaccttcccccgtgcttaccacagcggcttcaaccaaggctacaactttgccgaggctgtcaacttttgcactgctgactggttgcctgctgggcgccagtgcattgagcactaccgccggctccggagatactgcgtcttctcccatgaggagcttatctgcaagatggctgcctgcccagagaagctagacctgaacctggcggcagctgtgcataaggagatgttcatcatggtgcaagaagagcggcgtctacgaaaggccctgctggagaagggtatcacagaggctgagcgagaggctttcgagctgctcccagatgatgagcgccagtgtatcaagtgcaagactacgtgtttcctgtcagccctggcctgctacgactgcccagacggccttgtctgcctttcccacatcaaacaggccgggctccttgctgctctccatgtcggcctgggcagcagccagccgcttctccaggctctcctcgccttcagtgttcgctgcgcagcgctgctacagctcgtgcagtgaaggcggctgcacgaaatatgtatag

SEQ ID NO: 432791 - DNA, 2173 bp, Homo sapiens
cttgttcctccgccgttgcaatgaactattttctctcagtccggggtggtacttttgagtaaccccttccaaatagaaacccataccagcctatttagctcggtctccactatatgaaggtttcctagggcttggtgtgacgcaacgtatacgaggctcggaaggacaccccgcggaaggatccggtttgttgtggtgtggggaggggagacgctgacaaaccaagatggcggcggcggcgctgaaggccgcggcgtttgggaggtaactgtggtggcgaaggctgcggtagtggggaggcaaccacacagtttggaagaaacggagcgggacgaagaggcggtagcagtagagtcagcctgagactctcagagcacgacggccacacgcccccttaggccctcggcgggcggcggctgccccgcttagggcctagcctccgagcattgcctcggcttcaaacagcggcggcgccatgagtccttaagggcggtccaagcctcccgatccctggcccagacctcgggcccaccatggagccggggtccgacgatttcctaccgccaccggagtgcccggtgttcgagcctagctgggccgagttccgagaccctcttggctacatcgcgaaaatcaggcccatcgcagagaaatcgggcatttgcaagatccgcccacccgcggactggcagccaccctttgctgtggaagtggacaacttcaggtttaccccccgaatccagaggctgaatgagctagaggcccagacgagagtgaaactgaactacttggaccagattgccaaattctgggaaatccagggctcctccttaaagattcccaatgtagaacggcggatcttggacctctacagtctcagcaaaattgtggtggaggaaggtggttatgaagctatctgcaaggaccgtcggtgggctcgggtagcccagcgcctcaactatccaccaggcaaaaatattggctccttgctacgctcccactacgaacgcattgtttatccctatgaaatgtaccagtctggagccaaccttgtgcagtgtaacacacgtccatttgataatgaggagaaggacaaggaatacaaaccccacagcatccccctacgacagtctgtgcagccttccaagttcaacagctatggccggcgggccaagagactgcagcctgatccggaacccacagaggaagacattgagaagaatccagagctgaaaaagctacagatctatggggcaggccccaagatgatgggcctgggcctcatggccaaagacaagactctgcggaagaaagataaggaggggcctgagtgtccccccacagtagtggtgaaggaggagttaggtggggatgtgaaggtggagtcaacatcgcctaagaccttcctggagagcaaggaggagctgagtcacagcccagaaccctgcaccaagatgaccatgaggctacggaggaaccacagcaatgcccagtttattgagtcatatgtctgccggatgtgttctcgaggggatgaggatgacaagctcctgctgtgtgatggctgtgatgacaactaccacatcttctgcctgctgcctcctctgcctgagatccccaagggtgtctggcggtgcccaaagtgtgtcatggcggagtgtaagcggcccccagaagcctttggctttgagcaggctacccgggaatacactctgcagagctttggcgagatggccgactcctttaaagctgactacttcaacatgcccgtgcatatggtgcccacagaacttgtggagaaggagttctggaggctggtaaatagcattgaggaagatgtgactgttgagtatggagctgacatccattccaaagaatttggcagcggtttccctgtcagtgacagtaaacggcacctaacccccgaagaggaggagtatgctaccagtggttggaacctaaatgtgatgccggtgttggaacagtctgtactgtgccacatcaatgcagatatctctggcatgaaggtgccctggctctacgtgggcatggtcttctcagccttttgctggcatattgaggatcactggagttactccattaactacctccactggggtgagccgaagacctgttctggggcacacataagatcctgagagtcacctaaact

SEQ ID NO: 432792 - DNA, 1577 bp, Homo sapiens
cttgttcctccgccgttgcaatgaactattttctctcagtccggggtggtacttttgagtaaccccttccaaatagaaacccataccagcctatttagctcggtctccactatatgaaggtttcctagggcttggtgtgacgcaacgtatacgaggctcggaaggacaccccgcggaaggatccggtttgttgtggtgtggggaggggagacgctgacaaaccaagatggcggcggcggcgctgaaggccgcggcgtttgggaggtaactgtggtggcgaaggctgcggtagtggggaggcaaccacacagtttggaagaaacggagcgggacgaagaggcggtagcagtagagtcagcctgagactctcagagcacgacggccacacgcccccttaggccctcggcgggcggcggctgccccgcttagggcctagcctccgagcattgcctcggcttcaaacagcggcggcgccatgagtccttaagggcggtccaagcctcccgatccctggcccagacctcgggcccaccatggagccggggtccgacgatttcctaccgccaccggagtgcccggtgttcgagcctagctgggccgagttccgagaccctcttggctacatcgcgaaaatcaggcccatcgcagagaaatcgggcatttgcaagatccgcccacccgcggactggcagccaccctttgctgtggaagtggacaacttcaggtttaccccccgaatccagaggctgaatgagctagaggcccagacgagagtgaaactgaactacttggaccagattgccaaattctgggaaatccagggctcctccttaaagattcccaatgtagaacggcggatcttggacctctacagtctcagcaaaattgtggtggaggaaggtggttatgaagctatctgcaaggaccgtcggtgggctcgggtagcccagcgcctcaactatccaccaggcaaaaatattggctccttgctacgctcccactacgaacgcattgtttatccctatgaaatgtaccagtctggagccaaccttgtgcagtgtaacacacgtccatttgataatgaggagaaggacaaggaatacaaaccccacagcatccccctacgacagtctgtgcagccttccaagttcaacagctatggccggcgggccaagagactgcagcctgatccggaacccacagaggaagacattgagaagaatccagagctgaaaaagctacagatctatggggcaggccccaagatgatgggcctgggcctcatggccaaagacaagactctgcggaagaaagataaggaggggcctgagtgtccccccacagtagtggtgaaggaggagttaggtggggatgtgaaggtggagtcaacatcgcctaagaccttcctggagagcaaggaggagctgagtcacagcccagaaccctgcaccaagatgaccatgaggctacggaggaaccacagcaatgcccagtttgtaaggacccagccctgacttcttaatgctctgcttcttgtcccttcaataagcattcccctgcatggcactggaccagtt

SEQ ID NO: 432793 - DNA, 493 bp, Homo sapiens
tgggggtgttaagggggggcccagagaagggaaggggtaggctgctgacccactttgctcctgtcctgggtatggcagatcgtggccttcaaggagggggaacagaaggagaaggagggtatcctgcagctgcgtcgcaccaattcggccaagcccagtccactggcatcatcgagcacggcctcctctacaacctctatctgtgtgtgtgggcaggtgctggctggggcgggagctctgcagtgtgacctgtgtcaggactggttccatgggcggtgtgtgtcagtgcctcgcctcctcagctctccgaggcccaatcccacctcatccccactgctggcctggtgggaatgggacaccaaattcctgtgtccactgtgtatgcgctcaaggcgcccgcgcctggagaccatcctggcactgctggtagccctgcagagactgcctgtgcggctgcccgagggcgaggccctgcagtgcctcacagagaggg

SEQ ID NO: 432794 - DNA, 304 bp, Homo sapiens
ccaacatccaggctctcaaggaggctcttgctaaggcccgggcctggattgctgatgttgatgagatccaagtgaggaccctgccactcccaccccaggccttcagtccagctgggaagagatggcatatacactgggatgtgctgggttgctgggatgggttgggttggctggagagaggaagggggcatggcatgtagtcaggaggcaagatgtgcctgatgagcagggtgagaggaagagtgtgaggctggcctgaaggaagagagggcactggttaggatgagattggtgggccagggaa

SEQ ID NO: 432795 - DNA, 225 bp, Homo sapiens
gtgggggtgggtggttgggtaggatgtttgcaggttaaagggtctggagtggctagaggtttgggaaggtgccagtgggattccgagctgcttttggtgacttccggtcttacactatgctgagataactcaagtccctttcccctctctaccctctcaggactggcagccaccctttgctgtggaagtggacaacttcaggtttaccccccgaatccagaggct

SEQ ID NO: 432796 - DNA, 823 bp, Homo sapiens
atttgtcttcttagtgcttggatggtgtgagtgaaaacccagaggaatacatttggtggctgagctagtacaatgccatcaccggattccatgaccttcgaggatatcattgtagacttcactcaagaagagtgggccctgctggacacatcccagagaaagctgtttcaagatgtgatgttggagaacatcagtcatctggtctctattggcaaacagctctgcaaatcagttgtgctttcccaattggagcaagtagagaaactttcaacacaaagaataagcttactgcaaggtagagaagttggcattaaacatcaagagataccattcattcaacatatctatcagaagggcacgtccaccatcagcacaatgagatctcatactcaagaggatccttttctatgcaatgacttaggagaagatttcactcaacatatagcattgactcaaaatgtgattacctacatgagaacgaaacactttgtaagcaaaaagtttgggaaaatcttcagtgactggttatcctttaatcaacacaaggaaattcacaccaaatgtaaatcatatggaagtcatctatttgattatgcctttatccaaaactctgcccttagaccacacagtgtgactcacactagagagataacattggaatgtcgtgtgtgtgggaaaacctttagcaaaaattctaatcttaggcgacatgagatgattcacactggagagaaaccacacggatgtcatctatgtgggaaagcctttactcattgctctgatcttcgaaaacatgagagaactcacactggagagaagccat

SEQ ID NO: 432797 - DNA, 802 bp, Homo sapiens
tgccccgcgccgctcgaccgcaaagttcccgctgctcaccagccaggagtccctggcatttcattcagtgtcatacagccctcctgaaagggagcggctgcttccagctccctattcttttgaaagtgtgatttaatatgtcagtaattgatgatttttctgattcctgccttacttttacatggtgcttcttgttagaattatctttgtgatgtttattaatgactttgtattttatctgcacagctttaatttccaggtagaggctggaatcccttataatttagaggtatcttaaaaatggaatcattatgcagccctgcatcaaaaataaacattacagaagaaataaaatttagctccaagaaatataatattatgtagtacatgtattttaagctagtacatcgagtatgtggaaaaataaaaaatgtctcttttctgtatttcttctgggacttctgaacatttcatgcctatagagcttttaagcagcgacaggcactatttaattagaatttcaaccccaaaatatttatacccaaccaaatagaaaccattgtccagtaggctcctgttaatagtttctatctctaataggctaacaatcattggcatggcgggagataatctacggggtgctagcacttaagatagacaagcatttaaaaattgtaagaatccttaagatttttctgtttttaaaaaaaccttgatatctattataaaatatttagcctaaataaacgtctcctagaggttttaaacagtgcttttacaacttccttgtggcatggtggca

SEQ ID NO: 432798 - DNA, 4681 bp, Homo sapiens
ctcgccaccggccactggaagaggctgcggcgagacaaccccagattcaacctgatgctgggagagaggaatcggctgcccttcgggagactgggtcacgagcccgggctggtacagttggtgaattactacaggggtgctgacaaactgtgtcgcaaagcttctttagtgaagctaatcaagacaagccctgaactggctgagtcctgcacatggttccctgaatcttatgtgatttatccaaccaatctcaagactccagttgctccagcacagaatggaattcagccaccaatcagtaactcaaggacagatgaaagagaattctttctcgcctcttataacagaaagaaagaggatggagagggcaacgtttggattgcaaagtcatcagccggtgccaaaggtgaaggcattctcatctcctcagaggcttcagagcttctcgatttcatagacaaccagggccaagtgcacgtgatccagaaatatcttgagcaccctctgctgcttgagccaggtcatcgcaagtttgacattcgaagctgggtcttggtggatcatcagtataatatctacctctatagagagggtgtgcttcggactgcttcagaaccatatcatgttgataatttccaagacaaaacctgccatttgaccaatcactgcattcaaaaagagtattcaaagaactacgggaagtatgaagaaggaaatgaaatgttcttcaaggagttcaatcagtacctaacaagtgctttgaacattaccctagaaagtagtatcttactacaaatcaaacatataataaggaactgcctcctgagcgtggagcctgccattagcaccaagcacctcccttaccagagcttccagctcttcggctttgacttcatggtcgatgaggagctgaaggtgtggctcattgaggtcaacggtgcccctgcatgtgctcagaagctctatgcagaactgtgccaaggcatcgtggacatagccatttccagtgtcttcccacccccagatgtggagcaacctcagacccagccagctgccttcatcaagctgtgacagagggcactccctgctgccttggaaaaagcacggggtcctgctccagggaatggtgaaatgactggattgctctttatccagcccacagcaggggaaagaaaggcaactcgcaaagatgagatggaagaaggcacgtgagcagaggaggcagctcccaaagagagggctgctcagggggcttcccaggtgtagctctcagcagtgctgttgagacttttgaaaacaactttggtacacaaaggcagctttgtgagcagagctccttcccctctccccgggaacggcagggcactgggacctctggtcggtgcctcccacccactgcagccctagtgccttagctccatgcccggctgcagccccactgctctggactatggattggacgtcagagcatattggaggttgcctgtgtgttccccacccatcccttcggtaacactctgccacactaagctctgtacaagcatgcaccaacagtccttagttttgtgctgtgcactggcctctcggcaaaggtggtttccctcatcaccttcctgatggtgtttggtcagtcacctgtcagggtttgtgcgggttgggccccaaaacagcatatgctgctctaagtctgctctctgcatgttttagaaacaaagtggcaagtctgccctgaacctgtaagcatcaaataagcatgagagagaaaaaaacatgatatattgctttacttaataggttgaatatggtaggtctttgaaaatatgatgattcaattttctcaattttctttgctttaaccaaaattctaaatgcagttttgcctagttccctttttttttctttttttacttttttttaaacgtttgtaaaaacctctttgaggatgaggagtcagtaaaattccactccccaagtggccctgccccagacaaaggttgctttccccctttttgttctttttatgccccgaagcactttctgcagtagctagagggacaggtttccttccaggaaggattcgagttcctgtgcctgtgggtattaggagagtatatatcctgcctgaatggggaagtcttctaaaatgggaaagaagtggtttcatctccacacagtgtcttgtaaatctcaacaaatgtgtactgttagaagtggcttccgcttactggattaactaatactttataggcttttcaggaggccacatcactagcagtagggagaacaagatgtcatttgtgttcagtgtaagctgagtaaacaggcccttcctagagtgtcctggaaatcacagcaacccattgaaaactgccctccccaccagaacgtgctacgttctttcttcatgcctatgtgtgctccattcctcatttctacttggctcaagaaaacatttctgcagtcaggtgagacttttacaaaagaggagaaaatcaatgcctccttgaacatgatgagatgtgagaacttacaatgaaaaaggcaataatgatagaaattatttcttaggtacagcaatagttgataggatgtgagggtgttaccttggggtgaagtggagaaggtcccaggtgaattggctctcatggaaatttggaattacgaaataaacgtcctgggggttacccagaatacagatttaaaagtttgcctgtagagcaaaataaaacagtcagttgtagtcattaatccttgaggcccaacgcagccgatgggttggtgtttgggaaattctgagatgggagtgagatctgatcggatcctgggaagatgtatacccagttagaacgtgtagggttctgggtccctggcaagtctaggtgggcgggtgacagggaaagcatgggcatttttgtattgctgtcacatgctaacagaggtttgtaattatcttttggacccaaattatagagacattcacgagttttctagccctcacagtaacagagctaagaattcagatgtcaggaagtctgtgaatcttgatggattttctgagaaacctgactcaatggcatatataagagggaagtaagacttttaagaaaagaaaaagttatgcctcattcctcatgtggcttccaataagtatcttaggaacttatttcctttttaaaaaatattttttaaatttttaaaatttgattttaaatttcaaataaatttaaataaattttaaataaattttaaataaaattttacagagacgtggtctcactatgttgcccaggctggattgcagtggctattcgcagttgtaatcatagcacactgcagcctcgaatttctgggcttgagcagtcctcccgtctcagcctcctgagtagctgagactacaggtgcacaccaccaagcctggctttatgtatttatttctgttcatgcggaatgattggttcagaactgttcctttcccttccatgatgtccttgacacagaaggttatgcctggctcccagtcaggcttcatacttttggtccatgtaagtgctacccgttgctgggggaggagtcatggtttatttggaaatgtcagttgcaatcatggttctgtcatttgactgcacagtatcagaggagcctgttaacctctctgtgccttagtttcttagcccatgaaagagatcattgcctgacccagggactacctcaagggcttttgatgaggacaagtgacagtaggaagatgcaagagcctttagtaccaaggttctcaacactgactacatgctggaatgactgtgaagcttttaaaaaatgttagtgcccactcttcccctgtacccccggacagttaaatcagaacctcagacagcaatatgccttgagatgccttgaaccatgcttgagaaggaaggacaaacacattattatcttggaagaattgcataaggcttatgacttaaaaaaaaaaattctttttggaaacacaagcatttctttaaggatgaccggatgttgccgtatgtatttatggcacaagcaggtgttgtctaagcagtttctctgtttgcttgtcatagcagcatttggaaactcaaacatgctttcatttacataaatagtttatgaagctttgacaacaaatgtaaacagacacgaaattataaatctgctaaatatgtattaagggtattaattattgaaagtccctttccccaaaactcaactcctatggcaattatgaactccattttaccaagaacatttaagtgcctcagcatctgtatgatatagtggagcaggtgctgacataggtaccagctgacatgatgtgtcactagctctgtgggatgattgccacatacatggaacacctgggagtgctggaaatgtactgggatcgaagtgacaaagtgtgttttcattcacagtggaggctacatcaagcaaggggaggtccagccctcttgcaagtgtggtgagaggctctactagcaaagacatgggcaccggagtaggtcccgtgtagcatgcgggtgctgtagagaaaattcagtgacgtacatggctctggttctggacacaaaatctgtactggagaggaaatgactgctgaaataaggcgattgtatgaatatttaaaatgcctggaacactaaagtaaagtaatgatatttca

SEQ ID NO: 432799 - DNA, 4999 bp, Homo sapiens
ctcgccaccggccactggaagaggctgcggcgagacaaccccagattcaacctgatgctgggagagaggaatcggctgcccttcgggagactgggtcacgagcccgggctggtacagttggtgaattactacaggggtgctgacaaactgtgtcgcaaagcttctttagtgaagctaatcaagacaagccctgaactggctgagtcctgcacatggttccctgaatcttatgtgatttatccaaccaatctcaagactccagttgctccagcacagaatggaattcagccaccaatcagtaactcaaggacagatgaaagagaattctttctcgcctcttataacagaaagaaagaggatggagagggcaacgtttggattgcaaagtcatcagccggtgccaaaggtgaaggcattctcatctcctcagaggcttcagagcttctcgatttcatagacaaccagggccaagtgcacgtgatccagaaatatcttgagcaccctctgctgcttgagccaggtcatcgcaagtttgacattcgaagctgggtcttggtggatcatcagtataatatctacctctatagagagggtgtgcttcggactgcttcagaaccatatcatgttgataatttccaagacaaaacctgccatttgaccaatcactgcattcaaaaagagtattcaaagaactacgggaagtatgaagaaggaaatgaaatgttcttcaaggagttcaatcagtacctaacaagtgctttgaacattaccctagaaagtagtatcttactacaaatcaaacatataataaggaactgcctcctgagcgtggagcctgccattagcaccaagcacctcccttaccagagcttccagctcttcggctttgacttcatggtcgatgaggagctgaaggtgtggctcattgaggtcaacggtgcccctgcatgtgctcagaagctctatgcagaactgtgccaaggcatcgtggacatagccatttccagtgtcttcccacccccagatgtggagcaacctcagacccagccagctgccttcatcaagctgtgacagagggcactccctgctgccttggaaaaagcacggggtcctgctccagggaatggtgaaatgactggattgctctttatccagcccacagcaggggaaagaaaggcaactcgcaaagatgagatggaagaaggcacgtgagcagaggaggcagctcccaaagagagggctgctcagggggcttcccaggtgtagctctcagcagtgctgttgagacttttgaaaacaactttggtacacaaaggcagctttgtgagcagagctccttcccctctccccgggaacggcagggcactgggacctctggtcggtgcctcccacccactgcagccctagtgccttagctccatgcccggctgcagccccactgctctggactatggattggacgtcagagcatattggaggttgcctgtgtgttccccacccatcccttcggtaacactctgccacactaagctctgtacaagcatgcaccaacagtccttagttttgtgctgtgcactggcctctcggcaaaggtggtttccctcatcaccttcctgatggtgtttggtcagtcacctgtcagggtttgtgcgggttgggccccaaaacagcatatgctgctctaagtctgctctctgcatgttttagaaacaaagtggcaagtctgccctgaacctgtaagcatcaaataagcatgagagagaaaaaaacatgatatattgctttacttaataggttgaatatggtaggtctttgaaaatatgatgattcaattttctcaattttctttgctttaaccaaaattctaaatgcagttttgcctagttccctttttttttctttttttacttttttttaaacgtttgtaaaaacctctttgaggatgaggagtcagtaaaattccactccccaagtggccctgccccagacaaaggttgctttccccctttttgttctttttatgccccgaagcactttctgcagtagctagagggacaggtttccttccaggaaggattcgagttcctgtgcctgtgggtattaggagagtatatatcctgcctgaatggggaagtcttctaaaatgggaaagaagtggtttcatctccacacagtgtcttgtaaatctcaacaaatgtgtactgttagaagtggcttccgcttactggattaactaatactttataggcttttcaggaggccacatcactagcagtagggagaacaagatgtcatttgtgttcagtgtaagctgagtaaacaggcccttcctagagtgtcctggaaatcacagcaacccattgaaaactgccctccccaccagaacgtgctacgttctttcttcatgcctatgtgtgctccattcctcatttctacttggctcaagaaaacatttctgcagtcaggtgagacttttacaaaagaggagaaaatcaatgcctccttgaacatgatgagatgtgagaacttacaatgaaaaaggcaataatgatagaaattatttcttaggtacagcaatagttgataggatgtgagggtgttaccttggggtgaagtggagaaggtcccaggtgaattggctctcatggaaatttggaattacgaaataaacgtcctgggggttacccagaatacagatttaaaagtttgcctgtagagcaaaataaaacagtcagttgtagtcattaatccttgaggcccaacgcagccgatgggttggtgtttgggaaattctgagatgggagtgagatctgatcggatcctgggaagatgtatacccagttagaacgtgtagggttctgggtccctggcaagtctaggtgggcgggtgacagggaaagcatgggcatttttgtattgctgtcacatgctaacagaggtttgtaattatcttttggacccaaattatagagacattcacgagttttctagccctcacagtaacagagctaagaattcagatgtcaggaagtctgtgaatcttgatggattttctgagaaacctgactcaatggcatatataagagggaagtaagacttttaagaaaagaaaaagttatgcctcattcctcatgtggcttccaataagtatcttaggaacttatttcctttttaaaaaatattttttaaatttttaaaatttgattttaaatttcaaataaatttaaataaattttaaataaattttaaataaaattttacagagacgtggtctcactatgttgcccaggctggattgcagtggctattcgcagttgtaatcatagcacactgcagcctcgaatttctgggcttgagcagtcctcccgtctcagcctcctgagtagctgagactacaggtgcacaccaccaagcctggctttatgtatttatttctgttcatgcggaatgattggttcagaactgttcctttcccttccatgatgtccttgacacagaaggttatgcctggctcccagtcaggcttcatacttttggtccatgtaagtgctacccgttgctgggggaggagtcatggtttatttggaaatgtcagttgcaatcatggttctgtcatttgactgcacagtatcagaggagcctgttaacctctctgtgccttagtttcttagcccatgaaagagatcattgcctgacccagggactacctcaagggcttttgatgaggacaagtgacagtaggaagatgcaagagcctttagtaccaaggttctcaacactgactacatgctggaatgactgtgaagcttttaaaaaatgttagtgcccactcttcccctgtacccccggacagttaaatcagaacctcagacagcaatatgccttgagatgccttgaaccatgcttgagaaggaaggacaaacacattattatcttggaagaattgcataaggcttatgacttaaaaaaaaaaattctttttggaaacacaagcatttctttaaggatgaccggatgttgccgtatgtatttatggcacaagcaggtgttgtctaagcagtttctctgtttgcttgtcatagcagcatttggaaactcaaacatgctttcatttacataaatagtttatgaagctttgacaacaaatgtaaacagacacgaaattataaatctgctaaatatgtattaagggtattaattattgaaagtccctttccccaaaactcaactcctatggcaattatgaactccattttaccaagaacatttaagtgcctcagcatctgtatgatatagtggagcaggtgctgacataggtaccagctgacatgatgtgtcactagctctgtgggatgattgccacatacatggaacacctgggagtgctggaaatgtactgggatcgaagtgacaaagtgtgttttcattcacagtggaggctacatcaagcaaggggaggtccagccctcttgcaagtgtggtgagaggctctactagcaaagacatgggcaccggagtaggtcccgtgtagcatgcgggtgctgtagagaaaattcagtgacgtacatggctctggttctggacacaaaatctgtactggagaggaaatgactgctgaaataaggcgattgtatgaatatttaaaatgcctggaacactaaagtaaagtaatgatatttcaagtgtttttgtgctctttggttcttgttgtaggtattgactgtcctgggatatcactggtcatttaaattcaccatataattagccgggcatggtggcatgtggtggtggctgaggtgggaggatcgcttgaggctgaggtgtgaggctgcagtgaaccatgttcacaccactgtactctagcttgagcaacagagcaagaccctgtctcaaaagtaaataaataataaagtaaatataaatccatgatgccgttactcaggggtagacagactttctgtaaaaggccagataataaatctgctaggctttgcaaacc

SEQ ID NO: 432800 - DNA, 1591 bp, Homo sapiens
ctcgccaccggccactggaagaggctgcggcgagacaaccccagattcaacctgatgctgggagagaggaatcggctgcccttcgggagactgggtcacgagcccgggctggtacagttggtgaattactacaggggtgctgacaaactgtgtcgcaaagcttctttagtgaagctaatcaagacaagccctgaactggctgagtcctgcacatggttccctgaatcttatgtgatttatccaaccaatctcaagactccagttgctccagcacagaatggaattcagccaccaatcagtaactcaaggacagatgaaagagaattctttctcgcctcttataacagaaagaaagaggatggagagggcaacgtttggattgcaaagtcatcagccggtgccaaaggtgaaggcattctcatctcctcagaggcttcagagcttctcgatttcatagacaaccagggccaagtgcacgtgatccagaaatatcttgagcaccctctgctgcttgagccaggtcatcgcaagtttgacattcgaagctgggtcttggtggatcatcagtataatatctacctctatagagagggtgtgcttcggactgcttcagaaccatatcatgttgataatttccaagacaaaacctgccatttgaccaatcactgcattcaaaaagagtattcaaagaactacgggaagtatgaagaaggaaatgaaatgttcttcaaggagttcaatcagtacctaacaagtgctttgaacattaccctagaaagtagtatcttactacaaatcaaacatataataaggaactgcctcctgagcgtggagcctgccattagcaccaagcacctcccttaccagagcttccagctcttcggctttgacttcatggtcgatgaggagctgaaggtgtggctcattgaggtcaacggtgcccctgcatgtgctcagtaagcctgcacgtcattgtgtttttacaagtgggaagttggttctgcagttgggatagtctgtgggtacaagtgtagtcactttgactgctgtgagggaggatgccacagtgataggagacccttgggaggactctatctggcagggggctttgctgagtcacttcctttcctatttccccgtgtataggccagataggcccagtgtggtagctcatgcttgtaatcccagcactttgggaggccaagacaggtagactgtcaggtagactgtctgagcccaggagttcaagaccagcctgggcagcctggcaaaaccccatctctacaaaaaatacagaaattagtcaggcatggtgctgtgtgcctatagtcccagctgctcgggaggctgaggtgggaggatcacttgagcctgggaggttgaggctgcagtgagccatgactgcaccactgcattgcagcctgggcgacagagagaccctgtctcaaaagtaaaaaatgtaagcagctagcctgtgctcaggtgggtgggagatgccatgagagtgttaaagttcattactgccagagagacccgtatgacaagctgagtaagcaggatcctatgatgtggcgacccagaagttcagagc

SEQ ID NO: 432801 - DNA, 931 bp, Homo sapiens
ctcgccaccggccactggaagaggctgcggcgagacaaccccagattcaacctgatgctgggagagaggaatcggctgcccttcgggagactgggtcacgagcccgggctggtacagttggtgaattactacaggggtgctgacaaactgtgtcgcaaagcttctttagtgaagctaatcaagacaagccctgaactggctgagtcctgcacatggttccctgaatcttatgtgatttatccaaccaatctcaagactccagttgctccagcacagaatggaattcagccaccaatcagtaactcaaggacagatgaaagagaattctttctcgcctcttataacagaaagaaagaggatggagagggcaacgtttggattgcaaagtcatcagccggtgccaaaggtgaaggcattctcatctcctcagaggcttcagagcttctcgatttcatagacaaccagggccaagtgcacgtgatccagaaatatcttgagcaccctctgctgcttgagccaggtcatcgcaagtttgacattcgaagctgggtcttggtagatgaagtatttaaaagaagaggccatgatatagtaatatttggtttaatgtggtatggttgtagtgtgtggcggaaatttgagaggaagaattgtcaacttgcagggcagcagggaagccatttgtatttagctagaagaacatggattgaagcaatggatgatggatttcagagcaatttgtgaagtagaaccagaattttgtccgtcgaacttggggtgacgaagcactatgcctcagataaaggtactatcttctagggaattcaaacggacctaagctgctatttgggcagttgagaccaagagaggcatcctggtaatagtgctgtgcttcaagacaaaagacattaaaatatttttacattgcaaa

SEQ ID NO: 432802 - DNA, 1211 bp, Homo sapiens
ctcgccaccggccactggaagaggctgcggcgagacaaccccagattcaacctgatgctgggagagaggaatcggctgcccttcgggagactgggtcacgagcccgggctggtacagttggtgaattactacaggggtgctgacaaactgtgtcgcaaagcttctttagtgaagctaatcaagacaagccctgaactggctgagtcctgcacatggttccctgaatcttatgtgatttatccaaccaatctcaagactccagttgctccagcacagaatggaattcagccaccaatcagtaactcaaggacagatgaaagagaattctttctcgcctcttataacagaaagaaagaggatggagagggcaacgtttggattgcaaagtcatcagccggtgccaaaggtgaaggcattctcatctcctcagaggcttcagagcttctcgatttcatagacaaccagggccaagtgcacgtgatccagaaatatcttgagcaccctctgctgcttgagccaggtcatcgcaagtttgacattcggtaatgcattcatgtccatagcttttgtttttattcatctgaaaaaactgccatggtatgtggtgggaagggggacatggaatatgaggaagcgtttgaccatgtttaatatgttaccaaaattgagcacagctgaatggaacttaccttctgtacctaattttctatttttctttcttgttttttccatctagaaaatgttactacgattatggattttcttttttaaaaaatattcttttctggctgggcacagtggctcacgcttgtaatcccagcactttgggaggccagggtggatggatcacctgagcccaggagttcaagaccagcctgggcagcctggcaaaaccccatctctacaaaaaatacagaaattagtcaggcatggtgctgtgtgcctatagtcccagctgctcgggaggctgaggtgggaggatcacttgagcctgggaggttgaggctgcagtgagccatgactgcaccactgcattgcagcctgggcgacagagagaccctgtctcaaaagtaaaaaatgtaagcagctagcctgtgctcaggtgggtgggagatgccatgagagtgttaaagttcattactgccagagagacccgtatgacaagctgagtaagcaggatcctatgatgtggcgacccagaagttcagagc

SEQ ID NO: 432803 - DNA, 530 bp, Homo sapiens
ctcttccccatttcatttttttagtatgggtatggttcaacaacatatttgttgaaaagatatcggctcaggattgtgtccggttaagtttcattagagatgcattttaaaaggagcataagtgttggacattaagccttttgaattaattggggtatgcctttcaggttgcatctaacagctgtgcgctccccaataacgcatttgagctttgtccagggagactaagagcaaatagagatgttagaagactgagtcatgctttgcctcccggaaagtctctgggggaaaggagtggcctttctgaagggagtgacaaagtgcactaagaagggaggctgatcctcttctgtcatctgccaggctaatcaagacaagccctgaactggctgagtcctgcacatggttccctgaatcttatgtgatttatccaaccaatctcaagactccagttgctccagcacagaatggaattcagccaccaatcagtaactcaaggacagatgaaagagaattctttctcgcctctt

SEQ ID NO: 432804 - DNA, 5791 bp, Homo sapiens
  misc_feature (3594)..(3594): n is a, c, g, or t
gccgcccctgagcagcctcgccttcgcctcccgcgtttcctgccgtccgccctcccccggccgagctccaggggctgccgcctagcagctcccggcgggagagcggttcagagcgcgcacgggggcgggcggaggcggcccggtgcggggcggccgcgctggagagaggcgcgcgcggagacgccggcccccctctccgcgtttgctcgcttgctccccgcctcccgcactccgctcgctcccaccccttcccggcgtgattgatccgtcacgggcgccgccgctgccgccgccgccgcggccgttctgagccgagccggaaccctagcccgagacggagccggggcccgggccggcgccattgcgcgggcgccgcgggaagaccttggcgcggggcggcgggccgggccaggccatgcgggccgagtgagccggcgcccgcagcccgcggcgcggcatggcttccccgcggagctccgggcagcccgggccgccgccgccgccgccaccgccgcccgcgcgcctgctactgctactgctgctgccgctgctgctgcctctggcgcccggggcctggggctgggcgcggggcgccccccggccgccgcccagcagcccgccgctctccatcatgggcctcatgccgctcaccaaggaggtggccaagggcagcatcgggcgcggtgtgctccccgccgtggaactggccatcgagcagatccgcaacgagtcactcctgcgcccctacttcctcgacctgcggctctatgacacggagtgcgacaacgcaaaagggttgaaagccttctacgatgcaataaaatacgggccgaaccacttgatggtgtttggaggcgtctgtccatccgtcacatccatcattgcagagtccctccaaggctggaatctggtgcagctttcttttgctgcaaccacgcctgttctagccgataagaaaaaatacccttatttctttcggaccgtcccatcagacaatgcggtgaatccagccattctgaagttgctcaagcactaccagtggaagcgcgtgggcacgctgacgcaagacgttcagaggttctctgaggtgcggaatgacctgactggagttctgtatggcgaggacattgagatttcagacaccgagagcttctccaacgatccctgtaccagtgtcaaaaagctgaaggggaatgatgtgcggatcatccttggccagtttgaccagaatatggcagcaaaagtgttctgttgtgcatacgaggagaacatgtatggtagtaaatatcagtggatcattccgggctggtacgagccttcttggtgggagcaggtgcacacggaagccaactcatcccgctgcctccggaagaatctgcttgctgccatggagggctacattggcgtggatttcgagcccctgagctccaagcagatcaagaccatctcaggaaagactccacagcagtatgagagagagtacaacaacaagcggtcaggcgtggggcccagcaagttccacgggtacgcctacgatggcatctgggtcatcgccaagacactgcagagggccatggagacactgcatgccagcagccggcaccagcggatccaggacttcaactacacggaccacacgctgggcaggatcatcctcaatgccatgaacgagaccaacttcttcggggtcacgggtcaagttgtattccggaatggggagagaatggggaccattaaatttactcaatttcaagacagcagggaggtgaaggtgggagagtacaacgctgtggccgacacactggagatcatcaatgacaccatcaggttccaaggatccgaaccaccaaaagacaagaccatcatcctggagcagctgcggaagatctccctacctctctacagcatcctctctgccctcaccatcctcgggatgatcatggccagtgcttttctcttcttcaacatcaagaaccggaatcagaagctcataaagatgtcgagtccatacatgaacaaccttatcatccttggagggatgctctcctatgcttccatatttctctttggccttgatggatcctttgtctctgaaaagacctttgaaacactttgcaccgtcaggacctggattctcaccgtgggctacacgaccgcttttggggccatgtttgcaaagacctggagagtccacgccatcttcaaaaatgtgaaaatgaagaagaagatcatcaaggaccagaaactgcttgtgatcgtggggggcatgctgctgatcgacctgtgtatcctgatctgctggcaggctgtggaccccctgcgaaggacagtggagaagtacagcatggagccggacccagcaggacgggatatctccatccgccctctcctggagcactgtgagaacacccatatgaccatctggcttggcatcgtctatgcctacaagggacttctcatgttgttcggttgtttcttagcttgggagacccgcaacgtcagcatccccgcactcaacgacagcaagtacatcgggatgagtgtctacaacgtggggatcatgtgcatcatcggggccgctgtctccttcctgacccgggaccagcccaatgtgcagttctgcatcgtggctctggtcatcatcttctgcagcaccatcaccctctgcctggtattcgtgccgaagctcatcaccctgagaacaaacccagatgcagcaacgcagaacaggcgattccagttcactcagaatcagaagaaagaagattctaaaacgtccacctcggtcaccagtgtgaaccaagccagcacatcccgcctggagggcctacagtcagaaaaccatcgcctgcgaatgaagatcacagagctggataaagacttggaagaggtcaccatgcagctgcaggacacaccagaaaagaccacctacattaaacagaaccactaccaagagctcaatgacatcctcaacctgggaaacttcactgagagcacagatggaggaaaggccattttaaaaaatcacctcgatcaaaatccccagctacagtggaacacaacagagccctctcgaacatgcaaagatcctatagaagatataaactctccagaacacatccagcgtcggctgtccctccagctccccatcctccaccacgcctacctcccatccatcggaggcgtggacgccagctgtgtcagcccctgcgtcagccccaccgccagcccccgccacagacatgtgccaccctccttccgagtcatggtctcgggcctgtaagggtgggaggcctgggcccggggcctcccccgtgacagaaccacactgggcagaggggtctgctgcagaaacactgtcggctctggctgcggagaagctgggcaccatggctggcctctcaggaccactcggatggcactcaggtggacaggacggggcagggggagacttggcacctgacctcgagccttatttgtgaagtccttatttcttcacaaagaagaggaacggaaatgggacgtcttccttaacatctgcaaacaaggaggcgctgggatatcaaacttgcaaaaaaaaaaaaaaaacaaaanaaaacaaaaaaactagacaaggagagaggcactagaactccagctggaagtcacggagtggctcgagcagccttgggaagaggcaaggagcttctgaagaaactgcctctgcacacacatcactggctgtgacccctcaggctagcccttctccactctgggggaggaggtgggaagggccaccaggcccccagctgccaggccagctgaccccagccttcctggaacagggagtctgcaggagcgcagacaggcacagccctggagcaggcaggccgagggctgcggcactggagcaggctgacttacatgctccacatgggacctgtgtcacccaatgagatgtttgttactctggtaaatgccacacgttaacacaataacacccattcctgggaccgtggggatttagggcacgtcactgcagacacgctctgcagcattcaccgacagtctgtcatgcacccaccacgttggccatgtccttgtgttcctatcggatgctcccagtaaccagggggaccacccgagctaatcatggaatgtctgttcccagcaaacacgataaagaaagattgtgcactttaacctctctcatcagggcccaagggctggctgggatttttttttttttttttcccactaactttgtttctgaccaaagtgaattggaggcattctgctaaaagacatccccgtagacataggggagagagttgctggctgagggcttcccttggcttccagaaggcagccttccatccagacaagccagtgagctctccccttgggatcactggggtgatcagtcagcagattgattctcattcataagatcattcctccctttaaattgagcccctaagagcactggcctgggagtcagacagacctgggttcaagtcctcagtcccctgcccactccctacgtgactttgatcaggtcactagtgtctctctgagcctcagtttcccctctgtaacttggggttgaactaaaacacctgtcctgcctacctcacaaggtcactctgaggattgaaacttgatcttgtccaggaaagctttgtaccaaacagtgaagccgccctgatccgtgaggtatgagtatgactctgaccttcagccctccctacagccgggggtgtggcccagagaagcttccagcacagccctctacccagaacatccgggctggagggaggctcccagtgacttttctgacattcctagacaggttcattctttgctcaagaaaggcctgaatgacaatgtccaggatgtctgcacaactgagcagctcgctcactccctaaagaaacctattggcagcttcaacaggcaggcaataatctcttcccagaaccactgcagtcaggaataaactgttttctccaccaggctttgacaaaagggcccacaggaatcttaccaatgccaacatttcaaagcaccctatttcacgtagcatagctttctgctccccttccccaaagagaggttatggaggtactgtagcttttagggaaaaaaaaatgttaacacatcacaggtcaagttgaagtcattctctgtttaggcactaaaaatcggtgttgtcactcactgtgtattaccagtatttacttgctttcttgatttcaccaaaaccaaatttaatttaaaggaccacattaatttttcaaagggaaagagacaattaattgtacataatgtatacacacacaaaaaaaaaaatacctgtagaaatattattccagcatagcaggaaaacaaacaaaagtattggactgtcggaggtgagcctgtgcgtctgtaaccctttgtgactcctgagcgtgcgctgtcttctaggttaactcacgaagtacattctctgtcttactgatactgtaggttcacccatttttttttaatttcctcgcaaataacaagacccacagaagtgactctagctacttaatggttctgttcttttatatgcagcaaacacaccgtccatttctgaagaggcttcggcctgaaggcattttccaatgatgttagtgcacaaaacgctttaaattagactggaactgccagaatcaaatgtaaatgaggaatttctcgtacccctactgcatggtatcgatttttaataaattgttgcaaatttgtttttatgaataaaaggaaaaaacctgtcgtctttaatgcc

SEQ ID NO: 432805 - DNA, 708 bp, Homo sapiens
agcgccagcgcctccccctcccccggcgcgcacggctcgtccccgtccctggaggcggcccgagccgcccctgagcagcctcgccttcgcctcccgcgtttcctgccgtccgccctcccccggccgagctccaggggctgccgcctagcagctcccggcgggagagcggttcagagcgcgcacgggggcgggcggaggcggcccggtgcggggcggccgcgctggagagaggcgcgcgcggagacgccggcccccctctccgcgtttgctcgcttgctccccgcctcccgcactccgctcgctcccaccccttcccggcgtgattgatccgtcacgggcgccgatcgctcgacagcgacagcccgcgcagcctgctactgctactgctgctgccgctgctgctgcctctggcgcccggggcctggggctagggcgcggggagccccaccagggccgaacgcccagacagaccgcacggtcatccatcatgggcctcatgccgatcaccaacgagagtggccaaagggcagcatacgaggcagcggagtgactcccccgccgttggaactggccatcgagcagatccgcaagagagtcactcctgcgacccctacttccatcgacctgctggctctatgacacggagttgcgacaacgcaaaagggttgaaagccttctacgatgcaataaaatacgggccgaaccact

SEQ ID NO: 432806 - DNA, 5738 bp, Homo sapiens
  misc_feature (3594)..(3594): n is a, c, g, or t
gccgcccctgagcagcctcgccttcgcctcccgcgtttcctgccgtccgccctcccccggccgagctccaggggctgccgcctagcagctcccggcgggagagcggttcagagcgcgcacgggggcgggcggaggcggcccggtgcggggcggccgcgctggagagaggcgcgcgcggagacgccggcccccctctccgcgtttgctcgcttgctccccgcctcccgcactccgctcgctcccaccccttcccggcgtgattgatccgtcacgggcgccgccgctgccgccgccgccgcggccgttctgagccgagccggaaccctagcccgagacggagccggggcccgggccggcgccattgcgcgggcgccgcgggaagaccttggcgcggggcggcgggccgggccaggccatgcgggccgagtgagccggcgcccgcagcccgcggcgcggcatggcttccccgcggagctccgggcagcccgggccgccgccgccgccgccaccgccgcccgcgcgcctgctactgctactgctgctgccgctgctgctgcctctggcgcccggggcctggggctgggcgcggggcgccccccggccgccgcccagcagcccgccgctctccatcatgggcctcatgccgctcaccaaggaggtggccaagggcagcatcgggcgcggtgtgctccccgccgtggaactggccatcgagcagatccgcaacgagtcactcctgcgcccctacttcctcgacctgcggctctatgacacggagtgcgacaacgcaaaagggttgaaagccttctacgatgcaataaaatacgggccgaaccacttgatggtgtttggaggcgtctgtccatccgtcacatccatcattgcagagtccctccaaggctggaatctggtgcagctttcttttgctgcaaccacgcctgttctagccgataagaaaaaatacccttatttctttcggaccgtcccatcagacaatgcggtgaatccagccattctgaagttgctcaagcactaccagtggaagcgcgtgggcacgctgacgcaagacgttcagaggttctctgaggtgcggaatgacctgactggagttctgtatggcgaggacattgagatttcagacaccgagagcttctccaacgatccctgtaccagtgtcaaaaagctgaaggggaatgatgtgcggatcatccttggccagtttgaccagaatatggcagcaaaagtgttctgttgtgcatacgaggagaacatgtatggtagtaaatatcagtggatcattccgggctggtacgagccttcttggtgggagcaggtgcacacggaagccaactcatcccgctgcctccggaagaatctgcttgctgccatggagggctacattggcgtggatttcgagcccctgagctccaagcagatcaagaccatctcaggaaagactccacagcagtatgagagagagtacaacaacaagcggtcaggcgtggggcccagcaagttccacgggtacgcctacgatggcatctgggtcatcgccaagacactgcagagggccatggagacactgcatgccagcagccggcaccagcggatccaggacttcaactacacggaccacacgctgggcaggatcatcctcaatgccatgaacgagaccaacttcttcggggtcacgggtcaagttgtattccggaatggggagagaatggggaccattaaatttactcaatttcaagacagcagggaggtgaaggtgggagagtacaacgctgtggccgacacactggagatcatcaatgacaccatcaggttccaaggatccgaaccaccaaaagacaagaccatcatcctggagcagctgcggaagatctccctacctctctacagcatcctctctgccctcaccatcctcgggatgatcatggccagtgcttttctcttcttcaacatcaagaaccggaatcagaagctcataaagatgtcgagtccatacatgaacaaccttatcatccttggagggatgctctcctatgcttccatatttctctttggccttgatggatcctttgtctctgaaaagacctttgaaacactttgcaccgtcaggacctggattctcaccgtgggctacacgaccgcttttggggccatgtttgcaaagacctggagagtccacgccatcttcaaaaatgtgaaaatgaagaagaagatcatcaaggaccagaaactgcttgtgatcgtggggggcatgctgctgatcgacctgtgtatcctgatctgctggcaggctgtggaccccctgcgaaggacagtggagaagtacagcatggagccggacccagcaggacgggatatctccatccgccctctcctggagcactgtgagaacacccatatgaccatctggcttggcatcgtctatgcctacaagggacttctcatgttgttcggttgtttcttagcttgggagacccgcaacgtcagcatccccgcactcaacgacagcaagtacatcgggatgagtgtctacaacgtggggatcatgtgcatcatcggggccgctgtctccttcctgacccgggaccagcccaatgtgcagttctgcatcgtggctctggtcatcatcttctgcagcaccatcaccctctgcctggtattcgtgccgaagctcatcaccctgagaacaaacccagatgcagcaacgcagaacaggcgattccagttcactcagaatcagaagaaagaagattctaaaacgtccacctcggtcaccagtgtgaaccaagccagcacatcccgcctggagggcctacagtcagaaaaccatcgcctgcgaatgaagatcacagagctggataaagacttggaagaggtcaccatgcagctgcaggacacaccagaaaagaccacctacattaaacagaaccactaccaagagctcaatgacatcctcaacctgggaaacttcactgagagcacagatggaggaaaggccattttaaaaaatcacctcgatcaaaatccccagctacagtggaacacaacagagccctctcgaacatgcaaagatcctatagaagatataaactctccagaacacatccagcgtcggctgtccctccagctccccatcctccaccacgcctacctcccatccatcggaggcgtggacgccagctgtgtcagcccctgcgtcagccccaccgccagcccccgccacagacatgtgccaccctccttccgagtcatggtctcgggcctgtaagggtgggaggcctgggcccggggcctcccccgtgacagaaccacactgggcagaggggtctgctgcagaaacactgtcggctctggctgcggagaagctgggcaccatggctggcctctcaggaccactcggatggcactcaggtggacaggacggggcagggggagacttggcacctgacctcgagccttatttgtgaagtccttatttcttcacaaagaagaggaacggaaatgggacgtcttccttaacatctgcaaacaaggaggcgctgggatatcaaacttgcaaaaaaaaaaaaaaaacaaaanaaaacaaaaaaactagacaaggagagaggcactagaactccagctggaagtcacggagtggctcgagcagccttgggaagaggcaaggagcttctgaagaaactgcctctgcacacacatcactggctgtgacccctcaggctagcccttctccactctgggggaggaggtgggaagggccaccaggcccccagctgccaggccagctgaccccagccttcctggaacagggagtctgcaggagcgcagacaggcacagccctggagcaggcaggccgagggctgcggcactggagcaggctgacttacatgctccacatgggacctgtgtcacccaatgagatgtttgttactctggtaaatgccacacgttaacacaataacacccattcctgggaccgtggggatttagggcacgtcactgcagacacgctctgcagcattcaccgacagtctgtcatgcacccaccacgttggccatgtccttgtgttcctatcggatgctcccagtaaccagggggaccacccgagctaatcatggaatgtctgttcccagcaaacacgataaagaaagattgtgcactttaacctctctcatcagggcccaagggctggctgggatttttttttttttttttcccactaactttgtttctgaccaaagtgaattggaggcattctgctaaaagacatccccgtagacataggggagagagttgctggctgagggcttcccttggcttccagaaggcagccttccatccagacaagccagtgagctctccccttgggatcactggggtgatcagtcagcagattgattctcattcataagatcattcctccctttaaattgagcccctaagagcactggcctgggagtcagacagacctgggttcaagtcctcagtcccctgcccactccctacgtgactttgatcaggtcactagtgtctctctgagcctcagtttcccctctgtaacttggggttgaactaaaacacctgtcctgcctacctcacaaggtcactctgaggattgaaacttgatcttgtccaggaaagctttgtaccaaacagtgaagccgccctgatccgtgaggtatgagtatgactctgaccttcagccctccctacagccgggggtgtggcccagagaagcttccagcacagccctctacccagaacatccgggctggagggaggctcccagtgacttttctgacattcctagacaggttcattctttgctcaagaaaggcctgaatgacaatgtccaggatgtctgcacaactgagcagctcgctcactccctaaagaaacctattggcagcttcaacaggcaggcaataatctcttcccagaaccactgcagtcaggaataaactgttttctccaccaggctttgacaaaagggcccacaggaatcttaccaatgccaacatttcaaagcaccctatttcacgtagcatagctttctgctccccttccccaaagagaggttatggaggtactgtagcttttagggaaaaaaaaatgttaacacatcacaggtcaagttgaagtcattctctgtttaggcactaaaaatcggtgttgtcactcactgtgtattaccagtatttacttgctttcttgatttcaccaaaaccaaatttaatttaaaggaccacattaatttttcaaagggaaagagacaattaattgtacataatgtatacacacacaaaaaaaaaaatacctgtagaaatattattccagcatagcaggaaaacaaatcctgagcgtgcgctgtcttctaggttaactcacgaagtacattctctgtcttactgatactgtaggttcacccatttttttttaatttcctcgcaaataacaagacccacagaagtgactctagctacttaatggttctgttcttttatatgcagcaaacacaccgtccatttctgaagaggcttcggcctgaaggcattttccaatgatgttagtgcacaaaacgctttaaattagactggaactgccagaatcaaatgtaaatgaggaatttctcgtacccctactgcatggtatcgatttttaataaattgttgcaaatttgtttttatgaataaaaggaaaaaacctgtcgtctttaatgcc

SEQ ID NO: 432807 - DNA, 4363 bp, Homo sapiens
  misc_feature (3594)..(3594): n is a, c, g, or t
gccgcccctgagcagcctcgccttcgcctcccgcgtttcctgccgtccgccctcccccggccgagctccaggggctgccgcctagcagctcccggcgggagagcggttcagagcgcgcacgggggcgggcggaggcggcccggtgcggggcggccgcgctggagagaggcgcgcgcggagacgccggcccccctctccgcgtttgctcgcttgctccccgcctcccgcactccgctcgctcccaccccttcccggcgtgattgatccgtcacgggcgccgccgctgccgccgccgccgcggccgttctgagccgagccggaaccctagcccgagacggagccggggcccgggccggcgccattgcgcgggcgccgcgggaagaccttggcgcggggcggcgggccgggccaggccatgcgggccgagtgagccggcgcccgcagcccgcggcgcggcatggcttccccgcggagctccgggcagcccgggccgccgccgccgccgccaccgccgcccgcgcgcctgctactgctactgctgctgccgctgctgctgcctctggcgcccggggcctggggctgggcgcggggcgccccccggccgccgcccagcagcccgccgctctccatcatgggcctcatgccgctcaccaaggaggtggccaagggcagcatcgggcgcggtgtgctccccgccgtggaactggccatcgagcagatccgcaacgagtcactcctgcgcccctacttcctcgacctgcggctctatgacacggagtgcgacaacgcaaaagggttgaaagccttctacgatgcaataaaatacgggccgaaccacttgatggtgtttggaggcgtctgtccatccgtcacatccatcattgcagagtccctccaaggctggaatctggtgcagctttcttttgctgcaaccacgcctgttctagccgataagaaaaaatacccttatttctttcggaccgtcccatcagacaatgcggtgaatccagccattctgaagttgctcaagcactaccagtggaagcgcgtgggcacgctgacgcaagacgttcagaggttctctgaggtgcggaatgacctgactggagttctgtatggcgaggacattgagatttcagacaccgagagcttctccaacgatccctgtaccagtgtcaaaaagctgaaggggaatgatgtgcggatcatccttggccagtttgaccagaatatggcagcaaaagtgttctgttgtgcatacgaggagaacatgtatggtagtaaatatcagtggatcattccgggctggtacgagccttcttggtgggagcaggtgcacacggaagccaactcatcccgctgcctccggaagaatctgcttgctgccatggagggctacattggcgtggatttcgagcccctgagctccaagcagatcaagaccatctcaggaaagactccacagcagtatgagagagagtacaacaacaagcggtcaggcgtggggcccagcaagttccacgggtacgcctacgatggcatctgggtcatcgccaagacactgcagagggccatggagacactgcatgccagcagccggcaccagcggatccaggacttcaactacacggaccacacgctgggcaggatcatcctcaatgccatgaacgagaccaacttcttcggggtcacgggtcaagttgtattccggaatggggagagaatggggaccattaaatttactcaatttcaagacagcagggaggtgaaggtgggagagtacaacgctgtggccgacacactggagatcatcaatgacaccatcaggttccaaggatccgaaccaccaaaagacaagaccatcatcctggagcagctgcggaagatctccctacctctctacagcatcctctctgccctcaccatcctcgggatgatcatggccagtgcttttctcttcttcaacatcaagaaccggaatcagaagctcataaagatgtcgagtccatacatgaacaaccttatcatccttggagggatgctctcctatgcttccatatttctctttggccttgatggatcctttgtctctgaaaagacctttgaaacactttgcaccgtcaggacctggattctcaccgtgggctacacgaccgcttttggggccatgtttgcaaagacctggagagtccacgccatcttcaaaaatgtgaaaatgaagaagaagatcatcaaggaccagaaactgcttgtgatcgtggggggcatgctgctgatcgacctgtgtatcctgatctgctggcaggctgtggaccccctgcgaaggacagtggagaagtacagcatggagccggacccagcaggacgggatatctccatccgccctctcctggagcactgtgagaacacccatatgaccatctggcttggcatcgtctatgcctacaagggacttctcatgttgttcggttgtttcttagcttgggagacccgcaacgtcagcatccccgcactcaacgacagcaagtacatcgggatgagtgtctacaacgtggggatcatgtgcatcatcggggccgctgtctccttcctgacccgggaccagcccaatgtgcagttctgcatcgtggctctggtcatcatcttctgcagcaccatcaccctctgcctggtattcgtgccgaagctcatcaccctgagaacaaacccagatgcagcaacgcagaacaggcgattccagttcactcagaatcagaagaaagaagattctaaaacgtccacctcggtcaccagtgtgaaccaagccagcacatcccgcctggagggcctacagtcagaaaaccatcgcctgcgaatgaagatcacagagctggataaagacttggaagaggtcaccatgcagctgcaggacacaccagaaaagaccacctacattaaacagaaccactaccaagagctcaatgacatcctcaacctgggaaacttcactgagagcacagatggaggaaaggccattttaaaaaatcacctcgatcaaaatccccagctacagtggaacacaacagagccctctcgaacatgcaaagatcctatagaagatataaactctccagaacacatccagcgtcggctgtccctccagctccccatcctccaccacgcctacctcccatccatcggaggcgtggacgccagctgtgtcagcccctgcgtcagccccaccgccagcccccgccacagacatgtgccaccctccttccgagtcatggtctcgggcctgtaagggtgggaggcctgggcccggggcctcccccgtgacagaaccacactgggcagaggggtctgctgcagaaacactgtcggctctggctgcggagaagctgggcaccatggctggcctctcaggaccactcggatggcactcaggtggacaggacggggcagggggagacttggcacctgacctcgagccttatttgtgaagtccttatttcttcacaaagaagaggaacggaaatgggacgtcttccttaacatctgcaaacaaggaggcgctgggatatcaaacttgcaaaaaaaaaaaaaaaacaaaanaaaacaaaaaacctctagaacacgagggagaagagaggccctctaaaaacccccgcgtgggaaagctccccgggaggggccccaagccacccctgggcgaaaagagaggccaggggagccttctcggaaagaaaagggccctccgtggcacaacaacaatcacgcgggcctgggtgacaccccttcagagggctaagccccctgttcctcgcaacctcgggggagaagagaagggtgggaagagggccacacagaaggccccccaactgtgccaaggcccaatgtgaaccccagagccatccgcgggaaaacaggggagagctccggcaggaaccgccaaacagggggacccagcccccgtgggacaccaggacagcggccgcggaggggcgcgaggcgcgcaactggtgccacgcaggccggaaactctaacactggcctcccaaaggggggcaacccggggtgttcaaccccaacggggaacagtgcttggacaacccctcgggggaaaacggccccaacagggttaacacgagaagagagacaccaccatttcccgggggaaccacgcggggagaaatacagagggggccagcgagccacctggcccgagaacacacgcctccgtgcggacaaaatcgacgagaagaagctgggtgacaatgacgacccccaaacaagggttggggacaccaggccgccaggatggttgcaccaaaaagcgagaagtgaccccccgaggtcaacccggggggggggacaaccagcc

SEQ ID NO: 432808 - DNA, 5711 bp, Homo sapiens
  misc_feature (3514)..(3514): n is a, c, g, or t
gccgcccctgagcagcctcgccttcgcctcccgcgtttcctgccgtccgccctcccccggccgagctccaggggctgccgcctagcagctcccggcgggagagcggttcagagcgcgcacgggggcgggcggaggcggcccggtgcggggcggccgcgctggagagaggcgcgcgcggagacgccggcccccctctccgcgtttgctcgcttgctccccgcctcccgcactccgctcgctcccaccccttcccggcgtgattgatccgtcacgggcgccgccgctgccgccgccgccgcggccgttctgagccgagccggaaccctagcccgagacggagccggggcccgggccggcgccattgcgcgggcgccgcgggaagaccttggcgcggggcggcgggccgggccaggccatgcgggccgagtgagccggcgcccgcagcccgcggcgcggcatggcttccccgcggagctccgggcagcccgggccgccgccgccgccgccaccgccgcccgcgcgcctgctactgctactgctgctgccgctgctgctgcctctggcgcccggggcctggggctgggcgcggggcgccccccggccgccgcccagcagcccgccgctctccatcatgggcctcatgccgctcaccaaggaggtggccaagggcagcatcgggcgcggtgtgctccccgccgtggaactggccatcgagcagatccgcaacgagtcactcctgcgcccctacttcctcgacctgcggctctatgacacggagtgcgacaacgcaaaagggttgaaagccttctacgatgcaataaaatacgggccgaaccacttgatggtgtttggaggcgtctgtccatccgtcacatccatcattgcagagtccctccaaggctggaatctggtgcagctttcttttgctgcaaccacgcctgttctagccgataagaaaaaatacccttatttctttcggaccgtcccatcagacaatgcggtgaatccagccattctgaagttgctcaagcactaccagtggaagcgcgtgggcacgctgacgcaagacgttcagaggttctctgaggtgcggaatgacctgactggagttctgtatggcgaggacattgagatttcagacaccgagagcttctccaacgatccctgtaccagtgtcaaaaagctgaaggggaatgatgtgcggatcatccttggccagtttgaccagaatatggcagcaaaagtgttctgttgtgcatacgaggagaacatgtatggtagtaaatatcagtggatcattccgggctggtacgagccttcttggtgggagcaggtgcacacggaagccaactcatcccgctgcctccggaagaatctgcttgctgccatggagggctacattggcgtggatttcgagcccctgagctccaagcagatcaagaccatctcaggaaagactccacagcagtatgagagagagtacaacaacaagcggtcaggcgtggggcccagcaagttccacgggtacgcctacgatggcatctgggtcatcgccaagacactgcagagggccatggagacactgcatgccagcagccggcaccagcggatccaggacttcaactacacggaccacacgctgggcaggatcatcctcaatgccatgaacgagaccaacttcttcggggtcacgggtcaagttgtattccggaatggggagagaatggggaccattaaatttactcaatttcaagacagcagggaggtgaaggtgggagagtacaacgctgtggccgacacactggagatcatcaatgacaccatcaggttccaaggatccgaaccaccaaaagacaagaccatcatcctggagcagctgcggaagatctccctacctctctacagcatcctctctgccctcaccatcctcgggatgatcatggccagtgcttttctcttcttcaacatcaagaaccggaatcagaagctcataaagatgtcgagtccatacatgaacaaccttatcatccttggagggatgctctcctatgcttccatatttctctttggccttgatggatcctttgtctctgaaaagacctttgaaacactttgcaccgtcaggacctggattctcaccgtgggctacacgaccgcttttggggccatgtttgcaaagacctggagagtccacgccatcttcaaaaatgtgaaaatgaagaagaagatcatcaaggaccagaaactgcttgtgatcgtggggggcatgctgctgatcgacctgtgtatcctgatctgctggcaggctgtggaccccctgcgaaggacagtggagaagtacagcatggagccggacccagcaggacgggatatctccatccgccctctcctggagcactgtgagaacacccatatgaccatctggcttggcatcgtctatgcctacaagggacttctcatgttgttcggttgtttcttagcttgggagacccgcaacgtcagcatccccgcactcaacgacagcaagtacatcgggatgagtgtctacaacgtggggatcatgtgcatcatcggggccgctgtctccttcctgacccgggaccagcccaatgtgcagttctgcatcgtggctctggtcatcatcttctgcagcaccatcaccctctgcctggtattcgtgccgaagctcatcaccctgagaacaaacccagatgcagcaacgcagaacaggcgattccagttcactcagaatcagaagaaagaagattctaaaacgtccacctcggtcaccagtgtgaaccaagccagcacatcccgcctggagggcctacagtcagaaaaccatcgcctgcgaatgaagatcacagagctggataaagacttggaagaggtcaccatgcagctgcaggacacaccagaaaagaccacctacattaaacagaaccactaccaagagctcaatgacatcctcaacctgggaaacttcactgagagcacagatggaggaaaggccattttaaaaaatcacctcgatcaaaatccccagctacagtggaacacaacagagccctctcgaacatgcaaagatcctatagaagatataaactctccagaacacatccagcgtcggctgtccctccagctccccatcctccaccacgcatgtgccaccctccttccgagtcatggtctcgggcctgtaagggtgggaggcctgggcccggggcctcccccgtgacagaaccacactgggcagaggggtctgctgcagaaacactgtcggctctggctgcggagaagctgggcaccatggctggcctctcaggaccactcggatggcactcaggtggacaggacggggcagggggagacttggcacctgacctcgagccttatttgtgaagtccttatttcttcacaaagaagaggaacggaaatgggacgtcttccttaacatctgcaaacaaggaggcgctgggatatcaaacttgcaaaaaaaaaaaaaaaacaaaanaaaacaaaaaaactagacaaggagagaggcactagaactccagctggaagtcacggagtggctcgagcagccttgggaagaggcaaggagcttctgaagaaactgcctctgcacacacatcactggctgtgacccctcaggctagcccttctccactctgggggaggaggtgggaagggccaccaggcccccagctgccaggccagctgaccccagccttcctggaacagggagtctgcaggagcgcagacaggcacagccctggagcaggcaggccgagggctgcggcactggagcaggctgacttacatgctccacatgggacctgtgtcacccaatgagatgtttgttactctggtaaatgccacacgttaacacaataacacccattcctgggaccgtggggatttagggcacgtcactgcagacacgctctgcagcattcaccgacagtctgtcatgcacccaccacgttggccatgtccttgtgttcctatcggatgctcccagtaaccagggggaccacccgagctaatcatggaatgtctgttcccagcaaacacgataaagaaagattgtgcactttaacctctctcatcagggcccaagggctggctgggatttttttttttttttttcccactaactttgtttctgaccaaagtgaattggaggcattctgctaaaagacatccccgtagacataggggagagagttgctggctgagggcttcccttggcttccagaaggcagccttccatccagacaagccagtgagctctccccttgggatcactggggtgatcagtcagcagattgattctcattcataagatcattcctccctttaaattgagcccctaagagcactggcctgggagtcagacagacctgggttcaagtcctcagtcccctgcccactccctacgtgactttgatcaggtcactagtgtctctctgagcctcagtttcccctctgtaacttggggttgaactaaaacacctgtcctgcctacctcacaaggtcactctgaggattgaaacttgatcttgtccaggaaagctttgtaccaaacagtgaagccgccctgatccgtgaggtatgagtatgactctgaccttcagccctccctacagccgggggtgtggcccagagaagcttccagcacagccctctacccagaacatccgggctggagggaggctcccagtgacttttctgacattcctagacaggttcattctttgctcaagaaaggcctgaatgacaatgtccaggatgtctgcacaactgagcagctcgctcactccctaaagaaacctattggcagcttcaacaggcaggcaataatctcttcccagaaccactgcagtcaggaataaactgttttctccaccaggctttgacaaaagggcccacaggaatcttaccaatgccaacatttcaaagcaccctatttcacgtagcatagctttctgctccccttccccaaagagaggttatggaggtactgtagcttttagggaaaaaaaaatgttaacacatcacaggtcaagttgaagtcattctctgtttaggcactaaaaatcggtgttgtcactcactgtgtattaccagtatttacttgctttcttgatttcaccaaaaccaaatttaatttaaaggaccacattaatttttcaaagggaaagagacaattaattgtacataatgtatacacacacaaaaaaaaaaatacctgtagaaatattattccagcatagcaggaaaacaaacaaaagtattggactgtcggaggtgagcctgtgcgtctgtaaccctttgtgactcctgagcgtgcgctgtcttctaggttaactcacgaagtacattctctgtcttactgatactgtaggttcacccatttttttttaatttcctcgcaaataacaagacccacagaagtgactctagctacttaatggttctgttcttttatatgcagcaaacacaccgtccatttctgaagaggcttcggcctgaaggcattttccaatgatgttagtgcacaaaacgctttaaattagactggaactgccagaatcaaatgtaaatgaggaatttctcgtacccctactgcatggtatcgatttttaataaattgttgcaaatttgtttttatgaataaaaggaaaaaacctgtcgtctttaatgcc

SEQ ID NO: 432809 - DNA, 3442 bp, Homo sapiens
  misc_feature (1245)..(1245): n is a, c, g, or t
gcggcactagggcagggcacaagtggggacagatggtgacatccagaagacccggctgacagcaaggcccccgaccctccctccctgcagcccacctcctgagtaaccctccactccacagcttctcagagcagcctgtgtgtgccaccccttggtaacgatcatctctcccctttctgttcaccatttcagttgttcggttgtttcttagcttgggagacccgcaacgtcagcatccccgcactcaacgacagcaagtacatcgggatgagtgtctacaacgtggggatcatgtgcatcatcggggccgctgtctccttcctgacccgggaccagcccaatgtgcagttctgcatcgtggctctggtcatcatcttctgcagcaccatcaccctctgcctggtattcgtgccgaagctcatcaccctgagaacaaacccagatgcagcaacgcagaacaggcgattccagttcactcagaatcagaagaaagaagattctaaaacgtccacctcggtcaccagtgtgaaccaagccagcacatcccgcctggagggcctacagtcagaaaaccatcgcctgcgaatgaagatcacagagctggataaagacttggaagaggtcaccatgcagctgcaggacacaccagaaaagaccacctacattaaacagaaccactaccaagagctcaatgacatcctcaacctgggaaacttcactgagagcacagatggaggaaaggccattttaaaaaatcacctcgatcaaaatccccagctacagtggaacacaacagagccctctcgaacatgcaaagatcctatagaagatataaactctccagaacacatccagcgtcggctgtccctccagctccccatcctccaccacgcatgtgccaccctccttccgagtcatggtctcgggcctgtaagggtgggaggcctgggcccggggcctcccccgtgacagaaccacactgggcagaggggtctgctgcagaaacactgtcggctctggctgcggagaagctgggcaccatggctggcctctcaggaccactcggatggcactcaggtggacaggacggggcagggggagacttggcacctgacctcgagccttatttgtgaagtccttatttcttcacaaagaagaggaacggaaatgggacgtcttccttaacatctgcaaacaaggaggcgctgggatatcaaacttgcaaaaaaaaaaaaaaaacaaaanaaaacaaaaaaactagacaaggagagaggcactagaactccagctggaagtcacggagtggctcgagcagccttgggaagaggcaaggagcttctgaagaaactgcctctgcacacacatcactggctgtgacccctcaggctagcccttctccactctgggggaggaggtgggaagggccaccaggcccccagctgccaggccagctgaccccagccttcctggaacagggagtctgcaggagcgcagacaggcacagccctggagcaggcaggccgagggctgcggcactggagcaggctgacttacatgctccacatgggacctgtgtcacccaatgagatgtttgttactctggtaaatgccacacgttaacacaataacacccattcctgggaccgtggggatttagggcacgtcactgcagacacgctctgcagcattcaccgacagtctgtcatgcacccaccacgttggccatgtccttgtgttcctatcggatgctcccagtaaccagggggaccacccgagctaatcatggaatgtctgttcccagcaaacacgataaagaaagattgtgcactttaacctctctcatcagggcccaagggctggctgggatttttttttttttttttcccactaactttgtttctgaccaaagtgaattggaggcattctgctaaaagacatccccgtagacataggggagagagttgctggctgagggcttcccttggcttccagaaggcagccttccatccagacaagccagtgagctctccccttgggatcactggggtgatcagtcagcagattgattctcattcataagatcattcctccctttaaattgagcccctaagagcactggcctgggagtcagacagacctgggttcaagtcctcagtcccctgcccactccctacgtgactttgatcaggtcactagtgtctctctgagcctcagtttcccctctgtaacttggggttgaactaaaacacctgtcctgcctacctcacaaggtcactctgaggattgaaacttgatcttgtccaggaaagctttgtaccaaacagtgaagccgccctgatccgtgaggtatgagtatgactctgaccttcagccctccctacagccgggggtgtggcccagagaagcttccagcacagccctctacccagaacatccgggctggagggaggctcccagtgacttttctgacattcctagacaggttcattctttgctcaagaaaggcctgaatgacaatgtccaggatgtctgcacaactgagcagctcgctcactccctaaagaaacctattggcagcttcaacaggcaggcaataatctcttcccagaaccactgcagtcaggaataaactgttttctccaccaggctttgacaaaagggcccacaggaatcttaccaatgccaacatttcaaagcaccctatttcacgtagcatagctttctgctccccttccccaaagagaggttatggaggtactgtagcttttagggaaaaaaaaatgttaacacatcacaggtcaagttgaagtcattctctgtttaggcactaaaaatcggtgttgtcactcactgtgtattaccagtatttacttgctttcttgatttcaccaaaaccaaatttaatttaaaggaccacattaatttttcaaagggaaagagacaattaattgtacataatgtatacacacacaaaaaaaaaaatacctgtagaaatattattccagcatagcaggaaaacaaacaaaagtattggactgtcggaggtgagcctgtgcgtctgtaaccctttgtgactcctgagcgtgcgctgtcttctaggttaactcacgaagtacattctctgtcttactgatactgtaggttcacccatttttttttaatttcctcgcaaataacaagacccacagaagtgactctagctacttaatggttctgttcttttatatgcagcaaacacaccgtccatttctgaagaggcttcggcctgaaggcattttccaatgatgttagtgcacaaaacgctttaaattagactggaactgccagaatcaaatgtaaatgaggaatttctcgtacccctactgcatggtatcgatttttaataaattgttgcaaatttgtttttatgaataaaaggaaaaaacctgtcgtctttaatgcc

SEQ ID NO: 432810 - DNA, 764 bp, Homo sapiens
aatccaggcttcatctcttattaagtttattatattgagcaagttacttagcccttttaagcctcagtttgctcatccataaaataagaataataacaatatttgcttttatatgagacactgcctctgaaaccatcaacctagaggcaggcacagagtaagtgttcattaaatgttagctattcctctcattgttgttactactgtggttcctcctgataattaagtatgtggacaaagcgctatggagtaattagttgtgctgcaggagttagagaggacttcatggaggaggtgacaattgatcgagatgtttaaggattattagaagtttgccaaatagaaagaatagggtattccagacaaaagaactagcacctacagagacctggagggtgaaaatcacagctcggccagggactaggagtggccaaacttcaacaaaatgcacatatgtgtttggggagtgataaggtcaagcttgtgaaaggccttgaatgtcacacagaggagcttggctggatttatcctgtgggtgatggggaatcgcaggagactctccggctggggggttcatgatgcaggttccccctatgacctgggcccccagttgctgcgtgggaagctgtctctcacatcggctcccctctgctccttcccgctctgtagatcatcaaggaccagaaactgcttgtgatcgtggggggcatgctgctgatcgacctgtgtatcctgatctgctggcaggctgtggaccccctgcg

SEQ ID NO: 432811 - DNA, 5041 bp, Homo sapiens
  misc_feature (2844)..(2844): n is a, c, g, or t
agggaagaaacagtgctgggagaactgagggagagcagggaaggctccctggaggaggtgtctgtgagtaggcctggacaaatgagtaggaagtatgatcccagaagtaagaaatgctgcatcctctcccactcaaagactcgagctggggccccagcacccccgacccctgacagatgtgatttcaacttgtggactgatcagaggtgccatattgacatgaggagacatgatttctgcagtgagctttcttttgctgcaaccacgcctgttctagccgataagaaaaaatacccttatttctttcggaccgtcccatcagacaatgcggtgaatccagccattctgaagttgctcaagcactaccagtggaagcgcgtgggcacgctgacgcaagacgttcagaggttctctgaggtgcggaatgacctgactggagttctgtatggcgaggacattgagatttcagacaccgagagcttctccaacgatccctgtaccagtgtcaaaaagctgaaggggaatgatgtgcggatcatccttggccagtttgaccagaatatggcagcaaaagtgttctgttgtgcatacgaggagaacatgtatggtagtaaatatcagtggatcattccgggctggtacgagccttcttggtgggagcaggtgcacacggaagccaactcatcccgctgcctccggaagaatctgcttgctgccatggagggctacattggcgtggatttcgagcccctgagctccaagcagatcaagaccatctcaggaaagactccacagcagtatgagagagagtacaacaacaagcggtcaggcgtggggcccagcaagttccacgggtacgcctacgatggcatctgggtcatcgccaagacactgcagagggccatggagacactgcatgccagcagccggcaccagcggatccaggacttcaactacacggaccacacgctgggcaggatcatcctcaatgccatgaacgagaccaacttcttcggggtcacgggtcaagttgtattccggaatggggagagaatggggaccattaaatttactcaatttcaagacagcagggaggtgaaggtgggagagtacaacgctgtggccgacacactggagatcatcaatgacaccatcaggttccaaggatccgaaccaccaaaagacaagaccatcatcctggagcagctgcggaagatctccctacctctctacagcatcctctctgccctcaccatcctcgggatgatcatggccagtgcttttctcttcttcaacatcaagaaccggaatcagaagctcataaagatgtcgagtccatacatgaacaaccttatcatccttggagggatgctctcctatgcttccatatttctctttggccttgatggatcctttgtctctgaaaagacctttgaaacactttgcaccgtcaggacctggattctcaccgtgggctacacgaccgcttttggggccatgtttgcaaagacctggagagtccacgccatcttcaaaaatgtgaaaatgaagaagaagatcatcaaggaccagaaactgcttgtgatcgtggggggcatgctgctgatcgacctgtgtatcctgatctgctggcaggctgtggaccccctgcgaaggacagtggagaagtacagcatggagccggacccagcaggacgggatatctccatccgccctctcctggagcactgtgagaacacccatatgaccatctggcttggcatcgtctatgcctacaagggacttctcatgttgttcggttgtttcttagcttgggagacccgcaacgtcagcatccccgcactcaacgacagcaagtacatcgggatgagtgtctacaacgtggggatcatgtgcatcatcggggccgctgtctccttcctgacccgggaccagcccaatgtgcagttctgcatcgtggctctggtcatcatcttctgcagcaccatcaccctctgcctggtattcgtgccgaagctcatcaccctgagaacaaacccagatgcagcaacgcagaacaggcgattccagttcactcagaatcagaagaaagaagattctaaaacgtccacctcggtcaccagtgtgaaccaagccagcacatcccgcctggagggcctacagtcagaaaaccatcgcctgcgaatgaagatcacagagctggataaagacttggaagaggtcaccatgcagctgcaggacacaccagaaaagaccacctacattaaacagaaccactaccaagagctcaatgacatcctcaacctgggaaacttcactgagagcacagatggaggaaaggccattttaaaaaatcacctcgatcaaaatccccagctacagtggaacacaacagagccctctcgaacatgcaaagatcctatagaagatataaactctccagaacacatccagcgtcggctgtccctccagctccccatcctccaccacgcatgtgccaccctccttccgagtcatggtctcgggcctgtaagggtgggaggcctgggcccggggcctcccccgtgacagaaccacactgggcagaggggtctgctgcagaaacactgtcggctctggctgcggagaagctgggcaccatggctggcctctcaggaccactcggatggcactcaggtggacaggacggggcagggggagacttggcacctgacctcgagccttatttgtgaagtccttatttcttcacaaagaagaggaacggaaatgggacgtcttccttaacatctgcaaacaaggaggcgctgggatatcaaacttgcaaaaaaaaaaaaaaaacaaaanaaaacaaaaaaactagacaaggagagaggcactagaactccagctggaagtcacggagtggctcgagcagccttgggaagaggcaaggagcttctgaagaaactgcctctgcacacacatcactggctgtgacccctcaggctagcccttctccactctgggggaggaggtgggaagggccaccaggcccccagctgccaggccagctgaccccagccttcctggaacagggagtctgcaggagcgcagacaggcacagccctggagcaggcaggccgagggctgcggcactggagcaggctgacttacatgctccacatgggacctgtgtcacccaatgagatgtttgttactctggtaaatgccacacgttaacacaataacacccattcctgggaccgtggggatttagggcacgtcactgcagacacgctctgcagcattcaccgacagtctgtcatgcacccaccacgttggccatgtccttgtgttcctatcggatgctcccagtaaccagggggaccacccgagctaatcatggaatgtctgttcccagcaaacacgataaagaaagattgtgcactttaacctctctcatcagggcccaagggctggctgggatttttttttttttttttcccactaactttgtttctgaccaaagtgaattggaggcattctgctaaaagacatccccgtagacataggggagagagttgctggctgagggcttcccttggcttccagaaggcagccttccatccagacaagccagtgagctctccccttgggatcactggggtgatcagtcagcagattgattctcattcataagatcattcctccctttaaattgagcccctaagagcactggcctgggagtcagacagacctgggttcaagtcctcagtcccctgcccactccctacgtgactttgatcaggtcactagtgtctctctgagcctcagtttcccctctgtaacttggggttgaactaaaacacctgtcctgcctacctcacaaggtcactctgaggattgaaacttgatcttgtccaggaaagctttgtaccaaacagtgaagccgccctgatccgtgaggtatgagtatgactctgaccttcagccctccctacagccgggggtgtggcccagagaagcttccagcacagccctctacccagaacatccgggctggagggaggctcccagtgacttttctgacattcctagacaggttcattctttgctcaagaaaggcctgaatgacaatgtccaggatgtctgcacaactgagcagctcgctcactccctaaagaaacctattggcagcttcaacaggcaggcaataatctcttcccagaaccactgcagtcaggaataaactgttttctccaccaggctttgacaaaagggcccacaggaatcttaccaatgccaacatttcaaagcaccctatttcacgtagcatagctttctgctccccttccccaaagagaggttatggaggtactgtagcttttagggaaaaaaaaatgttaacacatcacaggtcaagttgaagtcattctctgtttaggcactaaaaatcggtgttgtcactcactgtgtattaccagtatttacttgctttcttgatttcaccaaaaccaaatttaatttaaaggaccacattaatttttcaaagggaaagagacaattaattgtacataatgtatacacacacaaaaaaaaaaatacctgtagaaatattattccagcatagcaggaaaacaaacaaaagtattggactgtcggaggtgagcctgtgcgtctgtaaccctttgtgactcctgagcgtgcgctgtcttctaggttaactcacgaagtacattctctgtcttactgatactgtaggttcacccatttttttttaatttcctcgcaaataacaagacccacagaagtgactctagctacttaatggttctgttcttttatatgcagcaaacacaccgtccatttctgaagaggcttcggcctgaaggcattttccaatgatgttagtgcacaaaacgctttaaattagactggaactgccagaatcaaatgtaaatgaggaatttctcgtacccctactgcatggtatcgatttttaataaattgttgcaaatttgtttttatgaataaaaggaaaaaacctgtcgtctttaatgcc

SEQ ID NO: 432812 - DNA, 2510 bp, Homo sapiens
gccgcccctgagcagcctcgccttcgcctcccgcgtttcctgccgtccgccctcccccggccgagctccaggggctgccgcctagcagctcccggcgggagagcggttcagagcgcgcacgggggcgggcggaggcggcccggtgcggggcggccgcgctggagagaggcgcgcgcggagacgccggcccccctctccgcgtttgctcgcttgctccccgcctcccgcactccgctcgctcccaccccttcccggcgtgattgatccgtcacgggcgccgccgctgccgccgccgccgcggccgttctgagccgagccggaaccctagcccgagacggagccggggcccgggccggcgccattgcgcgggcgccgcgggaagaccttggcgcggggcggcgggccgggccaggccatgcgggccgagtgagccggcgcccgcagcccgcggcgcggcatggcttccccgcggagctccgggcagcccgggccgccgccgccgccgccaccgccgcccgcgcgcctgctactgctactgctgctgccgctgctgctgcctctggcgcccggggcctggggctgggcgcggggcgccccccggccgccgcccagcagcccgccgctctccatcatgggcctcatgccgctcaccaaggaggtggccaagggcagcatcgggcgcggtgtgctccccgccgtggaactggccatcgagcagatccgcaacgagtcactcctgcgcccctacttcctcgacctgcggctctatgacacggagtgcgacaacgcaaaagggttgaaagccttctacgatgcaataaaatacgggccgaaccacttgatggtgtttggaggcgtctgtccatccgtcacatccatcattgcagagtccctccaaggctggaatctggtgcagctttcttttgctgcaaccacgcctgttctagccgataagaaaaaatacccttatttctttcggaccgtcccatcagacaatgcggtgaatccagccattctgaagttgctcaagcactaccagtggaagcgcgtgggcacgctgacgcaagacgttcagaggttctctgaggtgcggaatgacctgactggagttctgtatggcgaggacattgagatttcagacaccgagagcttctccaacgatccctgtaccagtgtcaaaaagctgaaggggaatgatgtgcggatcatccttggccagtttgaccagaatatggcagcaaaagtgttctgttgtgcatacgaggagaacatgtatggtagtaaatatcagtggatcattccgggctggtacgagccttcttggtgggagcaggtgcacacggaagccaactcatcccgctgcctccggaagaatctgcttgctgccatggagggctacattggcgtggatttcgagcccctgagctccaagcagatcaagaccatctcaggaaagactccacagcagtatgagagagagtacaacaacaagcggtcaggcgtggggcccagcaagttccacgggtacgcctacgatggcatctgggtcatcgccaagacactgcagagggccatggagacactgcatgccagcagccggcaccagcggatccaggacttcaactacacggaccacacgctgggcaggatcatcctcaatgccatgaacgagaccaacttcttcggggtcacgggtcaagttgtattccggaatggggagagaatggggaccattaaatttactcaatttcaagacagcagggaggtgaaggtgggagagtacaacgctgtggccgacacactggagatcatcaatgacaccatcaggttccaaggatccgaaccaccaaaagacaagaccatcatcctggagcagctgcggaagatctccctacctctctacagcatcctctctgccctcaccatcctcgggatgatcatggccagtgcttttctcttcttcaacatcaagaaccggaatcagaagctcataaagatgtcgagtccatacatgaacaaccttatcatccttggagggatgctctcctatgcttccatatttctctttggccttgatggatcctttgtctctgaaaagacctttgaaacactttgcaccgtcaggacctggattctcaccgtgggctacacgaccgcttttggggccatgtttgcaaagacctggagagtccacgccatcttcaaaaatgtgaaaatgaagaagaagatcatcaaggaccagaaactgcttgtgatcgtggggggcatgctgctgatcgacctgtgtatcctgatctgctggcaggctgtggaccccctgcgaaggacagtggagaagtacagcatggaggtaagccctccatgccggcaggagggaagcctgcagatgcagcccctggcacatgaggacagtgaggctgcacagctcccagactgcccagtaccccactgggaacacttcatcagttccatttccttccatttgagacatgtaattccagggaggccaa

SEQ ID NO: 432813 - DNA, 222 bp, Homo sapiens
taccggcgctgcagccacgctggctcttgttctcttcctcatgtcctattagctgacctgacactaaatctgtcacctgctttatgacatgcttaccttattattttataagctcctctacatccctgtaaggagagtggtattgccccatcacacagaaactgacagagacactgacatgggaaactgagtggggaagtgtggccagcgtctcagcttggg

SEQ ID NO: 432814 - DNA, 2913 bp, Homo sapiens
tccgcagcggctcaggctcagtcgctcagtcagtctcgggctgtccggccagggtggttggtggtaaggattcaggctccgtcctaacgaggccgtggcctgaggctcagggccccccgcccctccctcccagcccaccagcgtcacctcccagccccgagctggaccgcacaccttgggacacggttttccacttcctaaggacgagccccagactggaggagaggtccgaggaggtgggcgttggactctttgcgaggaccccggcggctggcccgggggaggcggccgaggcggcggcggcggcggccgggggcgacatggcggaggagcaggacctatcggaggtggagctgagccccgtgggctcggaggagccccgctgcctgtccccggggagcgcgccctcgctagggcccgacggcggcggcggcggatcgggcctgcgagccagcccggggccaggcgagctgggcaaggtcaagaaggagcagcaggacggcgaggcggacgatgacaagttccccgtgtgcatccgcgaggccgtcagccaggtgctcagcggctacgactggacgctggtgcccatgcccgtgcgcgtcaacggcgccagcaaaagcaagccgcacgtcaagcggcccatgaacgccttcatggtgtgggctcaggcagcgcgcaggaagctcgcggaccagtacccgcacctgcacaacgctgagctcagcaagacgctgggcaagctctggaggctgctgaacgaaagtgacaagcgccccttcatcgaggaggctgagcggctccgtatgcagcacaagaaagaccacccggactacaagtaccagcccaggcggcggaagaacgggaaggccgcccagggcgaggcggagtgccccggtggggaggccgagcaaggtgggaccgccgccatccaggcccactacaagagcgcccacttggaccaccggcacccaggagagggctcccccatgtcagatgggaaccccgagcacccctcaggccagagccatggcccacccacccctccaaccaccccgaagacagagctgcagtcgggcaaggcagacccgaagcgggacgggcgctccatgggggagggcgggaagcctcacatcgacttcggcaacgtggacattggtgagatcagccacgaggtaatgtccaacatggagacctttgatgtggctgagttggaccagtacctgccgcccaatgggcacccaggccatgtgagcagctactcagcagccggctatgggctgggcagtgccctggccgtggccagtggacactccgcctggatctccaagccaccaggcgtggctctgcccacggtctcaccacctggtgtggatgccaaagcccaggtgaagacagagaccgcggggccccaggggcccccacactacaccgaccagccatccacctcacagatcgcctacacctccctcagcctgccccactatggctcagccttcccctccatctcccgcccccagtttgactactctgaccatcagccctcaggaccctattatggccactcgggccaggcctctggcctctactcggccttctcctatatggggccctcgcagcggcccctctacacggccatctctgaccccagcccctcagggccccagtcccacagccccacacactgggagcagccagtatatacgacactgtcccggccctaaagggggccctgtcgccaccaccccccgcccagcccctgcccccagcctgtgtgccctgttccttgcccacctcaggcctggtggtggcagtggaggaggctgaggaggctgaagaggctgacaggtcggggggctttctgtctggctcactgccctgatgacccacccgccccatccaggctccagcagcaaagccccaggagaacaggctggacagaggagaaggaggttgactgttgcacccacactgaaagatgaggggctgcaccttcccccaggaatgaccctctatcccaggacctgagaagggcctgctcaccctcctcggggaggggaagcaccagggttggtggcatcggaggccttaccactcctatgactcctgttttctctctcacagatagtgagggtctgacatgcccatgccacctatgccacagtgcctaagggctaggccacccagagactgtgcccggagctggccgtgtctcccactcaggggctgagagtagctttgaggagcctcattggggagtggggggttcgagggacttagtggagttctcatcccttcaatgccccctccctttctgaaggcaggaaggagttggcacagaggccccctgatccaattctgtgccaataacctcattctttgtctgagaaacagcccccagtcctcctccactacaacctccatgaccttgagacgcatcccaggaggtgacgaggcaggggctccaggaaaggaatcagagacaattcacagagcctccctccctgggctccttgccagctccctcttcccttactaggctctatggcccctgctcagtcagccccactccctgggcttcccagagagtgacagctgctcaggccctaacccttggctccaggagacacagggcccagcacccaggttgctgtcggcaggctgaagacactagaatcctgacctgtacattctgcccttgcctcttaccccttgcctcccagtggtatttgaataaagtatgtagctatatctgcccctattttcctgttctgcagccccccaaatccacatgtaactcattactgtctcctgttatttatctcagtagtcccctctcctagccactctagcccctattaactctgcattaagcattccacataataaaattaaaggttccggttacctgctgta

SEQ ID NO: 432815 - DNA, 4482 bp, Homo sapiens
gggggggtgaagggtcactgctgaccggaggcagctctgccaggcagtgtcatcagtgggcttcacgtttgactgacagcccaccagcgtcacctcccagccccgagctggaccgcacaccttgggacacggttttccacttcctaaggacgagccccagactggaggagaggtccgaggaggtgggcgttggactctttgcgaggaccccggcggctggcccgggggaggcggccgaggcggcggcggcggcggccgggggcgacatggcggaggagcaggacctatcggaggtggagctgagccccgtgggctcggaggagccccgctgcctgtccccggggagcgcgccctcgctagggcccgacggcggcggcggcggatcgggcctgcgagccagcccggggccaggcgagctgggcaaggtcaagaaggagcagcaggacggcgaggcggacgatgacaagttccccgtgtgcatccgcgaggccgtcagccaggtgctcagcggctacgactggacgctggtgcccatgcccgtgcgcgtcaacggcgccagcaaaagcaagccgcacgtcaagcggcccatgaacgccttcatggtgtgggctcaggcagcgcgcaggaagctcgcggaccagtacccgcacctgcacaacgctgagctcagcaagacgctgggcaagctctggaggctgctgaacgaaagtgacaagcgccccttcatcgaggaggctgagcggctccgtatgcagcacaagaaagaccacccggactacaagtaccagcccaggcggcggaagaacgggaaggccgcccagggcgaggcggagtgccccggtggggaggccgagcaaggtgggaccgccgccatccaggcccactacaagagcgcccacttggaccaccggcacccaggagagggctcccccatgtcagatgggaaccccgagcacccctcaggccagagccatggcccacccacccctccaaccaccccgaagacagagctgcagtcgggcaaggcagacccgaagcgggacgggcgctccatgggggagggcgggaagcctcacatcgacttcggcaacgtggacattggtgagatcagccacgaggtaatgtccaacatggagacctttgatgtggctgagttggaccagtacctgccgcccaatgggcacccaggccatgtgagcagctactcagcagccggctatgggctgggcagtgccctggccgtggccagtggacactccgcctggatctccaagccaccaggcgtggctctgcccacggtctcaccacctggtgtggatgccaaagcccaggtgaagacagagaccgcggggccccaggggcccccacactacaccgaccagccatccacctcacagatcgcctacacctccctcagcctgccccactatggctcagccttcccctccatctcccgcccccagtttgactactctgaccatcagccctcaggaccctattatggccactcgggccaggcctctggcctctactcggccttctcctatatggggccctcgcagcggcccctctacacggccatctctgaccccagcccctcagggccccagtcccacagccccacacactgggagcagccagtatatacgacactgtcccggccctaaagggggccctgtcgccaccaccccccgcccagcccctgcccccagcctgtgtgccctgttccttgcccacctcaggcctggtggtggcagtggaggaggctgaggaggctgaagaggctgacaggtcggggggctttctgtctggctcactgccctgatgacccacccgccccatccaggctccagcagcaaagccccaggagaacaggctggacagaggagaaggaggttgactgttgcacccacactgaaagatgaggggctgcaccttcccccaggaatgaccctctatcccaggacctgagaagggcctgctcaccctcctcggggaggggaagcaccagggttggtggcatcggaggccttaccactcctatgactcctgttttctctctcacagatagtgagggtctgacatgcccatgccacctatgccacagtgcctaagggctaggccacccagagactgtgcccggagctggccgtgtctcccactcaggggctgagagtagctttgaggagcctcattggggagtggggggttcgagggacttagtggagttctcatcccttcaatgccccctccctttctgaaggcaggaaggagttggcacagaggccccctgatccaattctgtgccaataacctcattctttgtctgagaaacagcccccagtcctcctccactacaacctccatgaccttgagacgcatcccaggaggtgacgaggcaggggctccaggaaaggaatcagagacaattcacagagcctccctccctgggctccttgccagctccctcttcccttactaggctctatggcccctgctcagtcagccccactccctgggcttcccagagagtgacagctgctcaggccctaacccttggctccaggagacacagggcccagcacccaggttgctgtcggcaggctgaagacactagaatcctgacctgtacattctgcccttgcctcttaccccttgcctcccagtggtatttgaataaagtatgtagctatatctgcccctattttcctgttctgcagccccccaaatccacatgtaactcattactgtctcctgttatttatctcagtagtcccctctcctagccactctagcccctattaactctgcattaagcattccacataataaaattaaaggttccggttacctgctgtatggtgagcctgacctggcctgtctcttcatctcttatccctgtactggtgcttcctcaaatgctttctggaagtagctaggagtagaatgcaaaggatagatcatcaaaggtctctctctcccacctccctccctctttccccaccacccccttccctcccccctcctctctctctcccccctcccttctctcctctctttctctctctctctcccccctccccctctcctttctctctctctcccccctcccactctcctctctctctttctgtctctctccctgctaagaaagtgggaacaatggagagtgttaggacagcgtggcatcccagtggggtccatctgagctcagggactgaagcctcagatgggaacttctccccagcccggcggctatgccccacactgcaggggggccactcactcttaactggctcagctagaactcactgccttgcaagcagcccctctgctcacccagcactcagcagacgggagtttgcaaagaattcaagagacaggtatctgaagaggaggaggtgggctgagggtgacaccgtgctgcctgcagtcagaggcctgtccttcaggatgtgtggataggccctgtgttgctgcatccccccacttgccacctcccccagcacacacacagcagcccacgccaggatctagccaagccttcacagcaggtgcccatgtccaagtccagaccaaggatgtcagacagtctactccttaagcgcctactccctaagagctctttcctcagcagaagtccaaactgcacccagaggccaggaccactccacctcacaagcacacaactccaaagactctttgccatcttgctccactgatgaacaactccgatggttggaagttcttcctcatacccagctcataacagcttatatccagctgccatttactaagtgctccaccaagggttttatgtcattcaggccagtgaaggggtaggtccgatcgttatctcaattttccagatggggaaactgaagtttgcgaggctgatgctaagaagtgctggtgccagaatctgaacccagctctgactccaaggcttgcatttttaaccatcatcccctccacctgcctgtggtttgcagcccctgcttctgctttgtatctggagcaatgcatcttccactgctccagactgggcatcctcagctcccttccttccatctgcggtctccagcccctagtcaggaccaggggagaggcagggcaccaagaagtagcccagtccccagggtggccaaaatccctccatctaggacctgcatcatggaagctcttcaagcaacctccccaaaactgctggttcccgtgaagctggatggtaaccgaaaccccgatcttttagacaatatccattgcaaagtcatatccaaattgtatgtatgctgtttttgttttgttttagataaaagcaggactttacactgatctttaacagatctcaccttgttgggtttgacccatttccccacctgtattaaactttttagaacttagctctcctttagagctttatgtatctgcaaacttgaatagcctcattcaagtcactaataaaggtcgaaatgaagaggg

SEQ ID NO: 432816 - DNA, 3549 bp, Homo sapiens
tccgcagcggctcaggctcagtcgctcagtcagtctcgggctgtccggccagggtggttggtggtaaggattcaggctccgtcctaacgaggccgtggcctgaggctcagggccccccgcccctccctcccagcccaccagcgtcacctcccagccccgagctggaccgcacaccttgggacacggttttccacttcctaaggacgagccccagactggaggagaggtccgaggaggtgggcgttggactctttgcgaggaccccggcggctggcccgggggaggcggccgaggcggcggcggcggcggccgggggcgacatggcggaggagcaggacctatcggaggtggagctgagccccgtgggctcggaggagccccgctgcctgtccccggggagcgcgccctcgctagggcccgacggcggcggcggcggatcgggcctgcgagccagcccggggccaggcgagctgggcaaggtcaagaaggagcagcaggacggcgaggcggacgatgacaagttccccgtgtgcatccgcgaggccgtcagccaggtgctcagcggctacgactggacgctggtgcccatgcccgtgcgcgtcaacggcgccagcaaaagcaagccgcacgtcaagcggcccatgaacgccttcatggtgtgggctcaggcagcgcgcaggaagctcgcggaccagtacccgcacctgcacaacgctgagctcagcaagacgctgggcaagctctggaggctgctgaacgaaagtgacaagcgccccttcatcgaggaggctgagcggctccgtatgcagcacaagaaagaccacccggactacaagtaccagcccaggcggcggaagaacgggaaggccgcccagggcgaggcggagtgccccggtggggaggccgagcaaggtgggaccgccgccatccaggcccactacaagagcgcccacttggaccaccggcacccaggagagggctcccccatgtcagatgggaaccccgagcacccctcaggccagagccatggcccacccacccctccaaccaccccgaagacagagctgcagtcgggcaaggcagacccgaagcgggacgggcgctccatgggggagggcgggaagcctcacatcgacttcggcaacgtggacattggtgagatcagccacgaggtaatgtccaacatggagacctttgatgtggctgagttggaccagtacctgccgcccaatgggcacccaggccatgtgagcagctactcagcagccggctatgggctgggcagtgccctggccgtggccagtggacactccgcctggatctccaagccaccaggcgtggctctgcccacggtctcaccacctggtgtggatgccaaagcccaggtgaagacagagaccgcggggccccaggggcccccacactacaccgaccagccatccacctcacagatcgcctacacctccctcagcctgccccactatggctcagccttcccctccatctcccgcccccagtttgactactctgaccatcagccctcaggaccctattatggccactcgggccaggcctctggcctctactcggccttctcctatatggggccctcgcagcggcccctctacacggccatctctgaccccagcccctcagggccccagtcccacagccccacacactgggagcagccagtatatacgacactgtcccggccctaaagggggccctgtcgccaccaccccccgcccagcccctgcccccagcctgtgtgccctgttccttgcccacctcaggcctggtggtggcagtggaggaggctgaggaggctgaagaggctgacaggtcggggggctttctgtctggctcactgccctgatgacccacccgccccatccaggctccagcagcaaagccccaggagaacaggctggacagaggagaaggaggttgactgttgcacccacactgaaagatgaggggctgcaccttcccccaggaatgaccctctatcccaggacctgagaagggcctgctcaccctcctcggggaggggaagcaccagggttggtggcatcggaggccttaccactcctatgactcctgttttctctctcacagatagtgagggtctgacatgcccatgccacctatgccacagtgcctaagggctaggccacccagagactgtgcccggagctggccgtgtctcccactcaggggctgagagtagctttgaggagcctcattggggagtggggggttcgagggacttagtggagttctcatcccttcaatgccccctccctttctgaaggcaggaaggagttggcacagaggccccctgatccaattctgtgccaataacctcattctttgtctgagaaacagcccccagtcctcctccactacaacctccatgaccttgagacgcatcccaggaggtgacgaggcaggggctccaggaaaggaatcagagacaattcacagagcctccctccctgggctccttgccagctccctcttcccttactaggctctatggcccctgctcagtcagccccactccctgggcttcccagagagtgacagctgctcaggccctaacccttggctccaggagacacagggcccagcacccaggttgctgtcggcaggctgaagacactagaatcctgacctgtacattctgcccttgcctcttaccccttgcctcccagtggtatttgaataaagtatgtagctatatctgcccctattttcctgttctgcagccccccaaatccacatgtaactcattactgtctcctgttatttatctcagtagtcccctctcctagccactctagcccctattaactctgcattaagcattccacataataaaattaaaggttccggttacctgctgtatggtgagcctgacctggcctgtctcttcatctcttatccctgtactggtgcttcctcaaatgctttctggaagtagctaggagtagaatgcaaaggatagatcatcaaaggtctctctctcccacctccctccctctttccccactcactcgatcgggcgccccagaaccaggcgtcatggtgggcatgggccagaaggactcctacgtgggcgacgaggcccagagcaagcgtggcatcctgaccctgaagtaccccattgagcatggcatcgtcaccaactgggacgacatggagaagatctggcaccacaccttctacaacgagctgcgcgtggccccggaggagcacccagtgctgctgaccgaggcccccctgaaccccaaggccaacagagagaagatgactcagattatgtttgagaccttcaacaccccggacatgtacgtggccatccaggccgttgctagtccctactacgcctctgtgtgcgcaccactggcatttgtcatggactctggagacggggtcacccacacggtgcccatctacgagggctacgccctcccccacgccatcactgcgtctggaccctggctggccgggacctggaccgaatacctcatgaagatcctc

SEQ ID NO: 432817 - DNA, 2856 bp, Homo sapiens
  misc_feature (2848)..(2848): n is a, c, g, or t
tccgcagcggctcaggctcagtcgctcagtcagtctcgggctgtccggccagggtggttggtggtaaggattcaggctccgtcctaacgaggccgtggcctgaggctcagggccccccgcccctccctcccagcccaccagcgtcacctcccagccccgagctggaccgcacaccttgggacacggttttccacttcctaaggacgagccccagactggaggagaggtccgaggaggtgggcgttggactctttgcgaggaccccggcggctggcccgggggaggcggccgaggcggcggcggcggcggccgggggcgacatggcggaggagcaggacctatcggaggtggagctgagccccgtgggctcggaggagccccgctgcctgtccccggggagcgcgccctcgctagggcccgacggcggcggcggcggatcgggcctgcgagccagcccggggccaggcgagctgggcaaggtcaagaaggagcagcaggacggcgaggcggacgatgacaagttccccgtgtgcatccgcgaggccgtcagccaggtgctcagcggctacgactggacgctggtgcccatgcccgtgcgcgtcaacggcgccagcaaaagcaagccgcacgtcaagcggcccatgaacgccttcatggtgtgggctcaggcagcgcgcaggaagctcgcggaccagtacccgcacctgcacaacgctgagctcagcaagacgctgggcaagctctggaggctgctgaacgaaagtgacaagcgccccttcatcgaggaggctgagcggctccgtatgcagcacaagaaagaccacccggactacaagtaccagcccaggcggcggaagaacgggaaggccgcccagggcgaggcggagtgccccggtggggaggccgagcaaggtgggaccgccgccatccaggcccactacaagagcgcccacttggaccaccggcacccaggagagggctcccccatgtcagatgggaaccccgagcacccctcaggccagagccatggcccacccacccctccaaccaccccgaagacagagctgcagtcgggcaaggcagacccgaagcgggacgggcgctccatgggggagggcgggaagcctcacatcgacttcggcaacgtggacattggtgagatcagccacgaggtaatgtccaacatggagacctttgatgtggctgagttggaccagtacctgccgcccaatgggcacccaggccatgtgagcagctactcagcagccggctatgggctgggcagtgccctggccgtggccagtggacactccgcctggatctccaagccaccaggcgtggctctgcccacggtctcaccacctggtgtggatgccaaagcccaggtgaagacagagaccgcggggccccaggggcccccacactacaccgaccagccatccacctcacagatcgcctacacctccctcagcctgccccactatggctcagccttcccctccatctcccgcccccagtttgactactctgaccatcagccctcaggaccctattatggccactcgggccaggcctctggcctctactcggccttctcctatatggggccctcgcagcggcccctctacacggccatctctgaccccagcccctcagggccccagtcccacagccccacacactgggagcagccagtatatacgacactgtcccggccctaaagggggccctgtcgccaccaccccccgcccagcccctgcccccagcctgtgtgccctgttccttgcccacctcaggcctggtggtggcagtggaggaggctgaggaggctgaagaggctgacaggtcggggggctttctgtctggctcactgccctgatgacccacccgccccatccaggctccagcagcaaagccccaggagaacaggctggacagaggagaaggaggttgactgttgcacccacactgaaagatgaggggctgcaccttcccccaggaatgaccctctatcccaggacctgagaagggcctgctcaccctcctcggggaggggaagcaccagggttggtggcatcggaggccttaccactcctatgactcctgttttctctctcacagatagtgagggtctgacatgcccatgccacctatgccacagtgcctaagggctaggccacccagagactgtgcccggagctggccgtgtctcccactcaggggctgagagtagctttgaggagcctcattggggagtggggggttcgagggacttagtggagttctcatcccttcaatgccccctccctttctgaaggcaggaaggagttggcacagaggccccctgatccaattctgtgccaataacctcattctttgtctgagaaacagcccccagtcctcctccactacaacctccatgaccttgagacgcatcccaggaggtgacgaggcaggggctccaggaaaggaatcagagacaattcacagagcctccctccctgggctccttgccagctccctcttcccttactaggctctatggcccctgctcagtcagccccactccctgggcttcccagagagtgacagctgctcaggccctaacccttggctccaggagacacagggcccagcacccaggttgctgtcgagtgagaactaaatctgactgtaatctgccttgctctacctgctccaggtttgattagtgtgctttttgcccatttccggttggccccatccatgatctttggccggttttcggccctactacctaaggtatcaaaaggggggaaaaaaaatcgaaaaaaaaaaggcgcccgggggggccaggccgtcgcgctcntattaagc

SEQ ID NO: 432818 - DNA, 2881 bp, Homo sapiens
tccgcagcggctcaggctcagtcgctcagtcagtctcgggctgtccggccagggtggttggtggtaaggattcaggctccgtcctaacgaggccgtggcctgaggctcagggccccccgcccctccctcccagcccaccagcgtcacctcccagccccgagctggaccgcacaccttgggacacggttttccacttcctaaggacgagccccagactggaggagaggtccgaggaggtgggcgttggactctttgcgaggaccccggcggctggcccgggggaggcggccgaggcggcggcggcggcggccgggggcgacatggcggaggagcaggacctatcggaggtggagctgagccccgtgggctcggaggagccccgctgcctgtccccggggagcgcgccctcgctagggcccgacggcggcggcggcggatcgggcctgcgagccagcccggggccaggcgagctgggcaaggtcaagaaggagcagcaggacggcgaggcggacgatgacaagttccccgtgtgcatccgcgaggccgtcagccaggtgctcagcggctacgactggacgctggtgcccatgcccgtgcgcgtcaacggcgccagcaaaagcaagccgcacgtcaagcggcccatgaacgccttcatggtgtgggctcaggcagcgcgcaggaagctcgcggaccagtacccgcacctgcacaacgctgagctcagcaagacgctgggcaagctctggaggctgctgaacgaaagtgacaagcgccccttcatcgaggaggctgagcggctccgtatgcagcacaagaaagaccacccggactacaagtaccagcccaggcggcggaagaacgggaaggccgcccagggcgaggcggagtgccccggtggggaggccgagcaaggtgggaccgccgccatccaggcccactacaagagcgcccacttggaccaccggcacccaggagagggctcccccatgtcagatgggaaccccgagcacccctcaggccagagccatggcccacccacccctccaaccaccccgaagacagagctgcagtcgggcaaggcagacccgaagcgggacgggcgctccatgggggagggcgggaagcctcacatcgacttcggcaacgtggacattggtgagatcagccacgaggtaatgtccaacatggagacctttgatgtggctgagttggaccagtacctgccgcccaatgggcacccaggccatgtgagcagctactcagcagccggctatgggctgggcagtgccctggccgtggccagtggacactccgcctggatctccaagccaccaggcgtggctctgcccacggtctcaccacctggtgtggatgccaaagcccaggtgaagacagagaccgcggggccccaggggcccccacactacaccgaccagccatccacctcacagatcgcctacacctccctcagcctgccccactatggctcagccttcccctccatctcccgcccccagtttgactactctgaccatcagccctcaggaccctattatggccactcgggccaggcctctggcctctactcggccttctcctatatggggccctcgcagcggcccctctacacggccatctctgaccccagcccctcagggccccagtcccacagccccacacactgggagcagccagtatatacgacactgtcccggccctaaagggggccctgtcgccaccaccccccgcccagcccctgcccccagcctgtgtgccctgttccttgcccacctcaggcctggtggtggcagtggaggaggctgaggaggctgaagaggctgacaggtcggggggctttctgtctggctcactgccctgatgacccacccgccccatccaggctccagcagcaaagccccaggagaacaggctggacagaggagaaggaggttgactgttgcacccacactgaaagatgaggggctgcaccttcccccaggaatgaccctctatcccaggacctgagaagggcctgctcaccctcctcggggaggggaagcaccagggttggtggcatcggaggccttaccactcctatgactcctgttttctctctcacagatagtgagggtctgacatgcccatgccacctatgccacagtgcctaagggctaggccacccagagactgtgcccggagctggccgtgtctcccactcaggggctgagagtagctttgaggagcctcattggggagtggggggttcgagggacttagtggagttctcatcccttcaatgccccctccctttctgaaggcaggaaggagttggcacagaggccccctgatccaattctgtgccaataacctcattctttgtctgagaaacagcccccagtcctcctccactacaacctccatgaccttgagacgcatcccaggaggtgacgaggcaggggctccaggaaaggaatcagagacaattcacagagcctccctccctgggctccttgccagctccctcttcccttactaggctctatggcccctgctcagtcagccccactccctgggcttcccagagagtgacagctgctcaggccctaacccttggctccagggcaggctgaagacactagaatcctgacctgtacattctgcccttgcctcttaccccttgcctcccagtggtatttgaataaagtatgtagctatatctgcccctattttcctgttctgcagccccccaaatccacatgtaactcattactgtctcctgttatttatctcagtagtcccctctcctagccactctagcccctattaactctgcattaagcattccacataataaaattaaaggttccggttacctgctgta

SEQ ID NO: 432819 - DNA, 3480 bp, Homo sapiens
tccgcagcggctcaggctcagtcgctcagtcagtctcgggctgtccggccagggtggttggtggtaaggattcaggctccgtcctaacgaggccgtggcctgaggctcagggccccccgcccctccctcccagcccaccagcgtcacctcccagccccgagctggaccgcacaccttgggacacggttttccacttcctaaggacgagccccagactggaggagaggtccgaggaggtgggcgttggactctttgcgaggaccccggcggctggcccgggggaggcggccgaggcggcggcggcggcggccgggggcgacatggcggaggagcaggacctatcggaggtggagctgagccccgtgggctcggaggagccccgctgcctgtccccggggagcgcgccctcgctagggcccgacggcggcggcggcggatcgggcctgcgagccagcccggggccaggcgagctgggcaaggtcaagaaggagcagcaggacggcgaggcggacgatgacaagttccccgtgtgcatccgcgaggccgtcagccaggtgctcagcggctacgactggacgctggtgcccatgcccgtgcgcgtcaacggcgccagcaaaagcaagccgcacgtcaagcggcccatgaacgccttcatggtgtgggctcaggcagcgcgcaggaagctcgcggaccagtacccgcacctgcacaacgctgagctcagcaagacgctgggcaagctctggaggctgctgaacgaaagtgacaagcgccccttcatcgaggaggctgagcggctccgtatgcagcacaagaaagaccacccggactacaagtaccagcccaggcggcggaagaacgggaaggccgcccagggcgaggcggagtgccccggtggggaggccgagcaaggtgggaccgccgccatccaggcccactacaagagcgcccacttggaccaccggcacccaggagagggctcccccatgtcagatgggaaccccgagcacccctcaggccagagccatggcccacccacccctccaaccaccccgaagacagagctgcagtcgggcaaggcagacccgaagcgggacgggcgctccatgggggagggcgggaagcctcacatcgacttcggcaacgtggacattggtgagatcagccacgaggtaatgtccaacatggagacctttgatgtggctgagttggaccagtacctgccgcccaatgggcacccaggccatgtgagcagctactcagcagccggctatgggctgggcagtgccctggccgtggccagtggacactccgcctggatctccaagccaccaggcgtggctctgcccacggtctcaccacctggtgtggatgccaaagcccaggtgaagacagagaccgcggggccccaggggcccccacactacaccgaccagccatccacctcacagatcgcctacactccctcttcccttactaggctctatggcccctgctcagtcagccccactccctgggcttcccagagagtgacagctgctcaggccctaacccttggctccaggagacacagggcccagcacccaggttgctgtcggcaggctgaagacactagaatcctgacctgtacattctgcccttgcctcttaccccttgcctcccagtggtatttgaataaagtatgtagctatatctgcccctattttcctgttctgcagccccccaaatccacatgtaactcattactgtctcctgttatttatctcagtagtcccctctcctagccactctagcccctattaactctgcattaagcattccacataataaaattaaaggttccggttacctgctgtatggtgagcctgacctggcctgtctcttcatctcttatccctgtactggtgcttcctcaaatgctttctggaagtagctaggagtagaatgcaaaggatagatcatcaaaggtctctctctcccacctccctccctctttccccaccacccccttccctcccccctcctctctctctcccccctcccttctctcctctctttctctctctctctcccccctccccctctcctttctctctctctcccccctcccactctcctctctctctttctgtctctctccctgctaagaaagtgggaacaatggagagtgttaggacagcgtggcatcccagtggggtccatctgagctcagggactgaagcctcagatgggaacttctccccagcccggcggctatgccccacactgcaggggggccactcactcttaactggctcagctagaactcactgccttgcaagcagcccctctgctcacccagcactcagcagacgggagtttgcaaagaattcaagagacaggtatctgaagaggaggaggtgggctgagggtgacaccgtgctgcctgcagtcagaggcctgtccttcaggatgtgtggataggccctgtgttgctgcatccccccacttgccacctcccccagcacacacacagcagcccacgccaggatctagccaagccttcacagcaggtgcccatgtccaagtccagaccaaggatgtcagacagtctactccttaagcgcctactccctaagagctctttcctcagcagaagtccaaactgcacccagaggccaggaccactccacctcacaagcacacaactccaaagactctttgccatcttgctccactgatgaacaactccgatggttggaagttcttcctcatacccagctcataacagcttatatccagctgccatttactaagtgctccaccaagggttttatgtcattcaggccagtgaaggggtaggtccgatcgttatctcaattttccagatggggaaactgaagtttgcgaggctgatgctaagaagtgctggtgccagaatctgaacccagctctgactccaaggcttgcatttttaaccatcatcccctccacctgcctgtggtttgcagcccctgcttctgctttgtatctggagcaatgcatcttccactgctccagactgggcatcctcagctcccttccttccatctgcggtctccagcccctagtcaggaccaggggagaggcagggcaccaagaagtagcccagtccccagggtggccaaaatccctccatctaggacctgcatcatggaagctcttcaagcaacctccccaaaactgctggttcccgtgaagctggatggtaaccgaaaccccgatcttttagacaatatccattgcaaagtcatatccaaattgtatgtatgctgtttttgttttgttttagataaaagcaggactttacactgatctttaacagatctcaccttgttgggtttgacccatttccccacctgtattaaactttttagaacttagctctcctttagagctttatgtatctgcaaacttgaatagcctcattcaagtcactaataaaggtcgaaatgaagaggg

SEQ ID NO: 432820 - DNA, 1785 bp, Homo sapiens
tccgcagcggctcaggctcagtcgctcagtcagtctcgggctgtccggccagggtggttggtggtaaggattcaggctccgtcctaacgaggccgtggcctgaggctcagggccccccgcccctccctcccagcccaccagcgtcacctcccagccccgagctggaccgcacaccttgggacacggttttccacttcctaaggacgagccccagactggaggagaggtccgaggaggtgggcgttggactctttgcgaggaccccggcggctggcccgggggaggcggccgaggcggcggcggcggcggccgggggcgacatggcggaggagcaggacctatcggaggtggagctgagccccgtgggctcggaggagccccgctgcctgtccccggggagcgcgccctcgctagggcccgacggcggcggcggcggatcgggcctgcgagccagcccggggccaggcgagctgggcaaggtcaagaaggagcagcaggacggcgaggcggacgatgacaagttccccgtgtgcatccgcgaggccgtcagccaggtgctcagcggctacgactggacgctggtgcccatgcccgtgcgcgtcaacggcgccagcaaaagcaagccgcacgtcaagcggcccatgaacgccttcatggtgtgggctcaggcagcgcgcaggaagctcgcggaccagtacccgcacctgcacaacgctgagctcagcaagacgctgggcaagctctggaggctgctgaacgaaagtgacaagcgccccttcatcgaggaggctgagcggctccgtatgcagcacaagaaagaccacccggactacaagtaccagcccaggcggcggaagaacgggaaggccgcccagggcgaggcggagtgccccggtggggaggccgagcaaggtgggaccgccgccatccaggcccactacaagagcgcccacttggaccaccggcacccaggagagggctcccccatgtcagatgggaaccccgagcacccctcaggccagagccatggcccacccacccctccaaccaccccgaagacagagctgcagtcgggcaaggcagacccgaagcgggacgggcgctccatgggggagggcgggaagcctcacatcgacttcggcaacgtggacattggtgagatcagccacgagatggggaaactgaagtttgcgaggctgatgctaagaagtgctggtgccagaatctgaacccagctctgactccaaggcttgcatttttaaccatcatcccctccacctgcctgtggtttgcagcccctgcttctgctttgtatctggagcaatgcatcttccactgctccagactgggcatcctcagctcccttccttccatctgcggtctccagcccctagtcaggaccaggggagaggcagggcaccaagaagtagcccagtccccagggtggccaaaatccctccatctaggacctgcatcatggaagctcttcaagcaacctccccaaaactgctggttcccgtgaagctggatggtaaccgaaaccccgatcttttagacaatatccattgcaaagtcatatccaaattgtatgtatgctgtttttgttttgttttagataaaagcaggactttacactgatctttaacagatctcaccttgttgggtttgacccatttccccacctgtattaaactttttagaacttagctctcctttagagctttatgtatctgcaaacttgaatagcctcattcaagtcactaataaaggtcgaaatgaagaggg

SEQ ID NO: 432821 - DNA, 1397 bp, Homo sapiens
tccgcagcggctcaggctcagtcgctcagtcagtctcgggctgtccggccagggtggttggtggtaaggattcaggctccgtcctaacgaggccgtggcctgaggctcagggccccccgcccctccctcccagcccaccagcgtcacctcccagccccgagctggaccgcacaccttgggacacggttttccacttcctaaggacgagccccagactggaggagaggtccgaggaggtgagtgcgcagcctgctcctccctggcccgcccaggcctgggaccctgctgtgaggtggagagaggcgacaccccgcccttgccccccacctggctctcctctaaaccccgttggggcaggctgagggaagaaggaaaggtggagcgttaggactctttgctgaggacccctggacggcttggcccaggggagcaggtcgtgccgaggcgggcgacgcgtgcagagcgagcacgatgggcgacaatgggccggaaagaggcagggacctactcggagcgtcggcagctgagcccccgtgggcatcgaggagggaaggcaccgcgaattgaccctgatccacacgggggaagaccgcagtcacccaatacggacataagggggcaccccagactgaggcggtacggacgggcggaatcggggaccaagacggagaccgagcacgcgggaggacccaggagacgaaacttggagacaaagggtccaaacaaaaggaagcgcaggcagggcacgggcggaagggccgggcacgggaagcgcaccgagagagtatcgccacgttgccttgcgaaccccgacagaaggatccgcaccagaagcccgagggtggcctccaagtcggtctatcacggaacactgagcccagccttgtagtggcccacagtgaccccaggtagcaggcgatcaccagccacgacggacaccggacacaaaggcaaagcgcccggcgacggtcagaggccgggacccacaagtgaaacaggcccatatccagtgcggtggtggaggcgtacagcgggcggagcagcgctgcaaggcacaggcctcggaagggaacacaagataaccccggaacacgctggagccagacgcgggcacgatggactccaggcaagagggagcagagtagggggcgacagagctacctgggaacgggccacgggcagcagggcacagcggctgagcagaaagccggccgacagatatcagaatgcaaggggaagggaattgacaacaggcggacaacgagatgaatagcaggccgagcagaggacaacaggagacaagccgcagaggagcgattgcaggaggagtacacccaggccacgacaagggcagaggacgtagacaggacaccggggtgaacaaggcccgaccccga

SEQ ID NO: 432822 - DNA, 333 bp, Homo sapiens
aaccccgagcacccctcaggtgagtgctgatgacagagctgagggtggggcaaggccagtcagtggagacaggagatggctggatggcaatgagaccctggactctagggagagcgtgccaggctgtgcagttgccccagcagagctgcaggggcccagagggagctccatgggggttccggtgccaggggaagtggctgggtgagatggctctggccagggctgatcctactgggcaaagagggccagttaaagactgtggaggccgccgggtgtggtggctcacacctgtaatcccagcactttgggaggccgaggagggcagatcacgag

SEQ ID NO: 432823 - DNA, 4536 bp, Homo sapiens
tccgcagcggctcaggctcagtcgctcagtcagtctcgggctgtccggccagggtggttggtggtaaggattcaggctccgtcctaacgaggccgtggcctgaggctcagggccccccgcccctccctcccagcccaccagcgtcacctcccagccccgagctggaccgcacaccttgggacacggttttccacttcctaaggacgagccccagactggaggagaggtccgaggaggtgggcgttggactctttgcgaggaccccggcggctggcccgggggaggcggccgaggcggcggcggcggcggccgggggcgacatggcggaggagcaggacctatcggaggtggagctgagccccgtgggctcggaggagccccgctgcctgtccccggggagcgcgccctcgctagggcccgacggcggcggcggcggatcgggcctgcgagccagcccggggccaggcgagctgggcaaggtcaagaaggagcagcaggacggcgaggcggacgatgacaagttccccgtgtgcatccgcgaggccgtcagccaggtgctcagcggctacgactggacgctggtgcccatgcccgtgcgcgtcaacggcgccagcaaaagcaagccgcacgtcaagcggcccatgaacgccttcatggtgtgggctcaggcagcgcgcaggaagctcgcggaccagtacccgcacctgcacaacgctgagctcagcaagacgctgggcaagctctggaggctgctgaacgaaagtgacaagcgccccttcatcgaggaggctgagcggctccgtatgcagcacaagaaagaccacccggactacaagtaccagcccaggcggcggaagaacgggaaggccgcccagggcgaggcggagtgccccggtggggaggccgagcaaggtgggaccgccgccatccaggcccactacaagagcgcccacttggaccaccggcacccaggagagggctcccccatgtcagatgggaaccccgagcacccctcaggccagagccatggcccacccacccctccaaccaccccgaagacagagctgcagtcgggcaaggcagacccgaagcgggacgggcgctccatgggggagggcgggaagcctcacatcgacttcggcaacgtggacattggtgagatcagccacgaggtaatgtccaacatggagacctttgatgtggctgagttggaccagtacctgccgcccaatgggcacccaggccatgtgagcagctactcagcagccggctatgggctgggcagtgccctggccgtggccagtggacactccgcctggatctccaagccaccaggcgtggctctgcccacggtctcaccacctggtgtggatgccaaagcccaggtgaagacagagaccgcggggccccaggggcccccacactacaccgaccagccatccacctcacagatcgcctacacctccctcagcctgccccactatggctcagccttcccctccatctcccgcccccagtttgactactctgaccatcagccctcaggaccctattatggccactcgggccaggcctctggcctctactcggccttctcctatatggggccctcgcagcggcccctctacacggccatctctgaccccagcccctcagggccccagtcccacagccccacacactgggagcagccagtatatacgacactgtcccggccctaaagggggccctgtcgccaccaccccccgcccagcccctgcccccagcctgtgtgccctgttccttgcccacctcaggcctggtggtggcagtggaggaggctgaggaggctgaagaggctgacaggtcggggggctttctgtctggctcactgccctgatgacccacccgccccatccaggctccagcagcaaagccccaggagaacaggctggacagaggagaaggaggttgactgttgcacccacactgaaagatgaggggctgcaccttcccccaggaatgaccctctatcccaggacctgagaagggcctgctcaccctcctcggggaggggaagcaccagggttggtggcatcggaggccttaccactcctatgactcctgttttctctctcacagatagtgagggtctgacatgcccatgccacctatgccacagtgcctaagggctaggccacccagagactgtgcccggagctggccgtgtctcccactcaggggctgagagtagctttgaggagcctcattggggagtggggggttcgagggacttagtggagttctcatcccttcaatgccccctccctttctgaaggcaggaaggagttggcacagaggccccctgatccaattctgtgccaataacctcattctttgtctgagaaacagcccccagtcctcctccactacaacctccatgaccttgagacgcatcccaggaggtgacgaggcaggggctccaggaaaggaatcagagacaattcacagagcctccctccctgggctccttgccagctccctcttcccttactaggctctatggcccctgctcagtcagccccactccctgggcttcccagagagtgacagctgctcaggccctaacccttggctccaggagacacagggcccagcacccaggttgctgtcggcaggctgaagacactagaatcctgacctgtacattctgcccttgcctcttaccccttgcctcccagtggtatttgaataaagtatgtagctatatctgcccctattttcctgttctgcagccccccaaatccacatgtaactcattactgtctcctgttatttatctcagtagtcccctctcctagccactctagcccctattaactctgcattaagcattccacataataaaattaaaggttccggttacctgctgtatggtgagcctgacctggcctgtctcttcatctcttatccctgtactggtgcttcctcaaatgctttctggaagtagctaggagtagaatgcaaaggatagatcatcaaaggtctctctctcccacctccctccctctttccccaccacccccttccctcccccctcctctctctctcccccctcccttctctcctctctttctctctctctctcccccctccccctctcctttctctctctctcccccctcccactctcctctctctctttctgtctctctccctgctaagaaagtgggaacaatggagagtgttaggacagcgtggcatcccagtggggtccatctgagctcagggactgaagcctcagatgggaacttctccccagcccggcggctatgccccacactgcaggggggccactcactcttaactggctcagctagaactcactgccttgcaagcagcccctctgctcacccagcactcagcagacgggagtttgcaaagaattcaagagacaggtatctgaagaggaggaggtgggctgagggtgacaccgtgctgcctgcagtcagaggcctgtccttcaggatgtgtggataggccctgtgttgctgcatccccccacttgccacctcccccagcacacacacagcagcccacgccaggatctagccaagccttcacagcaggtgcccatgtccaagtccagaccaaggatgtcagacagtctactccttaagcgcctactccctaagagctctttcctcagcagaagtccaaactgcacccagaggccaggaccactccacctcacaagcacacaactccaaagactctttgccatcttgctccactgatgaacaactccgatggttggaagttcttcctcatacccagctcataacagcttatatccagctgccatttactaagtgctccaccaagggttttatgtcattcaggccagtgaaggggtaggtccgatcgttatctcaattttccagatggggaaactgaagtttgcgaggctgatgctaagaagtgctggtgccagaatctgaacccagctctgactccaaggcttgcatttttaaccatcatcccctccacctgcctgtggtttgcagcccctgcttctgctttgtatctggagcaatgcatcttccactgctccagactgggcatcctcagctcccttccttccatctgcggtctccagcccctagtcaggaccaggggagaggcagggcaccaagaagtagcccagtccccagggtggccaaaatccctccatctaggacctgcatcatggaagctcttcaagcaacctccccaaaactgctggttcccgtgaagctggatggtaaccgaaaccccgatcttttagacaatatccattgcaaagtcatatccaaattgtatgtatgctgtttttgttttgttttagataaaagcaggactttacactgatctttaacagatctcaccttgttgggtttgacccatttccccacctgtattaaactttttagaacttagctctcctttagagctttatgtatctgcaaacttgaatagcctcattcaagtcactaataaaggtcgaaatgaagaggg

SEQ ID NO: 432824 - DNA, 3332 bp, Homo sapiens
tccgcagcggctcaggctcagtcgctcagtcagtctcgggctgtccggccagggtggttggtggtaaggattcaggctccgtcctaacgaggccgtggcctgaggctcagggccccccgcccctccctcccagcccaccagcgtcacctcccagccccgagctggaccgcacaccttgggacacggttttccacttcctaaggacgagccccagactggaggagaggtccgaggaggtgggcgttggactctttgcgaggaccccggcggctggcccgggggaggcggccgaggcggcggcggcggcggccgggggcgacatggcggaggagcaggacctatcggaggtggagctgagccccgtgggctcggaggagccccgctgcctgtccccggggagcgcgccctcgctagggcccgacggcggcggcggcggatcgggcctgcgagccagcccggggccaggcgagctgggcaaggtcaagaaggagcagcaggacggcgaggcggacgatgacaagttccccgtgtgcatccgcgaggccgtcagccaggtgctcagcggctacgactggacgctggtgcccatgcccgtgcgcgtcaacggcgccagcaaaagcaagccgcacgtcaagcggcccatgaacgccttcatggtgtgggctcaggcagcgcgcaggaagctcgcggaccagtacccgcacctgcacaacgctgagctcagcaagacgctgggcaagctctggaggctgctgaacgaaagtgacaagcgccccttcatcgaggaggctgagcggctccgtatgcagcacaagaaagaccacccggactacaagtaccagcccaggcggcggaagaacgggaaggccgcccagggcgaggcggagtgccccggtggggaggccgagcaaggtgggaccgccgccatccaggcccactacaagagcgcccacttggaccaccggcacccaggagagggctcccccatgtcagatgggaaccccgagcacccctcaggccagagccatggcccacccacccctccaaccaccccgaagacagagctgcagtcgggcaaggcagacccgaagcgggacgggcgctccatgggggagggcgggaagcctcacatcgacttcggcaacgtggacattggtgagatcagccacgaggtaatgtccaacatggagacctttgatgtggctgagttggaccagtacctgccgcccaatgggcacccaggccatgtgagcagctactcagcagccggctatgggctgggcagtgccctggccgtggccagtggacactccgcctggatctccaagccaccaggcgtggctctgcccacggtctcaccacctggtgtggatgccaaagcccaggtgaagacagagaccgcggggccccaggggcccccacactacaccgaccagccatccacctcacagatcgcctacacctccctcagcctgccccactatggctcagccttcccctccatctcccgcccccagtttgactactctgaccatcagccctcaggaccctattatggccactcgggccaggcctctggcctctactcggccttctcctatatggggccctcgcagcggcccctctacacggccatctctgaccccagcccctcagggccccagtcccacagccccacacactgggagcagccagtatatacgacactgtcccggccctaaagggggccctgtcgccaccaccccccgcccagcccctgcccccagcctgtgtgccctgttccttgcccacctcaggcctggtggtggcagtggaggaggctgaggaggctgaagaggctgacaggtcggggggctttctgtctggctcactgccctgatgacccacccgccccatccaggctccagcagcaaagccccaggagaacaggctggacagaggagaaggaggttgactgttgcacccacactgaaagatgaggggctgcaccttcccccaggaatgaccctctatcccaggacctgagaagggcctgctcaccctcctcggggaggggaagcaccagggttggtggcatcggaggccttaccactcctatgactcctgttttctctctcacagatagtgagggtctgacatgcccatgccacctatgccacagtgcctaagggctaggccacccagagactgtgcccggagctggccgtgtctcccactcaggggctgagagtagctttgaggagcctcattggggagtggggggttcgagggacttagtggagttctcatcccttcaatgccccctccctttctgaaggcaggaaggagttggcacagaggccccctgatccaattctgtgccaataacctcattctttgtctgagaaacagcccccagtcctcctccactacaacctccatgaccttgagacgcatcccaggaggtgacgaggcaggggctccaggaaaggaatcagagacaattcacagagcctccctccctgggctccttgccagctccctcttcccttactaggctctatggcccctgctcagtcagccccactccctgggcttcccagagagtgacagctgctcaggccctaacccttggctccaggagacacagggcccagcacccaggttgctgtcggcaggctgaagacactagaatcctgacctgtacattctgcccttgcctcttaccccttgcctcccagtggtatttgaataaagtatgtagctatatctgcccctattttcctgttctgcagccccccaaatccacatgtaactcattactgtctcctgttatttatctcagtagtcccctctcctagccactctagcccctattaactctgcattaagcattccacataataaaattaaaggttccggttacctgctgtaaaaaaaaaaaaaaaaaaaaacagaaaaaaaaaaaaaaaaaaaaaaaaaaaaacaacaaaaaacaaaaacaaaaaaaaaaaaaaaaataaaaaaaaaaaaaacacacgaggagggagacgcggcacaggataccgcgcaccggcagccagaacacccacacccgctctttgacaaccacaagcgaaggccgacccgcgacgcgcgggccggcgctttctttcacaaccacagcccgcggccgcggcgggcgcacacaccaccccaccgcccgccgcggcgacgacaccaaaccaacccccgcgacgaccctccctgagcagacaaccaccacaccccccagcacgcccggcgatacaccacacacgcgaccaaaacaccccaccaacgaatcacgcacgcacccccccgacacacacaac

SEQ ID NO: 432825 - DNA, 3564 bp, Homo sapiens
tccgcagcggctcaggctcagtcgctcagtcagtctcgggctgtccggccagggtggttggtggtaaggattcaggctccgtcctaacgaggccgtggcctgaggctcagggccccccgcccctccctcccagcccaccagcgtcacctcccagccccgagctggaccgcacaccttgggacacggttttccacttcctaaggacgagccccagactggaggagaggtccgaggaggtgggcgttggactctttgcgaggaccccggcggctggcccgggggaggcggccgaggcggcggcggcggcggccgggggcgacatggcggaggagcaggacctatcggaggtggagctgagccccgtgggctcggaggagccccgctgcctgtccccggggagcgcgccctcgctagggcccgacggcggcggcggcggatcgggcctgcgagccagcccggggccaggcgagctgggcaaggtcaagaaggagcagcaggacggcgaggcggacgatgacaagttcccctccatctcccgcccccagtttgactactctgaccatcagccctcaggaccctattatggccactcgggccaggcctctggcctctactcggccttctcctatatggggccctcgcagcggcccctctacacggccatctctgaccccagcccctcagggccccagtcccacagccccacacactgggagcagccagtatatacgacactgtcccggccctaaagggggccctgtcgccaccaccccccgcccagcccctgcccccagcctgtgtgccctgttccttgcccacctcaggcctggtggtggcagtggaggaggctgaggaggctgaagaggctgacaggtcggggggctttctgtctggctcactgccctgatgacccacccgccccatccaggctccagcagcaaagccccaggagaacaggctggacagaggagaaggaggttgactgttgcacccacactgaaagatgaggggctgcaccttcccccaggaatgaccctctatcccaggacctgagaagggcctgctcaccctcctcggggaggggaagcaccagggttggtggcatcggaggccttaccactcctatgactcctgttttctctctcacagatagtgagggtctgacatgcccatgccacctatgccacagtgcctaagggctaggccacccagagactgtgcccggagctggccgtgtctcccactcaggggctgagagtagctttgaggagcctcattggggagtggggggttcgagggacttagtggagttctcatcccttcaatgccccctccctttctgaaggcaggaaggagttggcacagaggccccctgatccaattctgtgccaataacctcattctttgtctgagaaacagcccccagtcctcctccactacaacctccatgaccttgagacgcatcccaggaggtgacgaggcaggggctccaggaaaggaatcagagacaattcacagagcctccctccctgggctccttgccagctccctcttcccttactaggctctatggcccctgctcagtcagccccactccctgggcttcccagagagtgacagctgctcaggccctaacccttggctccaggagacacagggcccagcacccaggttgctgtcggcaggctgaagacactagaatcctgacctgtacattctgcccttgcctcttaccccttgcctcccagtggtatttgaataaagtatgtagctatatctgcccctattttcctgttctgcagccccccaaatccacatgtaactcattactgtctcctgttatttatctcagtagtcccctctcctagccactctagcccctattaactctgcattaagcattccacataataaaattaaaggttccggttacctgctgtatggtgagcctgacctggcctgtctcttcatctcttatccctgtactggtgcttcctcaaatgctttctggaagtagctaggagtagaatgcaaaggatagatcatcaaaggtctctctctcccacctccctccctctttccccaccacccccttccctcccccctcctctctctctcccccctcccttctctcctctctttctctctctctctcccccctccccctctcctttctctctctctcccccctcccactctcctctctctctttctgtctctctccctgctaagaaagtgggaacaatggagagtgttaggacagcgtggcatcccagtggggtccatctgagctcagggactgaagcctcagatgggaacttctccccagcccggcggctatgccccacactgcaggggggccactcactcttaactggctcagctagaactcactgccttgcaagcagcccctctgctcacccagcactcagcagacgggagtttgcaaagaattcaagagacaggtatctgaagaggaggaggtgggctgagggtgacaccgtgctgcctgcagtcagaggcctgtccttcaggatgtgtggataggccctgtgttgctgcatccccccacttgccacctcccccagcacacacacagcagcccacgccaggatctagccaagccttcacagcaggtgcccatgtccaagtccagaccaaggatgtcagacagtctactccttaagcgcctactccctaagagctctttcctcagcagaagtccaaactgcacccagaggccaggaccactccacctcacaagcacacaactccaaagactctttgccatcttgctccactgatgaacaactccgatggttggaagttcttcctcatacccagctcataacagcttatatccagctgccatttactaagtgctccaccaagggttttatgtcattcaggccagtgaaggggtaggtccgatcgttatctcaattttccagatggggaaactgaagtttgcgaggctgatgctaagaagtgctggtgccagaatctgaacccagctctgactccaaggcttgcatttttaaccatcatcccctccacctgcctgtggtttgcagcccctgcttctgctttgtatctggagcaatgcatcttccactgctccagactgggcatcctcagctcccttccttccatctgcggtctccagcccctagtcaggaccaggggagaggcagggcaccaagaagtagcccagtccccagggtggccaaaatccctccatctaggacctgcatcatggaagctcttcaagcaacctccccaaaactgctggttcccgtgaagctggatggtaaccgaaaccccgatcttttagacaatatccattgcaaagtcatatccaaattgtatgtatgctgtttttgttttgttttagataaaagcaggactttacactgatctttaacagatctcaccttgttgggtttgacccatttccccacctgtattaaactttttagaacttagctctcctttagagctttatgtatctgcaaacttgaatagcctcattcaagtcactaataaaggtcgaaatgaagaggg

SEQ ID NO: 432826 - DNA, 1857 bp, Homo sapiens
tccgcagcggctcaggctcagtcgctcagtcagtctcgggctgtccggccagggtggttggtggtaaggattcaggctccgtcctaacgaggccgtggcctgaggctcagggccccccgcccctccctcccagcccaccagcgtcacctcccagccccgagctggaccgcacaccttgggacacggttttccacttcctaaggacgagccccagactggaggagaggtccgaggaggtgggcgttggactctttgcgaggaccccggcggctggcccgggggaggcggccgaggcggcggcggcggcggccgggggcgacatggcggaggagcaggacctatcggaggtggagctgagccccgtgggctcggaggagccccgctgcctgtccccggggagcgcgccctcgctagggcccgacggcggcggcggcggatcgggcctgcgagccagcccggggccaggcgagctgggcaaggtcaagaaggagcagcaggacggcgaggcggacgatgacaagttccccgtgtgcatccgcgaggccgtcagccaggtgctcagcggctacgactggacgctggtgcccatgcccgtgcgcgtcaacggcgccagcaaaagcaagccgcacgtcaagcggcccatgaacgccttcatggtgtgggctcaggcagcgcgcaggaagctcgcggaccagtacccgcacctgcacaacgctgagctcagcaagacgctgggcaagctctggaggctgctgaacgaaagtgacaagcgccccttcatcgaggaggctgagcggctccgtatgcagcacaagaaagaccacccggactacaagtaccagcccaggcggcggaagaacgggaaggccgcccagggcgaggcggagtgccccggtggggaggccgagcaaggtgggaccgccgccatccaggcccactacaagagcgcccacttggaccaccggcacccaggagagggctcccccatgtcagatgggaaccccgagcacccctcaggccagagccatggcccacccacccctccaaccaccccgaagacagagctgcagtcgggcaaggcagacccgaagcgggacgggcgctccatgggggagggcgggaagcctcacatcgacttcggcaacgtggacattggtgagatcagccacgaggtaatgtccaacatggagacctttgatgtggctgagttggaccagtacctgccgcccaatgggcacccaggccatgtgagcagctactcagcagccggctatgggctgggcagtgccctggccgtggccagtggacactccgcctggatctccaagccaccaggcgtggctctgcccacggtctcaccacctggtgtggatgccaaagcccaggtgaagacagagaccgcggggccccaggggcccccacactacaccgaccagccatccacctcacagatcgcctacactccctcttcccttactaggctctatggcccctgctcagtcagccccactccctgggcttcccagagagtgacagctgctcaggccctaacccttggctccaggagacacagggcccagcacccaggttgctgtcggcaggctgaagacactagaatcctgacctgtacattctgcccttgcctcttaccccttgcctcccagtggtatttgaataaagtatgtagctatatctgcccctattttcctgttctgcagccccccaaatccacatgtaactcattactgtctcctgttatttatctcagtagtcccctctcctagccactctagcccctattaactctgcattaagcattccacataataaaattaaaggttccggttacctgctgta

SEQ ID NO: 432827 - DNA, 1006 bp, Homo sapiens
  misc_feature (963)..(963): n is a, c, g, or t
  misc_feature (966)..(966): n is a, c, g, or t
  misc_feature (970)..(970): n is a, c, g, or t
tccgcagcggctcaggctcagtcgctcagtcagtctcgggctgtccggccagggtggttggtggtaaggattcaggctccgtcctaacgaggccgtggcctgaggctcagggccccccgcccctccctcccagcccaccagcgtcacctcccagccccgagctggaccgcacaccttgggacacggttttccacttcctaaggacgagccccagactggaggagaggtccgaggaggtgggcgttggactctttgcgaggaccccggcggctggcccgggggaggcggccgaggcggcggcggcggcggccgggggcgacatggcggaggagcaggacctatcggaggtggagctgagccccgtgggctcggaggagccccgctgcctgtccccggggagcgcgccctcgctagggcccgacggcggcggcggcggatcgggcctgcgagccagcccggggccaggcgagctgggcaaggtcaagaaggagcagcaggacggcgaggcggacgatgacaagttccccgtgtgcatccgcgaggccgtcagccaggtgctcagcggctacgactggacgctggtgcccatgcccgtgcgcgtcaacggcgccagcaaaagcaagccgcacgtcaagcggcccatgaacgccttcatggtgtgggctcaggcagcgcgcaggaagctcgcggaccagtacccgcacctgcacaacgctgagctcagcaagacgctgggcaagctctggaggctgctgaacgaaagtgacaagcgccccttcatcgaggaggctgagcggctccgtatgcagcacaagaaagaccacccggactacaagtaccagcccaggcggcggaagaacgggaaggccgcccagggcgaggcggagtgccccggtggggaggccgagcaaggtgggaccgccgccatccaggcccactacaagagcgcccacttggacccgnccngagngtccctttattgacccgacccacaaggggcctaagg

SEQ ID NO: 432828 - DNA, 1295 bp, Homo sapiens
tccagctttttcatctcttgacttttagatggcattttcaacatgatgtcatgattaaatgatgacaacttgatgatatgatggtttaaggaaattttgttggtagtaggtaagtcccagcatttctgactgttggttttcttttccttgtggtagaaaagacaaatgccaattttgaaatcttgaatgcagtaggcagttgtgttgaaatagtatgtgagaattacttgcaagctgaacatccaggtctggggcatgaacctggcatacaatgtagatttctgtgttcgttaggcaacagctacattgtctgctgggtttcaggctacctggaaacatgttctccattggctgtctcaccaatgctacccctataatgtttctgaataactgttttccaggaggtataaaccagtggagtttatcattgaatagagtgcagagaaaggaccgcaagaaagctgatcacctcagcaatgaatgatttcaatacgatttcacccaaatggtctcacacaccagcctagtaaaccagagataaggtgtaatgtcatccttccttccttctccctgcctcaactgtcaaagattgacaacttacatgttgtttactttttggcttctatttctgttcataattattatcagaaggcatagcacccacaagcctaatcatactgccttacaaccttattcctcttcattttgtcttctcacttacctgcagaaacccagtttatttttgttctccctttaccacaccagccttgtaactgttatgaatgaccctcaatctcactggaatctgaatcactcaggaattcaagcaaactggatgttttaaccactgttcagctttcttatggaatgacagagaacttgtaaagataaaacaccagtttgcaggaagaaaggaagagaatggaaattgcttctggaaaatactagttttacaatatgttttgtttgtctgctctcttaaataaacttaatcctataaacattttttaagaactagccattaagactgttaagttctcaattataaaggaataaaatgttttaaggaggatttatttgcccttgcttatatgaactgcatatttttagtaggaaatcatgtaatttaaattagtattggttaacagatttaacgtagaaaatggacatataaagaatacaaggataaatgtctacatgtaataatggatggtagtgatataatgcatttttgtcatcccatgctgaattcagtaaaaataaagctaatgacttggagcttttaaaagattgta

SEQ ID NO: 432829 - DNA, 613 bp, Homo sapiens
taagagaagtgacaggagcggaccggttttatttcatcacggggccggggtttagttgaacgtcctgtcgttgtctctacaattattcccaggctgcagttgagggtctgtccttgtcaaaaggcaggtgctagacagtctagaccagggtttctcaaactcgtacttgacatttggggccagataattctttgttgtggggctgtctggtgtatggtagggtgctcagcagcatccctggcctctgcccactagacatcagaagcactcccccagttgtgacaaccaaaaatatctccagaccttggcaaatgttatctgtgggggaaaattgccctcaattgagaaccactggtctagctagacctgcactgtccagtacagtagccactaaatacatgtggctaaacttaaatttaagttaattaagattaaaagctcagtttctcagtcacattagtcattcaagtgttcagacagccacatgaggggacagtgcagctacaggatatgccatcatggcagaaagttctattggttggacagtgttggtctatactgactcttatttctcagggagatcacagcaacctaaataaaccagatacctttt

SEQ ID NO: 432830 - DNA, 2486 bp, Homo sapiens
tcccacgtgtagcggagaaacagtagttaggatggctgaaggggatactcaccggctgaaggccgactgtgattccccctacccccacaaggcgattttgaccccctgagggctgctctagaggactcaggccccgaagctgtcccagggaggtccccgctgcatcccaccacccaagctgtgcctcatggagtcgatgtttagcagccctgccgaggcggcgctgcagcgagagaccggggtgccaggactgcttactcctcttccggacctggacggagtgtacgagctggagcgagtcgctggatttgtccgcgacctggggtgtgaacgagttgccttgcagttccctgaccagctattgggagatgctgtggctgtggctgcacgactggaggagacgacagggtcaaagatgttcattctgggtgacacagcctacggcagctgctgcgtggatgtgctgggtgctgagcaagctggagctcaggctctcatacattttggccctgcctgcttaagccctccagcccgcccactgcccgttgccttcgtgcttcgtcaacgttctgtggccttggagctctgtgtcaaggcctttgaggcccagaacccagaccccaaagcgcctgtggtgctgctgagtgagccggcctgtgcccatgccctggaggctttggctactctcctgcgcccacggtacctggacctgctagtctccagcccagcttttccccaaccagtgggttccctgagtccagagcctatgcccctagagcgttttgggcgccgcttcccccttgccccagggaggcgtctagaagagtatggtgccttctatgtagggggctctaaggccagccctgacccagaccttgacccagacctgagtcggctgctcttggggtgggcaccaggtcaacccttctcctcctgctgtccagatacagggaagactcaggatgagggtgcccgggctggacggctaagggcacgaagacgatatctggtagagagggccagagatgcccgcgtggtagggctgctggcaggcacactgggtgtagcccaacaccgtgaggcactggcccacttgcggaacctgactcaggctgctggcaagcgtagctatgtgttggccctggggcggcccacccctgccaagcttgccaacttccctgaggtggatgtctttgtgctattagcctgtcctctgggtgctctagccccccagctttctggtagcttcttccagcctatactggcaccatgtgagctggaagctgcctgcaaccctgcctggccacctccaggcctggctccccacctcacacattatgcggacttattgcctggctctcccttccacgtggctctcccaccacctgagtcagagctgtgggaaaccccagacgtgtcactcattactggagatctccgacccccacctgcctggaagtcatcaaatgatcatggaagcttggctctgaccccacggccccagctggagctggctgagagcagtcctgcagcctcattccttagttcccggagctggcaagggctggagccccgcctgggtcagacgccagtgacagaagctgtgagtggaagacgagggattgccatcgcctatgaggatgagggaagcggctgataccatgtggggctggagacatagatggacttatgaatggctgctaggacctttagtgctccctgcaccaacctcccatccccctgccaagatccttgaaggaccctggaaggagggagagcaggcagcccttcacaggataggatccgtctctgtcctgtcctggcactggcacaagctcagcacatgcccagtaatgcgtgttgtttggctgatggaataaagggcttagggacttccctgaggcctctggacccatctgtcttcctgagggcagcccaggacctttggccaatcccagttcccaggctgcagttgagggtctgtccttgtcaaaaggcaggtgctagacagtctagaccagggtttctcaaactcgtacttgacatttggggccagataattctttgttgtggggctgtctggtgtatggtagggtgctcagcagcatccctggcctctgcccactagacatcagaagcactcccccagttgtgacaaccaaaaatatctccagaccttggcaaatgttatctgtgggggaaaattgccctcaattgagaaccactggtctagctagacctgcactgtccagtacagtagccactaaatacatgtggctaaacttaaatttaagttaattaagattaaaagctcagtttctcagtcacattagtcattcaagtgttcagacagccacatgaggggacagtgcagctacaggatatgccatcatggcagaaagttctattggttggacagtgttggtctatactgactcttatttctcagggagatcacagcaacctaaataaaccagatacctttt

SEQ ID NO: 432831 - DNA, 2348 bp, Homo sapiens
tcccacgtgtagcggagaaacagtagttaggatggctgaaggggatactcaccggctgaaggccgactgtgattccccctacccccacaaggcgattttgaccccctgagggctgctctagaggactcaggccccgaagctgtcccagggaggtccccgctgcatcccaccacccaagctgtgcctcatggagtcgatgtttagcagccctgccgaggcggcgctgcagcgagagaccggggtgccaggactgcttactcctcttccggacctggacggagtgtacgagctggagcgagtcgctggatttgtccgcgacctggggtgtgaacgagttgccttgcagttccctgaccagctattgggagatgctgtggctgtggctgcacgactggaggagacgacagggtcaaagatgttcattctgggtgacacagcctacggcagctgctgcgtggatgtgctgggtgctgagcaagctggagctcaggctctcatacattttggccctgcctgcttaagccctccagcccgcccactgcccgttgccttcgtgcttcgtcaacgttctgtggccttggagctctgtgtcaaggcctttgaggcccagaacccagaccccaaagcgcctgtggtgctgctgagtgagccggcctgtgcccatgccctggaggctttggctactctcctgcgcccacggtacctggacctgctagtctccagcccagcttttccccaaccagtgggttccctgagtccagagcctatgcccctagagcgttttgggcgccgcttcccccttgccccagggaggcgtctagaagagtatggtgccttctatgtagggggctctaaggccagccctgacccagaccttgacccagacctgagtcggctgctcttggggtgggcaccaggtcaacccttctcctcctgctgtccagatacagggaagactcaggatgagggtgcccgggctggacggctaagggcacgaagacgatatctggtagagagggccagagatgcccgcgtggtagggctgctggcaggcacactgggtgtagcccaacaccgtgaggcactggcccacttgcggaacctgactcaggctgctggcaagcgtagctatgtgttggccctggggcggcccacccctgccaagcttgccaacttccctgaggtggatgtctttgtgctattagcctgtcctctgggtgctctagccccccagctttctggtagcttcttccagcctatactggcaccatgtgagctggaagctgcctgcaaccctgcctggccacctccaggcctggctccccacctcacacattatgcggacttattgcctggctctcccttccacgtggctctcccaccacctgagtcagagctgtgggaaaccccagacgtgtcactcattatggagccccgcctgggtcagacgccagtgacagaagctgtgagtggaagacgagggattgccatcgcctatgaggatgagggaagcggctgataccatgtggggctggagacatagatggacttatgaatggctgctaggacctttagtgctccctgcaccaacctcccatccccctgccaagatccttgaaggaccctggaaggagggagagcaggcagcccttcacaggataggatccgtctctgtcctgtcctggcactggcacaagctcagcacatgcccagtaatgcgtgttgtttggctgatggaataaagggcttagggacttccctgaggcctctggacccatctgtcttcctgagggcagcccaggacctttggccaatcccagttcccaggctgcagttgagggtctgtccttgtcaaaaggcaggtgctagacagtctagaccagggtttctcaaactcgtacttgacatttggggccagataattctttgttgtggggctgtctggtgtatggtagggtgctcagcagcatccctggcctctgcccactagacatcagaagcactcccccagttgtgacaaccaaaaatatctccagaccttggcaaatgttatctgtgggggaaaattgccctcaattgagaaccactggtctagctagacctgcactgtccagtacagtagccactaaatacatgtggctaaacttaaatttaagttaattaagattaaaagctcagtttctcagtcacattagtcattcaagtgttcagacagccacatgaggggacagtgcagctacaggatatgccatcatggcagaaagttctattggttggacagtgttggtctatactgactcttatttctcagggagatcacagcaacctaaataaaccagatacctttt

SEQ ID NO: 432832 - DNA, 2434 bp, Homo sapiens
tcccacgtgtagcggagaaacagtagttaggatggctgaaggggatactcaccggctgaaggccgactgtgattccccctacccccacaaggcgattttgaccccctgagggctgctctagaggactcaggccccgaagctgtcccagggaggtccccgctgcatcccaccacccaagctgtgcctcatggagtcgatgtttagcagccctgccgaggcggcgctgcagcgagagaccggggtgccaggactgcttactcctcttccggacctggacggagtgttgccttgcagttccctgaccagctattgggagatgctgtggctgtggctgcacgactggaggagacgacagggtcaaagatgttcattctgggtgacacagcctacggcagctgctgcgtggatgtgctgggtgctgagcaagctggagctcaggctctcatacattttggccctgcctgcttaagccctccagcccgcccactgcccgttgccttcgtgcttcgtcaacgttctgtggccttggagctctgtgtcaaggcctttgaggcccagaacccagaccccaaagcgcctgtggtgctgctgagtgagccggcctgtgcccatgccctggaggctttggctactctcctgcgcccacggtacctggacctgctagtctccagcccagcttttccccaaccagtgggttccctgagtccagagcctatgcccctagagcgttttgggcgccgcttcccccttgccccagggaggcgtctagaagagtatggtgccttctatgtagggggctctaaggccagccctgacccagaccttgacccagacctgagtcggctgctcttggggtgggcaccaggtcaacccttctcctcctgctgtccagatacagggaagactcaggatgagggtgcccgggctggacggctaagggcacgaagacgatatctggtagagagggccagagatgcccgcgtggtagggctgctggcaggcacactgggtgtagcccaacaccgtgaggcactggcccacttgcggaacctgactcaggctgctggcaagcgtagctatgtgttggccctggggcggcccacccctgccaagcttgccaacttccctgaggtggatgtctttgtgctattagcctgtcctctgggtgctctagccccccagctttctggtagcttcttccagcctatactggcaccatgtgagctggaagctgcctgcaaccctgcctggccacctccaggcctggctccccacctcacacattatgcggacttattgcctggctctcccttccacgtggctctcccaccacctgagtcagagctgtgggaaaccccagacgtgtcactcattactggagatctccgacccccacctgcctggaagtcatcaaatgatcatggaagcttggctctgaccccacggccccagctggagctggctgagagcagtcctgcagcctcattccttagttcccggagctggcaagggctggagccccgcctgggtcagacgccagtgacagaagctgtgagtggaagacgagggattgccatcgcctatgaggatgagggaagcggctgataccatgtggggctggagacatagatggacttatgaatggctgctaggacctttagtgctccctgcaccaacctcccatccccctgccaagatccttgaaggaccctggaaggagggagagcaggcagcccttcacaggataggatccgtctctgtcctgtcctggcactggcacaagctcagcacatgcccagtaatgcgtgttgtttggctgatggaataaagggcttagggacttccctgaggcctctggacccatctgtcttcctgagggcagcccaggacctttggccaatcccagttcccaggctgcagttgagggtctgtccttgtcaaaaggcaggtgctagacagtctagaccagggtttctcaaactcgtacttgacatttggggccagataattctttgttgtggggctgtctggtgtatggtagggtgctcagcagcatccctggcctctgcccactagacatcagaagcactcccccagttgtgacaaccaaaaatatctccagaccttggcaaatgttatctgtgggggaaaattgccctcaattgagaaccactggtctagctagacctgcactgtccagtacagtagccactaaatacatgtggctaaacttaaatttaagttaattaagattaaaagctcagtttctcagtcacattagtcattcaagtgttcagacagccacatgaggggacagtgcagctacaggatatgccatcatggcagaaagttctattggttggacagtgttggtctatactgactcttatttctcagggagatcacagcaacctaaataaaccagatacctttt

SEQ ID NO: 432833 - DNA, 2546 bp, Homo sapiens
tcccacgtgtagcggagaaacagtagttaggatggctgaaggggatactcaccggctgaaggccgactgtgattccccctacccccacaaggcgattttgaccccctgagggctgctctagaggactcaggccccgaagctgtcccagggaggtccccgctgcatcccaccacccaagctgtgcctcatggagtcgatgtttagcagccctgccgaggcggcgctgcagcgagagaccggggtgccaggactgcttactcctcttccggacctggacggagtgtacgagctggagcgagtcgctggatttgtccgcgacctggggtgtgaacgagttgccttgcagttccctgaccagctattgggagatgctgtggctgtggctgcacgactggaggagacgacagggtcaaagatgttcattctgggtgacacagcctacggcagtgatgacagcaactcgcctccagaagagaacccatttctctgatgctatcttccctgcagctgctgcgtggatgtgctgggtgctgagcaagctggagctcaggctctcatacattttggccctgcctgcttaagccctccagcccgcccactgcccgttgccttcgtgcttcgtcaacgttctgtggccttggagctctgtgtcaaggcctttgaggcccagaacccagaccccaaagcgcctgtggtgctgctgagtgagccggcctgtgcccatgccctggaggctttggctactctcctgcgcccacggtacctggacctgctagtctccagcccagcttttccccaaccagtgggttccctgagtccagagcctatgcccctagagcgttttgggcgccgcttcccccttgccccagggaggcgtctagaagagtatggtgccttctatgtagggggctctaaggccagccctgacccagaccttgacccagacctgagtcggctgctcttggggtgggcaccaggtcaacccttctcctcctgctgtccagatacagggaagactcaggatgagggtgcccgggctggacggctaagggcacgaagacgatatctggtagagagggccagagatgcccgcgtggtagggctgctggcaggcacactgggtgtagcccaacaccgtgaggcactggcccacttgcggaacctgactcaggctgctggcaagcgtagctatgtgttggccctggggcggcccacccctgccaagcttgccaacttccctgaggtggatgtctttgtgctattagcctgtcctctgggtgctctagccccccagctttctggtagcttcttccagcctatactggcaccatgtgagctggaagctgcctgcaaccctgcctggccacctccaggcctggctccccacctcacacattatgcggacttattgcctggctctcccttccacgtggctctcccaccacctgagtcagagctgtgggaaaccccagacgtgtcactcattactggagatctccgacccccacctgcctggaagtcatcaaatgatcatggaagcttggctctgaccccacggccccagctggagctggctgagagcagtcctgcagcctcattccttagttcccggagctggcaagggctggagccccgcctgggtcagacgccagtgacagaagctgtgagtggaagacgagggattgccatcgcctatgaggatgagggaagcggctgataccatgtggggctggagacatagatggacttatgaatggctgctaggacctttagtgctccctgcaccaacctcccatccccctgccaagatccttgaaggaccctggaaggagggagagcaggcagcccttcacaggataggatccgtctctgtcctgtcctggcactggcacaagctcagcacatgcccagtaatgcgtgttgtttggctgatggaataaagggcttagggacttccctgaggcctctggacccatctgtcttcctgagggcagcccaggacctttggccaatcccagttcccaggctgcagttgagggtctgtccttgtcaaaaggcaggtgctagacagtctagaccagggtttctcaaactcgtacttgacatttggggccagataattctttgttgtggggctgtctggtgtatggtagggtgctcagcagcatccctggcctctgcccactagacatcagaagcactcccccagttgtgacaaccaaaaatatctccagaccttggcaaatgttatctgtgggggaaaattgccctcaattgagaaccactggtctagctagacctgcactgtccagtacagtagccactaaatacatgtggctaaacttaaatttaagttaattaagattaaaagctcagtttctcagtcacattagtcattcaagtgttcagacagccacatgaggggacagtgcagctacaggatatgccatcatggcagaaagttctattggttggacagtgttggtctatactgactcttatttctcagggagatcacagcaacctaaataaaccagatacctttt

SEQ ID NO: 432834 - DNA, 1895 bp, Homo sapiens
tcccacgtgtagcggagaaacagtagttaggatggctgaaggggatactcaccggctgaaggccgactgtgattccccctacccccacaaggcgattttgaccccctgagggctgctctagaggactcaggccccgaagctgtcccagggaggtccccgctgcatcccaccacccaagctgtgcctcatggagtcgatgtttagcagccctgccgaggcggcgctgcagcgagagaccggggtgccaggactgcttactcctcttccggacctggacggagtgtacgagctggagcgagtcgctggatttgtccgcgacctggggtgtgaacgagttgccttgcagttccctgaccagctattgggagatgctgtggctgtggctgcacgactggaggagacgacagggtcaaagatgttcattctgggtgacacagcctacggcagctgctgcgtggatgtgctgggtgctgagcaagctggagctcaggctctcatacattttggccctgcctgcttaagccctccagcccgcccactgcccgttgccttcgtgcttcgtcaacgttctgtggccttggagctctgtgtcaaggcctttgaggcccagaacccagaccccaaagcgcctgtggtgctgctgagtgagccggcctgtgcccatgccctggaggctttggctactctcctgcgcccacggtacctggacctgctagtctccagcccagcttttccccaaccagtgggttccctgagtccagagcctatgcccctagagcgttttgggcgccgcttcccccttgccccagggaggcgtctagaagagtatggtgccttctatgtagggggctctaaggccagccctgacccagaccttgacccagacctgagtcggctgctcttggggtgggcaccaggtcaacccttctcctcctgctgtccagatacagggaagactcaggatgagggtgcccgggctggacggctaagggcacgaagacgatatctggtagagagggccagagatgcccgcgtggtagggctgctggcaggcacactgggtgtagcccaacaccgtgaggcactggcccacttgcggaacctgactcaggctgctggcaagcgtagctatgtgttggccctggggcggcccacccctgccaagcttgccaacttccctgaggtggatgtctttgtgctattagcctgtcctctgggtgctctagccccccagctttctggtagcttcttccagcctatactggcaccatgtgagctggaagctgcctgcaaccctgcctggccacctccaggcctggctccccacctcacacattatgcggacttattgcctggctctcccttccacgtggctctcccaccacctgagtcagagctgtgggaaaccccagacgtgtcactcattactggagatctccgacccccacctgcctggaagtcatcaaatgatcatggaagcttggctctgaccccacggccccagctggagctggctgagagcagtcctgcagcctcattccttagttcccggagctggcaagggctggagccccgcctgggtcagacgccagtgacagaagctgtgagtggaagacgagggattgccatcgcctatgaggatgagggaagcggctgataccatgtggggctggagacatagatggacttatgaatggctgctaggacctttagtgctccctgcaccaacctcccatccccctgccaagatccttgaaggaccctggaaggagggagagcaggcagcccttcacaggataggatccgtctctgtcctgtcctggcactggcacaagctcagcacatgcccagtaatgcgtgttgtttggctgatggaataaagggcttagggactt

SEQ ID NO: 432835 - DNA, 2743 bp, Homo sapiens
tcccacgtgtagcggagaaacagtagttaggatggctgaaggggatactcaccggctgaaggccgactgtgattccccctacccccacaaggcgattttgaccccctgagggctgctctagaggactcaggccccgaagctgtcccagggaggtccccgctgcatcccaccacccaagctgtgcctcatggagtcgatgtttagcagccctgccgaggcggcgctgcagcgagagaccggggtgccaggactgcttactcctcttccggacctggacggagtgtacgagctggagcgagtcgctggatttgtccgcgacctggggtgtgaacgagttgccttgcagttccctgaccagctattgggagatgctgtggctgtggctgcacgactggaggagacgacagggtcaaagatgttcattctgggtgacacagcctacggcaggtgtgaacttggccttaggtgggccaggcctggggatccggggctcatggggttttacgtctatgacagtgattgccttcaatggtggtgtttctccttgatgataatggtaatgactccccttctgatgctagctcctttcattgacaatgtcttcctttaatgaaaccattttattcactgaccacatttcccagtgatgacagcaactcgcctccagaagagaacccatttctctgatgctatcttccctgcagctgctgcgtggatgtgctgggtgctgagcaagctggagctcaggctctcatacattttggccctgcctgcttaagccctccagcccgcccactgcccgttgccttcgtgcttcgtcaacgttctgtggccttggagctctgtgtcaaggcctttgaggcccagaacccagaccccaaagcgcctgtggtgctgctgagtgagccggcctgtgcccatgccctggaggctttggctactctcctgcgcccacggtacctggacctgctagtctccagcccagcttttccccaaccagtgggttccctgagtccagagcctatgcccctagagcgttttgggcgccgcttcccccttgccccagggaggcgtctagaagagtatggtgccttctatgtagggggctctaaggccagccctgacccagaccttgacccagacctgagtcggctgctcttggggtgggcaccaggtcaacccttctcctcctgctgtccagatacagggaagactcaggatgagggtgcccgggctggacggctaagggcacgaagacgatatctggtagagagggccagagatgcccgcgtggtagggctgctggcaggcacactgggtgtagcccaacaccgtgaggcactggcccacttgcggaacctgactcaggctgctggcaagcgtagctatgtgttggccctggggcggcccacccctgccaagcttgccaacttccctgaggtggatgtctttgtgctattagcctgtcctctgggtgctctagccccccagctttctggtagcttcttccagcctatactggcaccatgtgagctggaagctgcctgcaaccctgcctggccacctccaggcctggctccccacctcacacattatgcggacttattgcctggctctcccttccacgtggctctcccaccacctgagtcagagctgtgggaaaccccagacgtgtcactcattactggagatctccgacccccacctgcctggaagtcatcaaatgatcatggaagcttggctctgaccccacggccccagctggagctggctgagagcagtcctgcagcctcattccttagttcccggagctggcaagggctggagccccgcctgggtcagacgccagtgacagaagctgtgagtggaagacgagggattgccatcgcctatgaggatgagggaagcggctgataccatgtggggctggagacatagatggacttatgaatggctgctaggacctttagtgctccctgcaccaacctcccatccccctgccaagatccttgaaggaccctggaaggagggagagcaggcagcccttcacaggataggatccgtctctgtcctgtcctggcactggcacaagctcagcacatgcccagtaatgcgtgttgtttggctgatggaataaagggcttagggacttccctgaggcctctggacccatctgtcttcctgagggcagcccaggacctttggccaatcccagttcccaggctgcagttgagggtctgtccttgtcaaaaggcaggtgctagacagtctagaccagggtttctcaaactcgtacttgacatttggggccagataattctttgttgtggggctgtctggtgtatggtagggtgctcagcagcatccctggcctctgcccactagacatcagaagcactcccccagttgtgacaaccaaaaatatctccagaccttggcaaatgttatctgtgggggaaaattgccctcaattgagaaccactggtctagctagacctgcactgtccagtacagtagccactaaatacatgtggctaaacttaaatttaagttaattaagattaaaagctcagtttctcagtcacattagtcattcaagtgttcagacagccacatgaggggacagtgcagctacaggatatgccatcatggcagaaagttctattggttggacagtgttggtctatactgactcttatttctcagggagatcacagcaacctaaataaaccagatacctttt

SEQ ID NO: 432836 - DNA, 2543 bp, Homo sapiens
tcccacgtgtagcggagaaacagtagttaggatggctgaaggggatactcaccggctgaaggccgactgtgattccccctacccccacaaggcgattttgaccccctgagggctgctctagaggactcaggccccgaagctgtcccagggaggtccccgctgcatcccaccacccaagctgtgcctcatggagtcgatgtttagcagccctgccgaggcggcgctgcagcgagagaccggggtgccaggactgcttactcctcttccggacctggacggagtgttgccttgcagttccctgaccagctattgggagatgctgtggctgtggctgcacgactggaggagacgacagggtcaaagatgttcattctgggtgacacagcctacggcaggtgtgaacttggccttaggtgggccaggcctggggatccggggctcatggggttttacgtctatgacagtgattgccttcaatggtggtgtttctccttgatgataatgctgctgcgtggatgtgctgggtgctgagcaagctggagctcaggctctcatacattttggccctgcctgcttaagccctccagcccgcccactgcccgttgccttcgtgcttcgtcaacgttctgtggccttggagctctgtgtcaaggcctttgaggcccagaacccagaccccaaagcgcctgtggtgctgctgagtgagccggcctgtgcccatgccctggaggctttggctactctcctgcgcccacggtacctggacctgctagtctccagcccagcttttccccaaccagtgggttccctgagtccagagcctatgcccctagagcgttttgggcgccgcttcccccttgccccagggaggcgtctagaagagtatggtgccttctatgtagggggctctaaggccagccctgacccagaccttgacccagacctgagtcggctgctcttggggtgggcaccaggtcaacccttctcctcctgctgtccagatacagggaagactcaggatgagggtgcccgggctggacggctaagggcacgaagacgatatctggtagagagggccagagatgcccgcgtggtagggctgctggcaggcacactgggtgtagcccaacaccgtgaggcactggcccacttgcggaacctgactcaggctgctggcaagcgtagctatgtgttggccctggggcggcccacccctgccaagcttgccaacttccctgaggtggatgtctttgtgctattagcctgtcctctgggtgctctagccccccagctttctggtagcttcttccagcctatactggcaccatgtgagctggaagctgcctgcaaccctgcctggccacctccaggcctggctccccacctcacacattatgcggacttattgcctggctctcccttccacgtggctctcccaccacctgagtcagagctgtgggaaaccccagacgtgtcactcattactggagatctccgacccccacctgcctggaagtcatcaaatgatcatggaagcttggctctgaccccacggccccagctggagctggctgagagcagtcctgcagcctcattccttagttcccggagctggcaagggctggagccccgcctgggtcagacgccagtgacagaagctgtgagtggaagacgagggattgccatcgcctatgaggatgagggaagcggctgataccatgtggggctggagacatagatggacttatgaatggctgctaggacctttagtgctccctgcaccaacctcccatccccctgccaagatccttgaaggaccctggaaggagggagagcaggcagcccttcacaggataggatccgtctctgtcctgtcctggcactggcacaagctcagcacatgcccagtaatgcgtgttgtttggctgatggaataaagggcttagggacttccctgaggcctctggacccatctgtcttcctgagggcagcccaggacctttggccaatcccagttcccaggctgcagttgagggtctgtccttgtcaaaaggcaggtgctagacagtctagaccagggtttctcaaactcgtacttgacatttggggccagataattctttgttgtggggctgtctggtgtatggtagggtgctcagcagcatccctggcctctgcccactagacatcagaagcactcccccagttgtgacaaccaaaaatatctccagaccttggcaaatgttatctgtgggggaaaattgccctcaattgagaaccactggtctagctagacctgcactgtccagtacagtagccactaaatacatgtggctaaacttaaatttaagttaattaagattaaaagctcagtttctcagtcacattagtcattcaagtgttcagacagccacatgaggggacagtgcagctacaggatatgccatcatggcagaaagttctattggttggacagtgttggtctatactgactcttatttctcagggagatcacagcaacctaaataaaccagatacctttt

SEQ ID NO: 432837 - DNA, 2595 bp, Homo sapiens
tcccacgtgtagcggagaaacagtagttaggatggctgaaggggatactcaccggctgaaggccgactgtgattccccctacccccacaaggcgattttgaccccctgagggctgctctagaggactcaggccccgaagctgtcccagggaggtccccgctgcatcccaccacccaagctgtgcctcatggagtcgatgtttagcagccctgccgaggcggcgctgcagcgagagaccggggtgccaggactgcttactcctcttccggacctggacggagtgtacgagctggagcgagtcgctggatttgtccgcgacctggggtgtgaacgagttgccttgcagttccctgaccagctattgggagatgctgtggctgtggctgcacgactggaggagacgacagggtcaaagatgttcattctgggtgacacagcctacggcaggtgtgaacttggccttaggtgggccaggcctggggatccggggctcatggggttttacgtctatgacagtgattgccttcaatggtggtgtttctccttgatgataatgctgctgcgtggatgtgctgggtgctgagcaagctggagctcaggctctcatacattttggccctgcctgcttaagccctccagcccgcccactgcccgttgccttcgtgcttcgtcaacgttctgtggccttggagctctgtgtcaaggcctttgaggcccagaacccagaccccaaagcgcctgtggtgctgctgagtgagccggcctgtgcccatgccctggaggctttggctactctcctgcgcccacggtacctggacctgctagtctccagcccagcttttccccaaccagtgggttccctgagtccagagcctatgcccctagagcgttttgggcgccgcttcccccttgccccagggaggcgtctagaagagtatggtgccttctatgtagggggctctaaggccagccctgacccagaccttgacccagacctgagtcggctgctcttggggtgggcaccaggtcaacccttctcctcctgctgtccagatacagggaagactcaggatgagggtgcccgggctggacggctaagggcacgaagacgatatctggtagagagggccagagatgcccgcgtggtagggctgctggcaggcacactgggtgtagcccaacaccgtgaggcactggcccacttgcggaacctgactcaggctgctggcaagcgtagctatgtgttggccctggggcggcccacccctgccaagcttgccaacttccctgaggtggatgtctttgtgctattagcctgtcctctgggtgctctagccccccagctttctggtagcttcttccagcctatactggcaccatgtgagctggaagctgcctgcaaccctgcctggccacctccaggcctggctccccacctcacacattatgcggacttattgcctggctctcccttccacgtggctctcccaccacctgagtcagagctgtgggaaaccccagacgtgtcactcattactggagatctccgacccccacctgcctggaagtcatcaaatgatcatggaagcttggctctgaccccacggccccagctggagctggctgagagcagtcctgcagcctcattccttagttcccggagctggcaagggctggagccccgcctgggtcagacgccagtgacagaagctgtgagtggaagacgagggattgccatcgcctatgaggatgagggaagcggctgataccatgtggggctggagacatagatggacttatgaatggctgctaggacctttagtgctccctgcaccaacctcccatccccctgccaagatccttgaaggaccctggaaggagggagagcaggcagcccttcacaggataggatccgtctctgtcctgtcctggcactggcacaagctcagcacatgcccagtaatgcgtgttgtttggctgatggaataaagggcttagggacttccctgaggcctctggacccatctgtcttcctgagggcagcccaggacctttggccaatcccagttcccaggctgcagttgagggtctgtccttgtcaaaaggcaggtgctagacagtctagaccagggtttctcaaactcgtacttgacatttggggccagataattctttgttgtggggctgtctggtgtatggtagggtgctcagcagcatccctggcctctgcccactagacatcagaagcactcccccagttgtgacaaccaaaaatatctccagaccttggcaaatgttatctgtgggggaaaattgccctcaattgagaaccactggtctagctagacctgcactgtccagtacagtagccactaaatacatgtggctaaacttaaatttaagttaattaagattaaaagctcagtttctcagtcacattagtcattcaagtgttcagacagccacatgaggggacagtgcagctacaggatatgccatcatggcagaaagttctattggttggacagtgttggtctatactgactcttatttctcagggagatcacagcaacctaaataaaccagatacctttt

SEQ ID NO: 432838 - DNA, 2494 bp, Homo sapiens
tcccacgtgtagcggagaaacagtagttaggatggctgaaggggatactcaccggctgaaggccgactgtgattccccctacccccacaaggcgattttgaccccctgagggctgctctagaggactcaggccccgaagctgtcccagggaggtccccgctgcatcccaccacccaagctgtgcctcatggagtcgatgtttagcagccctgccgaggcggcgctgcagcgagagaccggggtgccaggactgcttactcctcttccggacctggacggagtgttgccttgcagttccctgaccagctattgggagatgctgtggctgtggctgcacgactggaggagacgacagggtcaaagatgttcattctgggtgacacagcctacggcagtgatgacagcaactcgcctccagaagagaacccatttctctgatgctatcttccctgcagctgctgcgtggatgtgctgggtgctgagcaagctggagctcaggctctcatacattttggccctgcctgcttaagccctccagcccgcccactgcccgttgccttcgtgcttcgtcaacgttctgtggccttggagctctgtgtcaaggcctttgaggcccagaacccagaccccaaagcgcctgtggtgctgctgagtgagccggcctgtgcccatgccctggaggctttggctactctcctgcgcccacggtacctggacctgctagtctccagcccagcttttccccaaccagtgggttccctgagtccagagcctatgcccctagagcgttttgggcgccgcttcccccttgccccagggaggcgtctagaagagtatggtgccttctatgtagggggctctaaggccagccctgacccagaccttgacccagacctgagtcggctgctcttggggtgggcaccaggtcaacccttctcctcctgctgtccagatacagggaagactcaggatgagggtgcccgggctggacggctaagggcacgaagacgatatctggtagagagggccagagatgcccgcgtggtagggctgctggcaggcacactgggtgtagcccaacaccgtgaggcactggcccacttgcggaacctgactcaggctgctggcaagcgtagctatgtgttggccctggggcggcccacccctgccaagcttgccaacttccctgaggtggatgtctttgtgctattagcctgtcctctgggtgctctagccccccagctttctggtagcttcttccagcctatactggcaccatgtgagctggaagctgcctgcaaccctgcctggccacctccaggcctggctccccacctcacacattatgcggacttattgcctggctctcccttccacgtggctctcccaccacctgagtcagagctgtgggaaaccccagacgtgtcactcattactggagatctccgacccccacctgcctggaagtcatcaaatgatcatggaagcttggctctgaccccacggccccagctggagctggctgagagcagtcctgcagcctcattccttagttcccggagctggcaagggctggagccccgcctgggtcagacgccagtgacagaagctgtgagtggaagacgagggattgccatcgcctatgaggatgagggaagcggctgataccatgtggggctggagacatagatggacttatgaatggctgctaggacctttagtgctccctgcaccaacctcccatccccctgccaagatccttgaaggaccctggaaggagggagagcaggcagcccttcacaggataggatccgtctctgtcctgtcctggcactggcacaagctcagcacatgcccagtaatgcgtgttgtttggctgatggaataaagggcttagggacttccctgaggcctctggacccatctgtcttcctgagggcagcccaggacctttggccaatcccagttcccaggctgcagttgagggtctgtccttgtcaaaaggcaggtgctagacagtctagaccagggtttctcaaactcgtacttgacatttggggccagataattctttgttgtggggctgtctggtgtatggtagggtgctcagcagcatccctggcctctgcccactagacatcagaagcactcccccagttgtgacaaccaaaaatatctccagaccttggcaaatgttatctgtgggggaaaattgccctcaattgagaaccactggtctagctagacctgcactgtccagtacagtagccactaaatacatgtggctaaacttaaatttaagttaattaagattaaaagctcagtttctcagtcacattagtcattcaagtgttcagacagccacatgaggggacagtgcagctacaggatatgccatcatggcagaaagttctattggttggacagtgttggtctatactgactcttatttctcagggagatcacagcaacctaaataaaccagatacctttt

SEQ ID NO: 432839 - DNA, 1802 bp, Homo sapiens
tcccacgtgtagcggagaaacagtagttaggatggctgaaggggatactcaccggctgaaggccgactgtgattccccctacccccacaaggcgattttgaccccctgagggctgctctagaggactcaggccccgaagctgtcccagggaggtccccgctgcatcccaccacccaagctgtgcctcatggagtcgatgtttagcagccctgccgaggcggcgctgcagcgagagaccggggtgccaggactgcttactcctcttccggacctggacggagtgtacgagctggagcgagtcgctggatttgtccgcgacctggggtgtgaacgagttgccttgcagttccctgaccagctattgggagatgctgtggctgtggctgcacgactggaggagacgacagggtcaaagatgttcattctgggtgacacagcctacggcagctgctgcgtggatgtgctgggtgctgagcaagctggagctcaggctctcatacattttggccctgcctgcttaagccctccagcccgcccactgcccgttgccttcgtgcttcgtcaacgttctgtggccttggagctctgtgtcaaggcctttgaggcccagaacccagaccccaaagcgcctgtggtgctgctgagtgagccggcctgtgcccatgccctgggctctcccttccacgtggctctcccaccacctgagtcagagctgtgggaaaccccagacgtgtcactcattactggagatctccgacccccacctgcctggaagtcatcaaatgatcatggaagcttggctctgaccccacggccccagctggagctggctgagagcagtcctgcagcctcattccttagttcccggagctggcaagggctggagccccgcctgggtcagacgccagtgacagaagctgtgagtggaagacgagggattgccatcgcctatgaggatgagggaagcggctgataccatgtggggctggagacatagatggacttatgaatggctgctaggacctttagtgctccctgcaccaacctcccatccccctgccaagatccttgaaggaccctggaaggagggagagcaggcagcccttcacaggataggatccgtctctgtcctgtcctggcactggcacaagctcagcacatgcccagtaatgcgtgttgtttggctgatggaataaagggcttagggacttccctgaggcctctggacccatctgtcttcctgagggcagcccaggacctttggccaatcccagttcccaggctgcagttgagggtctgtccttgtcaaaaggcaggtgctagacagtctagaccagggtttctcaaactcgtacttgacatttggggccagataattctttgttgtggggctgtctggtgtatggtagggtgctcagcagcatccctggcctctgcccactagacatcagaagcactcccccagttgtgacaaccaaaaatatctccagaccttggcaaatgttatctgtgggggaaaattgccctcaattgagaaccactggtctagctagacctgcactgtccagtacagtagccactaaatacatgtggctaaacttaaatttaagttaattaagattaaaagctcagtttctcagtcacattagtcattcaagtgttcagacagccacatgaggggacagtgcagctacaggatatgccatcatggcagaaagttctattggttggacagtgttggtctatactgactcttatttctcagggagatcacagcaacctaaataaaccagatacctttt

SEQ ID NO: 432840 - DNA, 2101 bp, Homo sapiens
aaggctagtagaggcgggggtaatcggccgagggtcattctgggtgacacagcctacggcagctgctgcgtggatgtgctgggtgctgagcaagctggagctcaggctctcatacattttggccctgcctgcttaagccctccagcccgcccactgcccgttgccttcgtgcttcgtcaacgttctgtggccttggagctctgtgtcaaggcctttgaggcccagaacccagaccccaaagcgcctgtggtgctgctgagtgagccggcctgtgcccatgccctggaggctttggctactctcctgcgcccacggtacctggacctgctagtctccagcccagcttttccccaaccagtgggttccctgagtccagagcctatgcccctagagcgttttgggcgccgcttcccccttgccccagggaggcgtctagaagagtatggtgccttctatgtagggggctctaaggccagccctgacccagaccttgacccagacctgagtcggctgctcttggggtgggcaccaggtcaacccttctcctcctgctgtccagatacagggaagactcaggatgagggtgcccgggctggacggctaagggcacgaagacgatatctggtagagagggccagagatgcccgcgtggtagggctgctggcaggcacactgggtgtagcccaacaccgtgaggcactggcccacttgcggaacctgactcaggctgctggcaagcgtagctatgtgttggccctggggcggcccacccctgccaagcttgccaacttccctgaggtggatgtctttgtgctattagcctgtcctctgggtgctctagccccccagctttctggtagcttcttccagcctatactggcaccatgtgagctggaagctgcctgcaaccctgcctggccacctccaggcctggctccccacctcacacattatgcggacttattgcctggctctcccttccacgtggctctcccaccacctgagtcagagctgtgggaaaccccagacgtgtcactcattactggagatctccgacccccacctgcctggaagtcatcaaatgatcatggaagcttggctctgaccccacggccccagctggagctggctgagagcagtcctgcagcctcattccttagttcccggagctggcaagggctggagccccgcctgggtcagacgccagtgacagaagctgtgagtggaagacgagggattgccatcgcctatgaggatgagggaagcggctgataccatgtggggctggagacatagatggacttatgaatggctgctaggacctttagtgctccctgcaccaacctcccatccccctgccaagatccttgaaggaccctggaaggagggagagcaggcagcccttcacaggataggatccgtctctgtcctgtcctggcactggcacaagctcagcacatgcccagtaatgcgtgttgtttggctgatggaataaagggcttagggacttccctgaggcctctggacccatctgtcttcctgagggcagcccaggacctttggccaatcccagttcccaggctgcagttgagggtctgtccttgtcaaaaggcaggtgctagacagtctagaccagggtttctcaaactcgtacttgacatttggggccagataattctttgttgtggggctgtctggtgtatggtagggtgctcagcagcatccctggcctctgcccactagacatcagaagcactcccccagttgtgacaaccaaaaatatctccagaccttggcaaatgttatctgtgggggaaaattgccctcaattgagaaccactggtctagctagacctgcactgtccagtacagtagccactaaatacatgtggctaaacttaaatttaagttaattaagattaaaagctcagtttctcagtcacattagtcattcaagtgttcagacagccacatgaggggacagtgcagctacaggatatgccatcatggcagaaagttctattggttggacagtgttggtctatactgactcttatttctcagggagatcacagcaacctaaataaaccagatacctttt

SEQ ID NO: 432841 - DNA, 2213 bp, Homo sapiens
tcccacgtgtagcggagaaacagtagttaggatggctgaaggggatactcaccggctgaaggccgactgtgattccccctacccccacaaggcgattttgaccccctgagggctgctctagaggactcaggccccgaagctgtcccagggaggtccccgctgcatcccaccacccaagctgtgcctcatggagtcgatgtttagcagccctgccgaggcggcgctgcagcgagagaccggggtgccaggactgcttactcctcttccggacctggacggagtgtacgagctggagcgagtcgctggatttgtccgcgacctggggtgtgaacgagttgccttgcagttccctgaccagctattgggagatgctgtggctgtggctgcacgactggaggagacgacagggtcaaagatgttcattctgggtgacacagcctacggcagctgctgcgtggatgtgctgggtgctgagcaagctggagctcaggctctcatacattttggccctgcctgcttaagccctccagcccgcccactgcccgttgccttcgtgcttcgtcaacgttctgtggccttggagctctgtgtcaaggcctttgaggcccagaacccagaccccaaagcgcctgtggtgctgctgagtgagccggcctgtgcccatgccctggatacagggaagactcaggatgagggtgcccgggctggacggctaagggcacgaagacgatatctggtagagagggccagagatgcccgcgtggtagggctgctggcaggcacactgggtgtagcccaacaccgtgaggcactggcccacttgcggaacctgactcaggctgctggcaagcgtagctatgtgttggccctggggcggcccacccctgccaagcttgccaacttccctgaggtggatgtctttgtgctattagcctgtcctctgggtgctctagccccccagctttctggtagcttcttccagcctatactggcaccatgtgagctggaagctgcctgcaaccctgcctggccacctccaggcctggctccccacctcacacattatgcggacttattgcctggctctcccttccacgtggctctcccaccacctgagtcagagctgtgggaaaccccagacgtgtcactcattactggagatctccgacccccacctgcctggaagtcatcaaatgatcatggaagcttggctctgaccccacggccccagctggagctggctgagagcagtcctgcagcctcattccttagttcccggagctggcaagggctggagccccgcctgggtcagacgccagtgacagaagctgtgagtggaagacgagggattgccatcgcctatgaggatgagggaagcggctgataccatgtggggctggagacatagatggacttatgaatggctgctaggacctttagtgctccctgcaccaacctcccatccccctgccaagatccttgaaggaccctggaaggagggagagcaggcagcccttcacaggataggatccgtctctgtcctgtcctggcactggcacaagctcagcacatgcccagtaatgcgtgttgtttggctgatggaataaagggcttagggacttccctgaggcctctggacccatctgtcttcctgagggcagcccaggacctttggccaatcccagttcccaggctgcagttgagggtctgtccttgtcaaaaggcaggtgctagacagtctagaccagggtttctcaaactcgtacttgacatttggggccagataattctttgttgtggggctgtctggtgtatggtagggtgctcagcagcatccctggcctctgcccactagacatcagaagcactcccccagttgtgacaaccaaaaatatctccagaccttggcaaatgttatctgtgggggaaaattgccctcaattgagaaccactggtctagctagacctgcactgtccagtacagtagccactaaatacatgtggctaaacttaaatttaagttaattaagattaaaagctcagtttctcagtcacattagtcattcaagtgttcagacagccacatgaggggacagtgcagctacaggatatgccatcatggcagaaagttctattggttggacagtgttggtctatactgactcttatttctcagggagatcacagcaacctaaataaaccagatacctttt

SEQ ID NO: 432842 - DNA, 236 bp, Homo sapiens
gaaacctggggcacggagtcagggggtgagtatggattttctttcctcctccctttcaggctctcccttccacgtggctctcccaccacctgagtcagagctgtgggaaaccccagacgtgtcactcattactggagatctccgacccccacctgcctggaagtcatcaaatgatcatggaagcttggctctgaccccacggccccagctggagctggctgagagcagtcctgcag

SEQ ID NO: 432843 - DNA, 604 bp, Homo sapiens
ttttggggggaaaaaccccttaaaaaaccccttttccgtggggggggcctcttttttttaatttaataccagttttcaggaacccctgaagttttaagttcattattctttataacatttgagagaatcggatgtagtgatatgacagggctggggcaagaacaggggcactagctgccttattagctaatttagtgccctccgtgttcagcttagcctttgaccctttccttttgatccacaaaatacattaaaactctgaattcacatacaatgctattttaaagtcaatagattttagctataaagtgcttgaccagtaatgtggttgtaattttgtgtatgttcccccacatcgcccccaacttcggatgtgcggtcaggaggttgaggttcactattaacaaatgtcataaatatctcatagaggtacagtgccaatagatattcaaatgttgcatgttgaccagagggattttatatctgaagaacatacactattaataaataccttagagaaagattttgacctggctttagataaaactgtggcaagaaaaatgtaatgagcaatatatggaaataaacacacctttgttaaaga

SEQ ID NO: 432844 - DNA, 2013 bp, Homo sapiens
gaattcggctcgaggcccgaggagaccacgctcctggagctctgctgtcttctcagggagactctgaggctctgttgagaatcatgctttggaggcagctcatctattggcaactgctggctttgtttttcctccctttttgcctgtgtcaagatgaatacatggagtctccacaaaccggaggactacccccagactgcagtaagtgttgtcatggagactacagctttcgaggctaccaaggcccccctgggccaccgggccctcctggcattccaggaaaccatggaaacaatggcaacaatggagccactggtcatgaaggagccaaaggtgagaagggcgacaaaggtgacctggggcctcgaggggagcgggggcagcatggccccaaaggagagaagggctacccggggattccaccagaacttcagattgcattcatggcttctctggcaacccacttcagcaatcagaacagtgggattatcttcagcagtgttgagaccaacattggaaacttctttgatgtcatgactggtagatttggggccccagtatcaggtgtgtatttcttcaccttcagcatgatgaagcatgaggatgttgaggaagtgtatgtgtaccttatgcacaatggcaacacagtcttcagcatgtacagctatgaaatgaagggcaaatcagatacatccagcaatcatgctgtgctgaagctagccaaaggggatgaggtttggctgcgaatgggcaatggcgctctccatggggaccaccaacgcttctccacctttgcaggattcctgctctttgaaactaagtaaatatatgactagaatagctccactttggggaagacttgtagctgagctgatttgttacgatctgaggaacattaaagttgagggttttacattgctgtattcaaaaaattattggttgcaatgttgttcacgctacaggtacaccaataatgttggacaattcaggggctcagaagaatcaaccacaaaatagtcttctcagatgaccttgactaatatactcagcatctttatcactctttccttggcacctaaaagataattctcctctgacgcaggttggaaatatttttttctatcacagaagtcatttgcaaagaattttgactactctgcttttaatttaataccagttttcaggaacccctgaagttttaagttcattattctttataacatttgagagaatcggatgtagtgatatgacagggctggggcaagaacaggggcactagctgccttattagctaatttagtgccctccgtgttcagcttagcctttgaccctttccttttgatccacaaaatacattaaaactctgaattcacatacaatgctattttaaagtcaatagattttagctataaagtgcttgaccagtaatgtggttgtaattttgtgtatgttcccccacatcgcccccaacttcggatgtgcggtcaggaggttgaggttcactattaacaaatgtcataaatatctcatagaggtacagtgccaatagatattcaaatgttgcatgttgaccagagggattttatatctgaagaacatacactattaataaataccttagagaaagattttgacctggctttagataaaactgtggcaagaaaaatgtaatgagcaatatatggaaataaacacacctttgttaaagatactttctaaacttgtgtttaataaactttaatagtcatagaattgtaaatcactatggttaacagaaagtgaaaatattttcatgcagatgatgtgaacagccatgtgaataggtgacttgggcacacagcagggtcatatgacttcagaaaacttcgcttttcagttattccattgttataatgtcaaccctttaagacattgatgtttaggggctcacaaataaaatctgaatacctgtaaggaaagaggttttttatcacataccttaagtctttgtaatgttcatgcttaaattctaag

SEQ ID NO: 432845 - DNA, 495 bp, Homo sapiens
gaattcggctcgaggcccgaggagaccacgctcctggagctctgctgtcttctcagggagactctgaggctctgttgagaatcatgctttggaggcagctcatctattggcaactgctggctttgtttttcctccctttttgcctgtgtcaagatgaatacatggagtctccacaaaccggaggactacccccagactgcagtaagtgttgtcatggagactacagctttcgaggctaccaaggcccccctgggccaccgggccctcctggcattccaggtaaggatgagcaagacatactgtcaatctaattgcagcctgagctaaagtaggagcaaagggcaaaccttaataatttgggatcacttctgtgtgatccaaaggatccgctagactcttggcaccctggaataccaggttcataggctgggaggctcctcaacagcattgagtccgaaacgaccaggtcatagtcttcgttccagtatatctgcc

SEQ ID NO: 432846 - DNA, 1709 bp, Homo sapiens
gaattcggctcgaggcccgaggagaccacgctcctggagctctgctgtcttctcagggagactctgaggctctgttgagaatcatgctttggaggcagctcatctattggcaactgctggctttgtttttcctccctttttgcctgtgtcaagatgaatacatggagtctccacaaaccggaggactacccccagactgcagtaagtgttgtcatggagactacagctttcgaggctaccaaggcccccctgggccaccgggccctcctggcattccaggaaaccatggaaacaatggcaacaatggagccactggtcatgaaggagccaaaggtgagaagggcgacaaaggtgacctggggcctcgaggggagcgggggcagcatggccccaaaggagagaagggctacccggggattccaccagaacttcagattgcattcatggcttctctggcaacccacttcagcaatcagaacagtgggattatcttcagcagtgttgagaccaacattggaaacttctttgatgtcatgactggtagatttggggccccagtatcaggtgtgtatttcttcaccttcagcatgatgaagcatgaggatgttgaggaagtgtatgtgtaccttatgcacaatggcaacacagtcttcagcatgtacagctatgaaatgaagggcaaatcagatacatccagcaatcatgctgtgctgaagctagccaaaggggatgaggtttggctgcgaatgggcaatggcgctctccatggggaccaccaacgcttctccacctttgcaggattcctgctctttgaaactaagtaaatatatgactagaatagctccactttggggaagacttgtagctgagctgatttgttacgatctgaggaacattaaagttgagggttttacattgctgtattcaaaaaattattggttgcaatgttgttcacgctacaggtacaccaataatgttggacaattcaggggctcagaagaatcaaccacaaaatagtcttctcagatgaccttgactaatatactcagcatctttatcactctttccttggcacctaaaagataattctcctctgacgcaggttggaaatatttttttctatcacagaagtcatttgcaaagaattttgactactctgcttttaatttaataccagttttcaggaacccctgaagttttaagttcattattctttataacatttgagagaatcggatgtagtgatatgacagggctggggcaagaacaggggcactagctgccttattagctaatttagtgccctccgtgttcagcttagcctttgaccctttccttttgatccacaaaatacattaaaactctgaattcacatacaatgctattttaaagtcaatagattttagctataaagtgcttgaccagtaatgtggttgtaattttgtgtatgttcccccacatcgcccccaacttcggatgtgcggtcaggaggttgaggttcactattaacaaatgtcataaatatctcatagaggtacagtgccaatagatattcaaatgttgcatgttgaccagagggattttatatctgaagaacatacactattaataaataccttagagaaagattttgacctggctttagataaaactgtggcaagaaaaatgtaatgagcaatatatggaaataaacacacctttgttaaaga

SEQ ID NO: 432847 - DNA, 1400 bp, Homo sapiens
ctccatagattgatgtttattcccaatcttgctgttatgtataatgtttaacaaactaatctgcataaaaacttgacttctttaagataaattgcctatttattgaccaataattctttccttagattgcattcatggcttctctggcaacccacttcagcaatcagaacagtgggattatcttcagcagtgttgagaccaacattggaaacttctttgatgtcatgactggtagatttggggccccagtatcaggtgtgtatttcttcaccttcagcatgatgaagcatgaggatgttgaggaagtgtatgtgtaccttatgcacaatggcaacacagtcttcagcatgtacagctatgaaatgaagggcaaatcagatacatccagcaatcatgctgtgctgaagctagccaaaggggatgaggtttggctgcgaatgggcaatggcgctctccatggggaccaccaacgcttctccacctttgcaggattcctgctctttgaaactaagtaaatatatgactagaatagctccactttggggaagacttgtagctgagctgatttgttacgatctgaggaacattaaagttgagggttttacattgctgtattcaaaaaattattggttgcaatgttgttcacgctacaggtacaccaataatgttggacaattcaggggctcagaagaatcaaccacaaaatagtcttctcagatgaccttgactaatatactcagcatctttatcactctttccttggcacctaaaagataattctcctctgacgcaggttggaaatatttttttctatcacagaagtcatttgcaaagaattttgactactctgcttttaatttaataccagttttcaggaacccctgaagttttaagttcattattctttataacatttgagagaatcggatgtagtgatatgacagggctggggcaagaacaggggcactagctgccttattagctaatttagtgccctccgtgttcagcttagcctttgaccctttccttttgatccacaaaatacattaaaactctgaattcacatacaatgctattttaaagtcaatagattttagctataaagtgcttgaccagtaatgtggttgtaattttgtgtatgttcccccacatcgcccccaacttcggatgtgcggtcaggaggttgaggttcactattaacaaatgtcataaatatctcatagaggtacagtgccaatagatattcaaatgttgcatgttgaccagagggattttatatctgaagaacatacactattaataaataccttagagaaagattttgacctggctttagataaaactgtggcaagaaaaatgtaatgagcaatatatggaaataaacacacctttgttaaaga

SEQ ID NO: 432848 - DNA, 5354 bp, Homo sapiens
tgcggccgcggtgcggggagagcacagcggggagggcgggagccggctctcgggcggcggcgctgaagtttccttcccgccgcgctctcaccccgggctggcgccccgtgccatgcgggagcgctggggcggcggggcaacatgaagggcggcgacagggcttacacccgaggtccctctttggggtggctctttgctaagtgctgctgttgcttcccgtgtagagatgcatactctcattcctcaagcgagaatggaggcaagtccgagtccgtagccaacctgcaggcccagccctccctgaactccatccacagttccccgggtcccaagcgctccaccaacactcttaagaagtggctgacgagtcctgtgcgtcggcttaacagcgggaaggcagatggaaacatcaaaaagcagaagaaagttcgcgatggtcggaagagctttgacctgggatctcccaagcctggggatgaaacaacccctcagggagacagcgctgatgagaagagcaagaaaggttggggtgaagatgagccggatgaagagtcacacacacccctcccaccacctatgaagatttttgacaacgaccctacacaggatgaaatgtcctcctctttgctagcagcccggcaggcttccactgaagtacctactgctgcagaccttgtcaatgcaatagaaaagttggtcaaaaacaagctgagtctagaaggaagctcataccgggggagcttgaaagaccctgcaggctgcctgaatgaggggatggccccacccacacctcctaaaaacccagaagaagaacagaaagccaaggccctgagaggcaggatgtttgtcctgaatgagctggtacagacagagaaagactatgtcaaggatctgggcattgtggtggagggcttcatgaagagaatagaagaaaagggtgtccctgaggatatgcgaggaaaggacaaaatcgtgtttggaaatattcatcagatttatgactggcataaggattttttcctggcggaactggaaaagtgtatccaggagcaagacagattggcacagctctttattaagcacgagcggaagctgcacatctacgtgtggtattgtcagaataagccgcgctcagagtacatcgttgctgagtatgacgcctactttgaggaggtaaaacaggagataaatcagaggctgacactgagtgacttcctcatcaagcccattcagagaataacaaaataccagttgctcctcaaggacttcctgagatacagtgagaaggctggtttggagtgttcagatatcgagaaagcagtggagttaatgtgccttgttcccaaacgctgcaatgacatgatgaatctaggacgtctgcagggctttgagggcactctgactgctcaggggaagctgctgcagcaggacacattctatgtgatcgagctggatgcaggcatgcagtcccggaccaaagagaggcgcgtgttcctcttcgagcagattgtcatcttcagtgaactgctcaggaagggatccctcacccctggctacatgttcaaaaggagcatcaagatgaattacttggtcctggaggagaatgtggacaatgatccctgcaagtttgcactcatgaacagagagacttctgagagggttgttctgcaagccgccaacgctgacatccagcaggcctgggtgcaggacatcaatcaagtcttagaaacacagcgagactttttgaatgcactgcaatcgcccattgagtatcaacggaaagaaaggagcacagctgtgatgaggtctcaacctgccaggcttccccaagccagccccaggccctactcctctgttcctgcgggctcagagaagcccccaaagggctccagctataacccacctctgcctcccctgaagatatctacctccaatggcagtccagggtttgaataccaccagcctggggacaagttcgaagccagcaagaacgacctgggaggctgcaatgggacctcgtccatggccgtgatcaaagattactatgcactgaaggagaatgaaatctgtgtgagccaaggtgaggtggtccaggtcctcgccgtcaaccagcagaacatgtgtctggtgtaccagcctgccagcgaccattcccccgccgccgagggctgggtcccaggcagcatcctggcgcccctcaccaaagccacagcagcagaaagtagtgacgggagcatcaagaagtcatgttcatggcatactctacgcatgagaaagcgggcggaagtggagaacacgggtaaaaatgaagccacagggcctcgtaaacccaaggatattctgggcaacaaagtctctgttaaagagacgaacagttccgaggaatcagagtgtgatgatcttgaccctaatactagcatggagatcttaaatccaaatttcatccaagaagtggccccagaattccttgtgcccttggtggatgtgacctgcttgcttggggacacagtgatactgcagtgcaaagtctgtgggcggccaaagcccaccatcacttggaagggtccagaccagaacatccttgacactgataacagctcagccacatacacggtctcctcttgtgattctggagaaatcaccctgaagatctgtaatctgatgccccaagacagtgggatttatacctgcatagcaacaaatgaccacgggaccacatcaacgtctgcaacagtcaaagtgcaaggtgttccagcagcccctaaccgccccattgcccaggagagaagctgcacctccgtgattctccgctggctgcccccctccagcacaggaaactgcactatttctggttacactgtggagtacagagaggaaggttctcagatctggcagcagtcagtggcttcgaccttggacacttacctcgtcatcgaagaccttagtcccgggtgtccttatcagttcagagtcagtgccagtaacccctggggaatcagccttcccagtgagccctcggagtttgtgcgacttccagaatatgatgctgctgctgatggtgccaccatttcttggaaggaaaattttgactcagcttacactgagctgaatgaaattggaagaggccgtttctctatagtaaagaaatgcattcacaaagctacccgcaaagatgtggctgtgaaatttgttagcaaaaaaatgaagaagaaagaacaggctgcccacgaggctgccctgcttcagcacctacagcacccccagtacatcactctccatgacacctatgagtcccccacatcctacatcctgatcttggaactgatggatgatggccggctcttagactaccttatgaatcatgatgaactgatggaggaaaaagtagctttctatatccgagacatcatggaggctctgcagtaccttcacaactgcagggttgcacatttggacataaagcctgaaaacctgctcattgacctacggattccagtgcctcgagtgaagctcattgacttggaggatgctgtccagatctcgggtcacttccacattcaccacctgctggggaaccctgagtttgctgccccagaagtcattcaaggcatccccgtctccctggggacagacatctggagcatcggggttctgacatatgtcatgctgagtggggtctcccccttcttggatgagagcaaagaggagacatgtatcaacgtatgcagggtggatttcagcttcccccatgaatacttctgtggtgtgagcaatgctgccagagatttcatcaatgtgatcttacaggaagattttcggaggcggcccacagcagccacatgcttgcagcatccatggctgcagccccataatggcagctactctaagatccccctggacacctcccgcctagcatgcttcatagaacgtcgcaagcaccagaatgatgtgcggcctattcccaatgtcaagagctacattgtcaaccgggtgaaccaagggacgtagccatctcccagcccctatggtttcacatagacgtgcagtgtgaaccaaagcaagactgaatgtgactgtaaataattctgttcatcatttcactccgtgcagttctctgaattgagagatgtacctcttaaacctcgtcagtggttattcagggtctgagcagcagtaaaagtcaccctaaatcaaggggcttttcagaaggtcattctgaagaaataaagaggcaaagggtcacagaagtgttcagaagaagggcaaagataagaacaatattagctgttacgaaattttaactgtatcttccaaaatgagtggttaactgggcaaaccttaagctcacaagagtataaaagatctctggctttgctgaaattttaagcaagaagttctatttaatggagatgtcatgtatatcaactattctggtttagataacttagatatagtttcttgataggatagatacccacatacagtataatatatcccattcaggtttcagagtttttctaatatagagatatatatattaaatcaatcacaagtaattttgagtgctccagttaagacagtaatttatttaccgaatcattacattgttttgactaagcacaattagatgacaagtttttttagagcattttatagatcttgtatagaaatcttttaccagaacctgtgcattaagagaaagcaatgttgcccttttgaatgagaaaattttttctgtcaatcgcaggttatttgattaagataggttctttctgtatatgaaacgctccccgcaaattcactggcagctcagaattattctggaaagaaagcctgccaggaaataaattcaaatacagtatgagctgcggggatatttttgtgtctacaccaggtttgaaataagtaaacaaatacaagaggttcatataaaagggcaaatgaaaacctttcctacagttcctatgaacaacgtaccaacactttctgatttcttctacagctgtagaataccatctttcagaaagttggctggctttatttctaactccttattgaagctaaggggtgcttactaaaaggaggcagccatataggccttttaaaggcctggttctaagtcctttttaaagccatggaacaaaacctgatacatcaccctaacagagcattaagttgtaactgagattgcaatacctgtcaccatgcagccgctgatagttctctgaactaaaaggactaattgtactttgaggccaatgctgctttctggtgtatattctccatacaagattattattaactgctctttttccctctggtggaaaaaaaattaaacctgggcatttcatggg

SEQ ID NO: 432849 - DNA, 670 bp, Homo sapiens
gggctctgctctgagcttgtcttcataggtctgtgaagaagttgctcccaagaccctttgtgggaagaaagaagttaggatgaaaggcctattgaaaagccattgctgctctcacctccctgggagcacacattaggtcttgtcccaatagggaagctctaggacctctacaggctgacaaagccatatattcacaaacactgagtgatatggagaatatagaccgagaaactctttgccctaaaatatccaggaagtcatgttcatggcatactctacgcatgagaaagcgggcggaagtggagaacacgggtaaaaatgaagccacagggcctcgtaaacccaaggatattctgggcaacaaagtctctgttaaagagacgaacagttccgaggaatcagagtgtgatgatcttgaccctaatactagcatggaggtagaagcagctattgttgtcctatttcctacaatgattgccttttttgatgtgttctgtaacagtgaccttgctaaaatgaccagccattcaaagataaattgtgatgttggggcatctctgggtatcccatcccagctataaaagaaacaaacaaaaacataattcagttcagtgttggtagaaaactctacctagattttttttaaaaacaaaaacttgttctcttgaat

SEQ ID NO: 432850 - DNA, 604 bp, Homo sapiens
gtggcccttgaggccaagaattgggcacaggaaacgctccccgcaaattcactggcagctcagaattattctggaaagaaagcctgccaggaaataaattcaaatacagtatgagctgcggggatatttttgtgtctacaccaggtttgaaataagtaaacaaatacaagaggttcatataaaagggcaaatgaaaacctttcctacagttcctatgaacaacgtaccaacactttctgatttcttctacagctgtagaataccatctttcagaaagttggctggctttatttctaactccttattgaagctaaggggtgcttactaaaaggaggcagccatataggccttttaaaggcctggttctaagtcctttttaaagccatggaacaaaacctgatacatcaccctaacagagcattaagttgtaactgagattgcaatacctgtcaccatgcagccgctgatagttctctgaactaaaaggactaattgtactttgaggccaatgctgctttctggtgtatattctccatacaagattattattaactgctctttttccctctggtggaaaaaaaattaaacctgggcatttcatggg

SEQ ID NO: 432851 - DNA, 419 bp, Homo sapiens
cccatccaccgtgcccttctcaagaggaattcctcagtcctgtgaggcatcatgggtatggtatacaaactcccttattagagtttagtaacctagcattcatattttctttaaatgccgtagtcaaccttgcacatctaccaggggaggtcagagttcatccttgctcacttccagttggaggcgaggtcagccgccagccacccttggagctggtgtgcaggtttggggcctctgaagcccgggcttgatggagcacctcacctgctgactcacccaagggtggtgagcccgccctccacatcgctgtccctgacctgccattttgattggtgcattttttggtacaacaggaagtcatgttcatggcatactctacgcatgagaggggcggagggggatcctcgacagtcgtcctc

SEQ ID NO: 432852 - DNA, 2027 bp, Homo sapiens
acctctcacattacttaaagattcttcaacttcattggaaaacatgcagacctgtcttccatgcctttgaacccttattcaaagcaccccagttcttcagttcctttttcttctaatattgctgcctgtgtttcaggaggtaaaacaggagataaatcagaggctgacactgagtgacttcctcatcaagcccattcagagaataacaaaataccagttgctcctcaaggacttcctgagatacagtgagaaggctggtttggagtgttcagatatcgagaaagcagtggagttaatgtgccttgttcccaaacgctgcaatgacatgatgaatctaggacgtctgcagggctttgagggcactctgactgctcaggggaagctgctgcagcaggacacattctatgtgatcgagctggatgcaggcatgcagtcccggaccaaagagaggcgcgtgttcctcttcgagcagattgtcatcttcagtgaactgctcaggaagggatccctcacccctggctacatgttcaaaaggagcatcaagatgaattacttggtcctggaggagaatgtggacaatgatccctgcaagtttgcactcatgaacagagagacttctgagagggttgttctgcaagccgccaacgctgacatccagcaggcctgggtgcaggacatcaatcaagtcttagaaacacagcgagactttttgaatgcactgcaatcgcccattgagtatcaacggaaagaaaggagcacagctgtgatgaggtctcaacctgccaggcttccccaagccagccccaggccctactcctctgttcctgcgggctcagagaagcccccaaagggctccagctataacccacctctgcctcccctgaagatatctacctccaatggcagtccagggtttgaataccaccagcctggggacaagttcgaagccagcaagaacgacctgggaggctgcaatgggacctcgtccatggccgtgatcaaagattactatgcactgaaggagaatgaaatctgtgtgagccaaggtgaggtggtccaggtcctcgccgtcaaccagcagaacatgtgtctggtgtaccagcctgccagcgaccattcccccgccgccgagggctgggtcccaggcagcatcctggcgcccctcaccaaagccacagcagcagaaagtagtgacgggagcatcaagtaagtgcctcgttggcttccccgggagaggagtatgaggattaaaaatattcagaaacaaacaaaagaacacaaaaatgcaaacacatggtagggaattactactgcttattctcaacagtaccacagaaccagtgtttgagtgctggcaccatatgcaacatggggcatccgggctggagtgatccagttttttagttggtggtggcgatgatttttctttccttttggtttataattttctgttcatttttccccctttctcccccacattcattaagaaccctactgaaaccctaggtgacaaaaggtgtgccttctgttgccacatttgacccaccacaggactcactggactggacttctatttatattgtattaagtaactgatatatatatatatatatatttttgattgacaccaaaaaattaccttggcacaaatgccagacctgtgaaggtcagaggcccgctgcttctcccaggagggagggaactttttggttgtctgtggcaattcctctgtacagattgtaactttttaaaaatttcccttcaccccgtcacttgaatatatgttcatagtaatttgtaagatacttcttttccttattttggttgcaagacccttccgaacacattcctgtataaagtattttgcactatttaaagaaacccatatggatgaagtcaggatgtgcaatatgatggcgtcacagtgctcatcgttgtacctgtaatgtaactaatcagtttaaatgtactattttaaatatgtaaaataaattttcaccatgagcatgttttaatgaagttaaaga

SEQ ID NO: 432853 - DNA, 1540 bp, Homo sapiens
gccttctctctctttgcacaaccctggcacctcacatatggcaccgttttgttttttgtattttcattatttaggtagatgtcttagttctcccattgccttaaaaacaagggtagtgtttttctcacttatccacacgatgcctaacacaaagccttggacctaagaggcctccaaatccttgtgggattcccaaagcttagagtaaccacctgctcttatcccacagcactgcaatcgcccattgagtatcaacggaaagaaaggagcacagctgtgatgaggtctcaacctgccaggcttccccaagccagccccaggccctactcctctgttcctgcgggctcagagaagcccccaaagggctccagctataacccacctctgcctcccctgaagatatctacctccaatggcagtccagggtttgaataccaccagcctggggacaagttcgaagccagcaagaacgacctgggaggctgcaatgggacctcgtccatggccgtgatcaaagattactatgcactgaaggagaatgaaatctgtgtgagccaaggtgaggtggtccaggtcctcgccgtcaaccagcagaacatgtgtctggtgtaccagcctgccagcgaccattcccccgccgccgagggctgggtcccaggcagcatcctggcgcccctcaccaaagccacagcagcagaaagtagtgacgggagcatcaagtaagtgcctcgttggcttccccgggagaggagtatgaggattaaaaatattcagaaacaaacaaaagaacacaaaaatgcaaacacatggtagggaattactactgcttattctcaacagtaccacagaaccagtgtttgagtgctggcaccatatgcaacatggggcatccgggctggagtgatccagttttttagttggtggtggcgatgatttttctttccttttggtttataattttctgttcatttttccccctttctcccccacattcattaagaaccctactgaaaccctaggtgacaaaaggtgtgccttctgttgccacatttgacccaccacaggactcactggactggacttctatttatattgtattaagtaactgatatatatatatatatatatttttgattgacaccaaaaaattaccttggcacaaatgccagacctgtgaaggtcagaggcccgctgcttctcccaggagggagggaactttttggttgtctgtggcaattcctctgtacagattgtaactttttaaaaatttcccttcaccccgtcacttgaatatatgttcatagtaatttgtaagatacttcttttccttattttggttgcaagacccttccgaacacattcctgtataaagtattttgcactatttaaagaaacccatatggatgaagtcaggatgtgcaatatgatggcgtcacagtgctcatcgttgtacctgtaatgtaactaatcagtttaaatgtactattttaaatatgtaaaataaattttcaccatgagcatgttttaatgaagttaaaga

SEQ ID NO: 432854 - DNA, 1676 bp, Homo sapiens
tgcggccgcggtgcggggagagcacagcggggagggcgggagccggctctcgggcggcggcgctgaagtttccttcccgccgcgctctcaccccgggctggcgccccgtgccatgcgggagcgctggggcggcggggcaacatgaagggcggcgacagggcttacacccgaggtccctctttggggtggctctttgctaagtgctgctgttgcttcccgtgtagagatgcatactctcattcctcaagcgagaatggaggcaagtccgagtccgtagccaacctgcaggcccagccctccctgaactccatccacagttccccgggtcccaagcgctccaccaacactcttaagaagtggctgacgagtcctgtgcgtcggcttaacagcgggaaggcagatggaaacatcaaaaagcagaagaaagttcgcgatggtcggaagagctttgacctgggatctcccaagcctggggatgaaacaacccctcagggagacagcgctgatgagaagagcaagaaaggttggggtgaagatgagccggatgaagagtcacacacacccctcccaccacctatgaagatttttgacaacgaccctacacaggatgaaatgagtctagaaggaagctcataccgggggagcttgaaagaccctgcaggctgcctgaatgaggggatggccccacccacacctcctaaaaacccagaagaagaacagaaagccaaggccctgagaggcaggatgtttgtcctgaatgagctggtacagacagagaaagactatgtcaaggatctgggcattgtggtggagggcttcatgaagagaatagaagaaaagggtgtccctgaggatatgcgaggaaaggacaaaatcgtgtttggaaatattcatcagatttatgactggcataaggattttttcctggcggaactggaaaagtgtatccaggagcaagacagattggcacagctctttattaagcacgagcggaagctgcacatctacgtgtggtattgtcagaataagccgcgctcagagtacatcgttgctgagtatgacgcctactttgaggaggtaaaacaggagataaatcagaggctgacactgagtgacttcctcatcaagcccattcagagaataacaaaataccagttgctcctcaaggacttcctgagatacagtgagaaggctggtttggagtgttcagatatcgagaaagcagtggagttaatgtgccttgttcccaaacgctgcaatgacatgatgaatctaggacgtctgcagggctttgagggcactctgactgctcaggggaagctgctgcagcaggacacattctatgtgatcgagctggatgcaggcatgcagtcccggaccaaagagaggcgcgtgttcctcttcgagcagattgtcatcttcagtgaactgctcaggaagggatccctcacccctggctacatgttcaaaaggagcatcaagatgaattacttggtcctggaggagaatgtggacaatgatccctgcaagtttgcactcatgaacagagagacttctgagagggttgttctgcaagccgccaacgctgacatccagcaggcctgggtgcaggacatcaatctctccgtagatacactgctgctacgttataactgtgtccctgtatagctgttcct

SEQ ID NO: 432855 - DNA, 443 bp, Homo sapiens
gaagtggctgacgagtcctgtgcgtcggcttaacagcgggaaggcagatggaaacatcaaaaagcagaagaaagttcgcgatggtcggaagagctttgacctgggatctcccaagcctggggatgaaacaacccctcagggagacagcgctgatgaggtacttacagggggccctggagttgtccatcaggagggccttctgacatgtctccttcctcaggttttgtcaactaggccatctcaaatctccattagtgtgttaccttgagcctaagtgatttggattctttttattcttaagacattggccagtttgatttgtggctgattcagaagctgactagcccctaagacttccagcagacagaaaccatttgccagatttggagataggacctgggcctgaggggagtcatttggtcattagttccctacctctacta

SEQ ID NO: 432856 - DNA, 2965 bp, Homo sapiens
tgcggccgcggtgcggggagagcacagcggggagggcgggagccggctctcgggcggcggcgctgaagtttccttcccgccgcgctctcaccccgggctggcgccccgtgccatgcgggagcgctggggcggcggggcaacatgaagggcggcgacagggcttacacccgaggtccctctttggggtggctctttgctaagtgctgctgttgcttcccgtgtagagatgcatactctcattcctcaagcgagaatggaggcaagtccgagtccgtagccaacctgcaggcccagccctccctgaactccatccacagttccccgggtcccaagcgctccaccaacactcttaagaagtggctgacgagtcctgtgcgtcggcttaacagcgggaaggcagatggaaacatcaaaaagcagaagaaagttcgcgatggtcggaagagctttgacctgggatctcccaagcctggggatgaaacaacccctcagggagacagcgctgatgagaagagcaagaaaggttggggtgaagatgagccggatgaagagtcacacacacccctcccaccacctatgaagatttttgacaacgaccctacacaggatgaaatgagtctagaaggaagctcataccgggggagcttgaaagaccctgcaggctgcctgaatgaggggatggccccacccacacctcctaaaaacccagaagaagaacagaaagccaaggccctgagaggcaggatgtttgtcctgaatgagctggtacagacagagaaagactatgtcaaggatctgggcattgtggtggagggcttcatgaagagaatagaagaaaagggtgtccctgaggatatgcgaggaaaggacaaaatcgtgtttggaaatattcatcagatttatgactggcataaggattttttcctggcggaactggaaaagtgtatccaggagcaagacagattggcacagctctttattaagcacgagcggaagctgcacatctacgtgtggtattgtcagaataagccgcgctcagagtacatcgttgctgagtatgacgcctactttgaggaggtaaaacaggagataaatcagaggctgacactgagtgacttcctcatcaagcccattcagagaataacaaaataccagttgctcctcaaggacttcctgagatacagtgagaaggctggtttggagtgttcagatatcgagaaagcagtggagttaatgtgccttgttcccaaacgctgcaatgacatgatgaatctaggacgtctgcagggctttgagggcactctgactgctcaggggaagctgctgcagcaggacacattctatgtgatcgagctggatgcaggcatgcagtcccggaccaaagagaggcgcgtgttcctcttcgagcagattgtcatcttcagtgaactgctcaggaagggatccctcacccctggctacatgttcaaaaggagcatcaagatgaattacttggtcctggaggagaatgtggacaatgatccctgcaagtttgcactcatgaacagagagacttctgagagggttgttctgcaagccgccaacgctgacatccagcaggcctgggtgcaggacatcaatcaagtcttagaaacacagcgagactttttgaatgcactgcaatcgcccattgagtatcaacggaaagaaaggagcacagctgtgatgaggtctcaacctgccaggcttccccaagccagccccaggccctactcctctgttcctgcgggctcagagaagcccccaaagggctccagctataacccacctctgcctcccctgaagatatctacctccaatggcagtccagggtttgaataccaccagcctggggacaagttcgaagccagcaagaacgacctgggaggctgcaatgggacctcgtccatggccgtgatcaaagattactatgcactgaaggagaatgaaatctgtgtgagccaaggtgaggtggtccaggtcctcgccgtcaaccagcagaacatgtgtctggtgtaccagcctgccagcgaccattcccccgccgccgagggctgggtcccaggcagcatcctggcgcccctcaccaaagccacagcagcagaaagtagtgacgggagcatcaagtaagtgcctcgttggcttccccgggagaggagtatgaggattaaaaatattcagaaacaaacaaaagaacacaaaaatgcaaacacatggtagggaattactactgcttattctcaacagtaccacagaaccagtgtttgagtgctggcaccatatgcaacatggggcatccgggctggagtgatccagttttttagttggtggtggcgatgatttttctttccttttggtttataattttctgttcatttttccccctttctcccccacattcattaagaaccctactgaaaccctaggtgacaaaaggtgtgccttctgttgccacatttgacccaccacaggactcactggactggacttctatttatattgtattaagtaactgatatatatatatatatatatttttgattgacaccaaaaaattaccttggcacaaatgccagacctgtgaaggtcagaggcccgctgcttctcccaggagggagggaactttttggttgtctgtggcaattcctctgtacagattgtaactttttaaaaatttcccttcaccccgtcacttgaatatatgttcatagtaatttgtaagatacttcttttccttattttggttgcaagacccttccgaacacattcctgtataaagtattttgcactatttaaagaaacccatatggatgaagtcaggatgtgcaatatgatggcgtcacagtgctcatcgttgtacctgtaatgtaactaatcagtttaaatgtactattttaaatatgtaaaataaattttcaccatgagcatgttttaatgaagttaaaga

SEQ ID NO: 432857 - DNA, 5641 bp, Homo sapiens
tgcggccgcggtgcggggagagcacagcggggagggcgggagccggctctcgggcggcggcgctgaagtttccttcccgccgcgctctcaccccgggctggcgccccgtgccatgcgggagcgctggggcggcggggcaacatgaagggcggcgacagggcttacacccgaggtccctctttggggtggctctttgctaagtgctgctgttgcttcccgtgtagagatgcatactctcattcctcaagcgagaatggaggcaagtccgagtccgtagccaacctgcaggcccagccctccctgaactccatccacagttccccgggtcccaagcgctccaccaacactcttaagaagtggctgacgagtcctgtgcgtcggcttaacagcgggaaggcagatggaaacatcaaaaagcagaagaaagttcgcgatggtcggaagagctttgacctgggatctcccaagcctggggatgaaacaacccctcagggagacagcgctgatgagaagagcaagaaaggttggggtgaagatgagccggatgaagagtcacacacacccctcccaccacctatgaagatttttgacaacgaccctacacaggatgaaatgagtctagaaggaagctcataccgggggagcttgaaagaccctgcaggctgcctgaatgaggggatggccccacccacacctcctaaaaacccagaagaagaacagaaagccaaggccctgagaggcaggatgtttgtcctgaatgagctggtacagacagagaaagactatgtcaaggatctgggcattgtggtggagggcttcatgaagagaatagaagaaaagggtgtccctgaggatatgcgaggaaaggacaaaatcgtgtttggaaatattcatcagatttatgactggcataaggattttttcctggcggaactggaaaagtgtatccaggagcaagacagattggcacagctctttattaagcacgagcggaagctgcacatctacgtgtggtattgtcagaataagccgcgctcagagtacatcgttgctgagtatgacgcctactttgaggaggtaaaacaggagataaatcagaggctgacactgagtgacttcctcatcaagcccattcagagaataacaaaataccagttgctcctcaaggacttcctgagatacagtgagaaggctggtttggagtgttcagatatcgagaaagcagtggagttaatgtgccttgttcccaaacgctgcaatgacatgatgaatctaggacgtctgcagggctttgagggcactctgactgctcaggggaagctgctgcagcaggacacattctatgtgatcgagctggatgcaggcatgcagtcccggaccaaagagaggcgcgtgttcctcttcgagcagattgtcatcttcagtgaactgctcaggaagggatccctcacccctggctacatgttcaaaaggagcatcaagatgaattacttggtcctggaggagaatgtggacaatgatccctgcaagtttgcactcatgaacagagagacttctgagagggttgttctgcaagccgccaacgctgacatccagcaggcctgggtgcaggacatcaatcaagtcttagaaacacagcgagactttttgaatgcactgcaatcgcccattgagtatcaacggaaagaaaggagcacagctgtgatgaggtctcaacctgccaggcttccccaagccagccccaggccctactcctctgttcctgcgggctcagagaagcccccaaagggctccagctataacccacctctgcctcccctgaagatatctacctccaatggcagtccagggtttgaataccaccagcctggggacaagttcgaagccagcaagaacgacctgggaggctgcaatgggacctcgtccatggccgtgatcaaagattactatgcactgaaggagaatgaaatctgtgtgagccaaggtgaggtggtccaggtcctcgccgtcaaccagcagaacatgtgtctggtgtaccagcctgccagcgaccattcccccgccgccgagggctgggtcccaggcagcatcctggcgcccctcaccaaagccacagcagcagaaagtagtgacgggagcatcaagaagtcatgttcatggcatactctacgcatgagaaagcgggcggaagtggagaacacgggtaaaaatgaagccacagggcctcgtaaacccaaggatattctgggcaacaaagtctctgttaaagagacgaacagttccgaggaatcagagtgtgatgatcttgaccctaatactagcatggagatcttaaatccaaatttcatccaagaagtggccccagaattccttgtgcccttggtggatgtgacctgcttgcttggggacacagtgatactgcagtgcaaagtctgtgggcggccaaagcccaccatcacttggaagggtccagaccagaacatccttgacactgataacagctcagccacatacacggtctcctcttgtgattctggagaaatcaccctgaagatctgtaatctgatgccccaagacagtgggatttatacctgcatagcaacaaatgaccacgggaccacatcaacgtctgcaacagtcaaagtgcaaggtgttccagcagcccctaaccgccccattgcccaggagagaagctgcacctccgtgattctccgctggctgcccccctccagcacaggaaactgcactatttctggttacactgtggagtacagagaggaaggttctcagatctggcagcagtcagtggcttcgaccttggacacttacctcgtcatcgaagaccttagtcccgggtgtccttatcagttcagagtcagtgccagtaacccctggggaatcagccttcccagtgagccctcggagtttgtgcgacttccagaatatgatgctgctgctgatggtgccaccatttcttggaaggaaaattttgactcagcttacactgagctgaatgaaattggaagaggccgtttctctatagtaaagaaatgcattcacaaagctacccgcaaagatgtggctgtgaaatttgttagcaaaaaaatgaagaagaaagaacaggctgcccacgaggctgccctgcttcagcacctacagcacccccagtacatcactctccatgacacctatgagtcccccacatcctacatcctgatcttggaactgatggatgatggccggctcttagactaccttatgaatcatgatgaactgatggaggaaaaagtagctttctatatccgagacatcatggaggctctgcagtaccttcacaactgcagggttgcacatttggacataaagcctgaaaacctgctcattgacctacggattccagtgcctcgagtgaagctcattgacttggaggatgctgtccagatctcgggtcacttccacattcaccacctgctggggaaccctgagtttgctgccccagaagtcattcaaggcatccccgtctccctggggacagacatctggagcatcggggttctgacatatgtcatgctgagtggggtctcccccttcttggatgagagcaaagaggagacatgtatcaacgtatgcagggtggatttcagcttcccccatgaatacttctgtggtgtgagcaatgctgccagagatttcatcaatgtgatcttacaggaagattttcggaggcggcccacagcagccacatgcttgcagcatccatggctgcagccccataatggcagctactctaagatccccctggacacctcccgcctagcatgcttcatagaacgtcgcaagcaccagaatgatgtgcggcctattcccaatgtcaagagctacattgtcaaccgggtgaaccaagggacgtagccatctcccagcccctatggtttcacatagacgtgcagtgtgaaccaaagcaagactgaatgtgactgtaaataattctgttcatcatttcactccgtgcagttctctgaattgagagatgtacctcttaaacctcgtcagtggttattcagggtctgagcagcagtaaaagtcaccctaaatcaaggggcttttcagaaggtcattctgaagaaataaagaggcaaagggtcacagaagtgttcagaagaagggcaaagataagaacaatattagctgttacgaaattttaactgtatcttccaaaatgagtggttaactgggcaaaccttaagctcacaagagtataaaagatctctggctttgctgaaattttaagcaagaagttctatttaatggagatgtcatgtatatcaactattctggtttagataacttagatatagtttcttgataggatagatacccacatacagtataatatatcccattcaggtttcagagtttttctaatatagagatatatatattaaatcaatcacaagtaattttgagtgctccagttaagacagtaatttatttaccgaatcattacattgttttgactaagcacaattagatgacaagtttttttagagcattttatagatcttgtatagaaatcttttaccagaacctgtgcattaagagaaagcaatgttgcccttttgaatgagaaaattttttctgtcaatcgcaggttatttgattaagataggttctttctgtatatgaaacgctccccgcaaattcactggcagctcagaattattctggaaagaaagcctgccaggaaataaattcaaatacagtatgagctgcggggatatttttgtgtctacaccaggtttgaaataagtaaacaaatacaagaggttcatataaaagggcaaatgaaaacctttcctacagttcctatgaacaacgtaccaacactttctgatttcttctacagctgtagaataccatctttcagaaagttggctggctttatttctaactccttattgaagctaaggggtgcttactaaaaggaggcagccatataggccttttaaaggcctggttctaagtcctttttaaagccatggaacaaaacctgatacatcaccctaacagagcattaagttgtaactgagattgcaatacctgtcaccatgcagccgctgatagttctctgaactaaaaggactaattgtactttgaggccaatgctgctttctggtgtatattctccatacaagattattattaactgctctttttccctctggtggaaaaaaaattaaacctgggcatttcatgggttttctttctttatttttgttcatttgttttggagggagggagcttgttttttgtgtttgtacatgatcccacccttagttttcctagaatgtgtgttgaaaattgcgattatacaagtaagattttaaaaatgtaactcaagtgtttgttcaaatcaggtttaatggtgttgcttctctcctataatgggatagagaaaattaaaatcacgtagtacagaagtgcaagaagagaatttatgaaggatgaatagaactacaaacctatctaaatgaaaaagaaatggtggaaactaagcctgaactttaacatataaaaaacacttattcccacagagaaaatgtaaaattaaaaatcatcatctttttttttcaaaaaaaat

SEQ ID NO: 432858 - DNA, 3750 bp, Homo sapiens
gggctctgctctgagcttgtcttcataggtctgtgaagaagttgctcccaagaccctttgtgggaagaaagaagttaggatgaaaggcctattgaaaagccattgctgctctcacctccctgggagcacacattaggtcttgtcccaatagggaagctctaggacctctacaggctgacaaagccatatattcacaaacactgagtgatatggagaatatagaccgagaaactctttgccctaaaatatccaggaagtcatgttcatggcatactctacgcatgagaaagcgggcggaagtggagaacacgggtaaaaatgaagccacagggcctcgtaaacccaaggatattctgggcaacaaagtctctgttaaagagacgaacagttccgaggaatcagagtgtgatgatcttgaccctaatactagcatggagatcttaaatccaaatttcatccaagaagtggccccagaattccttgtgcccttggtggatgtgacctgcttgcttggggacacagtgatactgcagtgcaaagtctgtgggcggccaaagcccaccatcacttggaagggtccagaccagaacatccttgacactgataacagctcagccacatacacggtctcctcttgtgattctggagaaatcaccctgaagatctgtaatctgatgccccaagacagtgggatttatacctgcatagcaacaaatgaccacgggaccacatcaacgtctgcaacagtcaaagtgcaaggtgttccagcagcccctaaccgccccattgcccaggagagaagctgcacctccgtgattctccgctggctgcccccctccagcacaggaaactgcactatttctggttacactgtggagtacagagaggaaggttctcagatctggcagcagtcagtggcttcgaccttggacacttacctcgtcatcgaagaccttagtcccgggtgtccttatcagttcagagtcagtgccagtaacccctggggaatcagccttcccagtgagccctcggagtttgtgcgacttccagaatatgatgctgctgctgatggtgccaccatttcttggaaggaaaattttgactcagcttacactgagctgaatgaaattggaagaggccgtttctctatagtaaagaaatgcattcacaaagctacccgcaaagatgtggctgtgaaatttgttagcaaaaaaatgaagaagaaagaacaggctgcccacgaggctgccctgcttcagcacctacagcacccccagtacatcactctccatgacacctatgagtcccccacatcctacatcctgatcttggaactgatggatgatggccggctcttagactaccttatgaatcatgatgaactgatggaggaaaaagtagctttctatatccgagacatcatggaggctctgcagtaccttcacaactgcagggttgcacatttggacataaagcctgaaaacctgctcattgacctacggattccagtgcctcgagtgaagctcattgacttggaggatgctgtccagatctcgggtcacttccacattcaccacctgctggggaaccctgagtttgctgccccagaagtcattcaaggcatccccgtctccctggggacagacatctggagcatcggggttctgacatatgtcatgctgagtggggtctcccccttcttggatgagagcaaagaggagacatgtatcaacgtatgcagggtggatttcagcttcccccatgaatacttctgtggtgtgagcaatgctgccagagatttcatcaatgtgatcttacaggaagattttcggaggcggcccacagcagccacatgcttgcagcatccatggctgcagccccataatggcagctactctaagatccccctggacacctcccgcctagcatgcttcatagaacgtcgcaagcaccagaatgatgtgcggcctattcccaatgtcaagagctacattgtcaaccgggtgaaccaagggacgtagccatctcccagcccctatggtttcacatagacgtgcagtgtgaaccaaagcaagactgaatgtgactgtaaataattctgttcatcatttcactccgtgcagttctctgaattgagagatgtacctcttaaacctcgtcagtggttattcagggtctgagcagcagtaaaagtcaccctaaatcaaggggcttttcagaaggtcattctgaagaaataaagaggcaaagggtcacagaagtgttcagaagaagggcaaagataagaacaatattagctgttacgaaattttaactgtatcttccaaaatgagtggttaactgggcaaaccttaagctcacaagagtataaaagatctctggctttgctgaaattttaagcaagaagttctatttaatggagatgtcatgtatatcaactattctggtttagataacttagatatagtttcttgataggatagatacccacatacagtataatatatcccattcaggtttcagagtttttctaatatagagatatatatattaaatcaatcacaagtaattttgagtgctccagttaagacagtaatttatttaccgaatcattacattgttttgactaagcacaattagatgacaagtttttttagagcattttatagatcttgtatagaaatcttttaccagaacctgtgcattaagagaaagcaatgttgcccttttgaatgagaaaattttttctgtcaatcgcaggttatttgattaagataggttctttctgtatatgaaacgctccccgcaaattcactggcagctcagaattattctggaaagaaagcctgccaggaaataaattcaaatacagtatgagctgcggggatatttttgtgtctacaccaggtttgaaataagtaaacaaatacaagaggttcatataaaagggcaaatgaaaacctttcctacagttcctatgaacaacgtaccaacactttctgatttcttctacagctgtagaataccatctttcagaaagttggctggctttatttctaactccttattgaagctaaggggtgcttactaaaaggaggcagccatataggccttttaaaggcctggttctaagtcctttttaaagccatggaacaaaacctgatacatcaccctaacagagcattaagttgtaactgagattgcaatacctgtcaccatgcagccgctgatagttctctgaactaaaaggactaattgtactttgaggccaatgctgctttctggtgtatattctccatacaagattattattaactgctctttttccctctggtggaaaaaaaattaaacctgggcatttcatgggttttctttctttatttttgttcatttgttttggagggagggagcttgttttttgtgtttgtacatgatcccacccttagttttcctagaatgtgtgttgaaaattgcgattatacaagtaagattttaaaaatgtaactcaagtgtttgttcaaatcaggtttaatggtgttgcttctctcctataatgggatagagaaaattaaaatcacgtagtacagaagtgcaagaagagaatttatgaaggatgaatagaactacaaacctatctaaatgaaaaagaaatggtggaaactaagcctgaactttaacatataaaaaacacttattcccacagagaaaatgtaaaattaaaaatcatcatctttttttttcaaaaaaaat

SEQ ID NO: 432859 - DNA, 314 bp, Homo sapiens
atatgctttcagagcatgtttattaatatcatgtcattgctcaagagagaatgctgcctgctgcctaccctgctagtgggagatttggccttgaaccactgggtagggtgcagagcaagcccatgtgaactagcgtccttgtgtttgtgcccctctcacccttatctcccagcagaacgacctgggaggctgcaatgggacctcgtccatggccgtgatcaaagattactatgcactgaaggagaatgaaatctgtgtgagccaaggtgaggtggtccaggtcctcgccgtcaaccagcagaacatgtgtctgg

SEQ ID NO: 432860 - DNA, 3626 bp, Homo sapiens
aagaaaattgtaatttgatatttaattgccactttggaaaataaaatcatgcatttataaatatcccacaaagttttagtaataaagattgttgattgccctgcttgccagtaagaaggaagagattttgaatacatataatgcagaactgtgttgtttatgaatgccaattcatgaagtcttaacaattggttctttatttttgttttcaatttatggccgagtttggttttgctgttttggactgtctcaactccctgctgatgccaccatacagagtcagatcagtgcaaaaaccgaggtcctgcggggtgactgccccagacgccgctggtgacgggctgcgccgaggtcgagacgccaggcttcaggtacacgtaccagaaatgacgtcacaggcggtgccaggcggggatccacgagctctggatgcttgcttggccggaagcgacgccccgcaaggacccgccccgccccgccccgccccgcgcgagccggtagttgcgcctcccagactgcagttggccagctctcggggtgcggagcccggcgggctaggcgaggcgcgggctggccccgcccctcaggccggcgagtccccttctcagagacttggctaggcgcggcgcgaggcgggcgctgcggcgccagcagccctgtggtggcgacgacgatggaccaggagccagtgggcggtgtggaacgaggagaagccgtcgcagcctcgggagctgcggccgccgcggcattcggggaatctgcagggcagatgagtaacgaaagaggctttgaaaatgtagaactgggagtcataggaaaaaagaagaaagtcccaaggagagtcatccactttgttagtggtgaaacaatggaagaatatagcacagatgaagacgaagttgatggcctggagaagaaagatgttttgcctactgttgatccgacaaaacttacctggggtccctacttatggttttacatgcttcgggctgctacatcaactctctcagtgtgtgacttccttggagagaagattgcatctgttttgggtatcagcaccccaaagtaccaatatgccattgatgaatattatcggatgaagaaggaggaagaagaagaagaagaagaaaacaggatgtctgaagaagcagaaaaacaatatcaacagaataaattgcagactgattccattgttcagacagatcaaccagagacagtgatatccagctcatttgtgaatgtcaattttgaaatggagggagacagtgaagtaattatggaaagcaagcaaaatccagtctctgtcccaccataaaatgaaatgactatcaagcttcaaactcttaagtgtttttttttttaatacaaaaactttcacattctttattcagtgggacttaatacaattatttatattttaaattattaaagtatctggaaagggaaaatgttttcttcatttttaggatctatctagcaaaagccagatctgaaattcagatatttgtactgtttttactgtgtatagaaattagtgctttggttttaaaatgatcttttaaaaaagttaaggacatcctagagccttaatagttaagaagagttaaattatcaagcctatttgtgcatttgctttttttgaaaaaggtaagttgctgattaagtctaattggaattgataattccatagtcttagattaaaatgaggatattttctcctagattttctcatgttatgccatgcatttatatatctaaccattaatttcacactaaggatgcttcaccatataataaaaggagcaagatggaagcactttgaattttctttcattgagaataactgttttatgtaagaatctgtatttataacaccagatattaagataggcttccattttttaatgcaagccacttacttaatcttgtattctttttcaggactcaaataactagctttgaacataatattaaaacactacttatagaatagatttattaatgttaatacctagtgaatatccatgtggcatcctggttatgttatcggttcagcgttaatcctatagaaaagtggtttggaggggattgggggatagtgggacaggtatagatttaatccatcaggagcaattagatattgtataaggtgcaatgatagcctaatgaaattacccgtcattcatcatttagaagtagcaacagtgaagactggacagtttacttgaatctggttggccactcctctacctacttggttatttgtaaaccttacaaatgtatatattgtgaagctaattttgaaaatattcctaaatatggccaggtacggtgctcacacctgtaatcccagcactttgggaggctgaagtgggcagattacttgaggtcaggagtttgagaccagcctggccaacgtagtgaaaccccgtctctacaaaaatacaaaaattagccaggcgtggtggtgcacgtctgtaatcccagctgctcgggaggctgaggcaggagaatcacttgaaccagggaggtggaggttgcagtgagccaagattgcaccactgcactccagcctgggcgacagagtgagactccatcttggggggaaaaaagtatatatatatacacacacacagacacacacacacacacatatatctctaaatgtgtgtatagaaccttttatcagtataacattgatttataattaaatgtgggtgaggaagaatgtgtggagtgtttcagaaattttgatcttaaaagccttttcagaaactcaaagctttcagaaattaatagttatattaatagccttctaaacagcattaagttttcaattttaatatatctatataaaatatagtgtcaaagaaagtaacatcaatatagtgggtctgtaatggaaatctgtcaatgaacatgaactgagttcttcaactacaggttgaaggataattaaacttttcattaggagtgttcagctacatggattcatggaatggtggttcatagtaagtgatggtaatctttttattcatgggtgtaaaccctttataacttagtgcttaaaatattaatcttttgattatataatgtcccatgaattatagtttaccaatagttctaaaacatgctaacctgaccttttccttctaatttgtttttaacttcattcgagatagtacctctcactcacagatatttatttggttatcaagtgaagataggtgtgtctaaaagtgatcttctgaatcctgtctccctagaggtactagtatctagagtttacccagaaaattttatgattgtaacaaaaggaagtagtgacttatgaaggttttgtttcttgaattttacttttgctacttgtccaatagtggctagtttatgtttatcaatatagttattcactgtgccttaagtttatactttgtttatgcaaactataaaatttcccataaatgtaaacaacatcacacaacaacacaacgacactgtcggaacacaaaaaaatttcgccccgcgcccaagattaacacgtgggcgcgcagaaaaaaagccaagcccgaacacgaaaacggcgtccaaaaacaccgcagggggacacggtcgggccggaaatcacc

SEQ ID NO: 432861 - DNA, 3724 bp, Homo sapiens
aagaaaattgtaatttgatatttaattgccactttggaaaataaaatcatgcatttataaatatcccacaaagttttagtaataaagattgttgattgccctgcttgccagtaagaaggaagagattttgaatacatataatgcagaactgtgttgtttatgaatgccaattcatgaagtcttaacaattggttctttatttttgttttcaatttatggccgagtttggttttgctgttttggactgtctcaactccctgctgatgccaccatacagagtcagatcagtgcaaaaaccgaggtcctgcggggtgactgccccagacgccgctggtgacgggctgcgccgaggtcgagacgccaggcttcaggtacacgtaccagaaatgacgtcacaggcggtgccaggcggggatccacgagctctggatgcttgcttggccggaagcgacgccccgcaaggacccgccccgccccgccccgccccgcgcgagccggtagttgcgcctcccagactgcagttggccagctctcggggtgcggagcccggcgggctaggcgaggcgcgggctggccccgcccctcaggccggcgagtccccttctcagagacttggctaggcgcggcgcgaggcgggcgctgcgggtgagtcccacttcccgacagcctggctcggccagcgactgggcggggagaccaaggatggaagtgggcttaccggccattaccctctttctcaccagcgccagcagccctgtggtggcgacgacgatggaccaggagccagtgggcggtgtggaacgaggagaagccgtcgcagcctcgggagctgcggccgccgcggcattcggggaatctgcagggcagatgagtaacgaaagaggctttgaaaatgtagaactgggagtcataggaaaaaagaagaaagtcccaaggagagtcatccactttgttagtggtgaaacaatggaagaatatagcacagatgaagacgaagttgatggcctggagaagaaagatgttttgcctactgttgatccgacaaaacttacctggggtccctacttatggttttacatgcttcgggctgctacatcaactctctcagtgtgtgacttccttggagagaagattgcatctgttttgggtatcagcaccccaaagtaccaatatgccattgatgaatattatcggatgaagaaggaggaagaagaagaagaagaagaaaacaggatgtctgaagaagcagaaaaacaatatcaacagaataaattgcagactgattccattgttcagacagatcaaccagagacagtgatatccagctcatttgtgaatgtcaattttgaaatggagggagacagtgaagtaattatggaaagcaagcaaaatccagtctctgtcccaccataaaatgaaatgactatcaagcttcaaactcttaagtgtttttttttttaatacaaaaactttcacattctttattcagtgggacttaatacaattatttatattttaaattattaaagtatctggaaagggaaaatgttttcttcatttttaggatctatctagcaaaagccagatctgaaattcagatatttgtactgtttttactgtgtatagaaattagtgctttggttttaaaatgatcttttaaaaaagttaaggacatcctagagccttaatagttaagaagagttaaattatcaagcctatttgtgcatttgctttttttgaaaaaggtaagttgctgattaagtctaattggaattgataattccatagtcttagattaaaatgaggatattttctcctagattttctcatgttatgccatgcatttatatatctaaccattaatttcacactaaggatgcttcaccatataataaaaggagcaagatggaagcactttgaattttctttcattgagaataactgttttatgtaagaatctgtatttataacaccagatattaagataggcttccattttttaatgcaagccacttacttaatcttgtattctttttcaggactcaaataactagctttgaacataatattaaaacactacttatagaatagatttattaatgttaatacctagtgaatatccatgtggcatcctggttatgttatcggttcagcgttaatcctatagaaaagtggtttggaggggattgggggatagtgggacaggtatagatttaatccatcaggagcaattagatattgtataaggtgcaatgatagcctaatgaaattacccgtcattcatcatttagaagtagcaacagtgaagactggacagtttacttgaatctggttggccactcctctacctacttggttatttgtaaaccttacaaatgtatatattgtgaagctaattttgaaaatattcctaaatatggccaggtacggtgctcacacctgtaatcccagcactttgggaggctgaagtgggcagattacttgaggtcaggagtttgagaccagcctggccaacgtagtgaaaccccgtctctacaaaaatacaaaaattagccaggcgtggtggtgcacgtctgtaatcccagctgctcgggaggctgaggcaggagaatcacttgaaccagggaggtggaggttgcagtgagccaagattgcaccactgcactccagcctgggcgacagagtgagactccatcttggggggaaaaaagtatatatatatacacacacacagacacacacacacacacatatatctctaaatgtgtgtatagaaccttttatcagtataacattgatttataattaaatgtgggtgaggaagaatgtgtggagtgtttcagaaattttgatcttaaaagccttttcagaaactcaaagctttcagaaattaatagttatattaatagccttctaaacagcattaagttttcaattttaatatatctatataaaatatagtgtcaaagaaagtaacatcaatatagtgggtctgtaatggaaatctgtcaatgaacatgaactgagttcttcaactacaggttgaaggataattaaacttttcattaggagtgttcagctacatggattcatggaatggtggttcatagtaagtgatggtaatctttttattcatgggtgtaaaccctttataacttagtgcttaaaatattaatcttttgattatataatgtcccatgaattatagtttaccaatagttctaaaacatgctaacctgaccttttccttctaatttgtttttaacttcattcgagatagtacctctcactcacagatatttatttggttatcaagtgaagataggtgtgtctaaaagtgatcttctgaatcctgtctccctagaggtactagtatctagagtttacccagaaaattttatgattgtaacaaaaggaagtagtgacttatgaaggttttgtttcttgaattttacttttgctacttgtccaatagtggctagtttatgtttatcaatatagttattcactgtgccttaagtttatactttgtttatgcaaactataaaatttcccataaatgtaaacaacatcacacaacaacacaacgacactgtcggaacacaaaaaaatttcgccccgcgcccaagattaacacgtgggcgcgcagaaaaaaagccaagcccgaacacgaaaacggcgtccaaaaacaccgcagggggacacggtcgggccggaaatcacc

SEQ ID NO: 432862 - DNA, 3373 bp, Homo sapiens
aagaaaattgtaatttgatatttaattgccactttggaaaataaaatcatgcatttataaatatcccacaaagttttagtaataaagattgttgattgccctgcttgccagtaagaaggaagagattttgaatacatataatgcagaactgtgttgtttatgaatgccaattcatgaagtcttaacaattggttctttatttttgttttcaatttatggccgagtttggttttgctgttttggactgtctcaactccctgctgatgccaccatacagagtcagatcagtgcaaaaaccgaggtcctgcggggtgactgccccagacgccgctggtgacgggctgcgccgaggtcgagacgccaggcttcaggtacacgtaccagaaatgacgtcacaggcggtgccaggcggggatccacgagctctggatgcttgcttggccggaagcgacgccccgcaaggacccgccccgccccgccccgccccgcgcgagccggtagttgcgcctcccagactgcagttggccagctctcggggtgcggagcccggcgggctaggcgaggcgcgggctggccccgcccctcaggccggcgagtccccttctcagagacttggctaggcgcggcgcgaggcgggcgctgcggcgccagcagccctgtggtggcgacgacgatggaccaggagccagtgggcggtgtggaacgaggagaagccgtcgcagcctcgggagctgcggccgccgcggcattcggggaatctgcagggcagatgagtaacgaaagaggctttgaaaatgtagaactgggagtcataggaaaaaagaagaaagtcccaaggagagtcatccactttgttagtggtgaaacaatggaagaatatagcacagatgaagacgaagttgatggcctggagaagaaagatgttttgcctactgttgatccgacaaaacttacctggggtccctacttatggttttacatgcttcgggctgctacatcaactctctcagtgtgtgacttccttggagagaagattgcatctgttttgggtatcagcaccccaaagtaccaatatgccattgatgaatattatcggatgaagaaggaggaagaagaagaagaagaagaaaacaggatgtctgaagaagcagaaaaacaatatcaacagaataaattgcagactgattccattgttcagacagatcaaccagagacagtgatatccagctcatttgtgaatgtcaattttgaaatggagggagacagtgaagtaattatggaaagcaagcaaaatccagtctctgtcccaccataaaatgaaatgactatcaagcttcaaactcttaagtgtttttttttttaatacaaaaactttcacattctttattcagtgggacttaatacaattatttatattttaaattattaaagtatctggaaagggaaaatgttttcttcatttttaggatctatctagcaaaagccagatctgaaattcagatatttgtactgtttttactgtgtatagaaattagtgctttggttttaaaatgatcttttaaaaaagttaaggacatcctagagccttaatagttaagaagagttaaattatcaagcctatttgtgcatttgctttttttgaaaaaggtaagttgctgattaagtctaattggaattgataattccatagtcttagattaaaatgaggatattttctcctagattttctcatgttatgccatgcatttatatatctaaccattaatttcacactaaggatgcttcaccatataataaaaggagcaagatggaagcactttgaattttctttcattgagaataactgttttatgtaagaatctgtatttataacaccagatattaagataggcttccattttttaatgcaagccacttacttaatcttgtattctttttcaggactcaaataactagctttgaacataatattaaaacactacttatagaatagatttattaatgttaatacctagtgaatatccatgtggcatcctggttatgttatcggttcagcgttaatcctatagaaaagtggtttggaggggattgggggatagtgggacaggtatagatttaatccatcaggagcaattagatattgtataaggtgcaatgatagcctaatgaaattacccgtctctacaaaaatacaaaaattagccaggcgtggtggtgcacgtctgtaatcccagctgctcgggaggctgaggcaggagaatcacttgaaccagggaggtggaggttgcagtgagccaagattgcaccactgcactccagcctgggcgacagagtgagactccatcttggggggaaaaaagtatatatatatacacacacacagacacacacacacacacatatatctctaaatgtgtgtatagaaccttttatcagtataacattgatttataattaaatgtgggtgaggaagaatgtgtggagtgtttcagaaattttgatcttaaaagccttttcagaaactcaaagctttcagaaattaatagttatattaatagccttctaaacagcattaagttttcaattttaatatatctatataaaatatagtgtcaaagaaagtaacatcaatatagtgggtctgtaatggaaatctgtcaatgaacatgaactgagttcttcaactacaggttgaaggataattaaacttttcattaggagtgttcagctacatggattcatggaatggtggttcatagtaagtgatggtaatctttttattcatgggtgtaaaccctttataacttagtgcttaaaatattaatcttttgattatataatgtcccatgaattatagtttaccaatagttctaaaacatgctaacctgaccttttccttctaatttgtttttaacttcattcgagatagtacctctcactcacagatatttatttggttatcaagtgaagataggtgtgtctaaaagtgatcttctgaatcctgtctccctagaggtactagtatctagagtttacccagaaaattttatgattgtaacaaaaggaagtagtgacttatgaaggttttgtttcttgaattttacttttgctacttgtccaatagtggctagtttatgtttatcaatatagttattcactgtgccttaagtttatactttgtttatgcaaactataaaatttcccataaatgtaaacaacatcacacaacaacacaacgacactgtcggaacacaaaaaaatttcgccccgcgcccaagattaacacgtgggcgcgcagaaaaaaagccaagcccgaacacgaaaacggcgtccaaaaacaccgcagggggacacggtcgggccggaaatcacc

SEQ ID NO: 432863 - DNA, 3252 bp, Homo sapiens
aaccgccccgtctgagaagtgaggagcctctccgcccggcagccaccccgtctgggaagccgagtttggttttgctgttttggactgtctcaactccctgctgatgccaccatacagagtcagatcagcaaccacatcccatcactagcctttgaagtacaacgacacagctgtcttcattttacaagtgcaaaaaccgaggtcctgcggggtgactgccccagacgccgctggtgacgggctgcgccgaggtcgagacgccaggcttcagcgccagcagccctgtggtggcgacgacgatggaccaggagccagtgggcggtgtggaacgaggagaagccgtcgcagcctcgggagctgcggccgccgcggcattcggggaatctgcagggcagatgagtaacgaaagaggctttgaaaatgtagaactgggagtcataggaaaaaagaagaaagtcccaaggagagtcatccactttgttagtggtgaaacaatggaagaatatagcacagatgaagacgaagttgatggcctggagaagaaagatgttttgcctactgttgatccgacaaaacttacctggggtccctacttatggttttacatgcttcgggctgctacatcaactctctcagtgtgtgacttccttggagagaagattgcatctgttttgggtatcagcaccccaaagtaccaatatgccattgatgaatattatcggatgaagaaggaggaagaagaagaagaagaagaaaacaggatgtctgaagaagcagaaaaacaatatcaacagaataaattgcagactgattccattgttcagacagatcaaccagagacagtgatatccagctcatttgtgaatgtcaattttgaaatggagggagacagtgaagtaattatggaaagcaagcaaaatccagtctctgtcccaccataaaatgaaatgactatcaagcttcaaactcttaagtgtttttttttttaatacaaaaactttcacattctttattcagtgggacttaatacaattatttatattttaaattattaaagtatctggaaagggaaaatgttttcttcatttttaggatctatctagcaaaagccagatctgaaattcagatatttgtactgtttttactgtgtatagaaattagtgctttggttttaaaatgatcttttaaaaaagttaaggacatcctagagccttaatagttaagaagagttaaattatcaagcctatttgtgcatttgctttttttgaaaaaggtaagttgctgattaagtctaattggaattgataattccatagtcttagattaaaatgaggatattttctcctagattttctcatgttatgccatgcatttatatatctaaccattaatttcacactaaggatgcttcaccatataataaaaggagcaagatggaagcactttgaattttctttcattgagaataactgttttatgtaagaatctgtatttataacaccagatattaagataggcttccattttttaatgcaagccacttacttaatcttgtattctttttcaggactcaaataactagctttgaacataatattaaaacactacttatagaatagatttattaatgttaatacctagtgaatatccatgtggcatcctggttatgttatcggttcagcgttaatcctatagaaaagtggtttggaggggattgggggatagtgggacaggtatagatttaatccatcaggagcaattagatattgtataaggtgcaatgatagcctaatgaaattacccgtcattcatcatttagaagtagcaacagtgaagactggacagtttacttgaatctggttggccactcctctacctacttggttatttgtaaaccttacaaatgtatatattgtgaagctaattttgaaaatattcctaaatatggccaggtacggtgctcacacctgtaatcccagcactttgggaggctgaagtgggcagattacttgaggtcaggagtttgagaccagcctggccaacgtagtgaaaccccgtctctacaaaaatacaaaaattagccaggcgtggtggtgcacgtctgtaatcccagctgctcgggaggctgaggcaggagaatcacttgaaccagggaggtggaggttgcagtgagccaagattgcaccactgcactccagcctgggcgacagagtgagactccatcttggggggaaaaaagtatatatatatacacacacacagacacacacacacacacatatatctctaaatgtgtgtatagaaccttttatcagtataacattgatttataattaaatgtgggtgaggaagaatgtgtggagtgtttcagaaattttgatcttaaaagccttttcagaaactcaaagctttcagaaattaatagttatattaatagccttctaaacagcattaagttttcaattttaatatatctatataaaatatagtgtcaaagaaagtaacatcaatatagtgggtctgtaatggaaatctgtcaatgaacatgaactgagttcttcaactacaggttgaaggataattaaacttttcattaggagtgttcagctacatggattcatggaatggtggttcatagtaagtgatggtaatctttttattcatgggtgtaaaccctttataacttagtgcttaaaatattaatcttttgattatataatgtcccatgaattatagtttaccaatagttctaaaacatgctaacctgaccttttccttctaatttgtttttaacttcattcgagatagtacctctcactcacagatatttatttggttatcaagtgaagataggtgtgtctaaaagtgatcttctgaatcctgtctccctagaggtactagtatctagagtttacccagaaaattttatgattgtaacaaaaggaagtagtgacttatgaaggttttgtttcttgaattttacttttgctacttgtccaatagtggctagtttatgtttatcaatatagttattcactgtgccttaagtttatactttgtttatgcaaactataaaatttcccataaatgtaaacaacatcacacaacaacacaacgacactgtcggaacacaaaaaaatttcgccccgcgcccaagattaacacgtgggcgcgcagaaaaaaagccaagcccgaacacgaaaacggcgtccaaaaacaccgcagggggacacggtcgggccggaaatcacc

SEQ ID NO: 432864 - DNA, 3313 bp, Homo sapiens
aagtgtattaaaaagaagaaatagtcgtaagatggcagtataaattcatctctgcatgtagaaaccggaaaaaaagcaagttcagtacttcaccaaaaaatttcaacattgcaaacacaggaaattgagaactgacaaacagaaatactaggaaatgcaaagtcttgaagctccaaaacaaaaacagcaatcttggaaaggcccctaatctacctcctcaatggtggggcctgacccagaccctcccttgggaccctgagccccgaagcccccaggcccgggaccaccggcaccctggtacagtccgctgatgcgcgaggcgggcgctgcggcgccagcagccctgtggtggcgacgacgatggaccaggagccagtgggcggtgtggaacgaggagaagccgtcgcagcctcgggagctgcggccgccgcggcattcggggaatctgcagggcagatgagtaacgaaagaggctttgaaaatgtagaactgggagtcataggaaaaaagaagaaagtcccaaggagagtcatccactttgttagtggtgaaacaatggaagaatatagcacagatgaagacgaagttgatggcctggagaagaaagatgttttgcctactgttgatccgacaaaacttacctggggtccctacttatggttttacatgcttcgggctgctacatcaactctctcagtgtgtgacttccttggagagaagattgcatctgttttgggtatcagcaccccaaagtaccaatatgccattgatgaatattatcggatgaagaaggaggaagaagaagaagaagaagaaaacaggatgtctgaagaagcagaaaaacaatatcaacagaataaattgcagactgattccattgttcagacagatcaaccagagacagtgatatccagctcatttgtgaatgtcaattttgaaatggagggagacagtgaagtaattatggaaagcaagcaaaatccagtctctgtcccaccataaaatgaaatgactatcaagcttcaaactcttaagtgtttttttttttaatacaaaaactttcacattctttattcagtgggacttaatacaattatttatattttaaattattaaagtatctggaaagggaaaatgttttcttcatttttaggatctatctagcaaaagccagatctgaaattcagatatttgtactgtttttactgtgtatagaaattagtgctttggttttaaaatgatcttttaaaaaagttaaggacatcctagagccttaatagttaagaagagttaaattatcaagcctatttgtgcatttgctttttttgaaaaaggtaagttgctgattaagtctaattggaattgataattccatagtcttagattaaaatgaggatattttctcctagattttctcatgttatgccatgcatttatatatctaaccattaatttcacactaaggatgcttcaccatataataaaaggagcaagatggaagcactttgaattttctttcattgagaataactgttttatgtaagaatctgtatttataacaccagatattaagataggcttccattttttaatgcaagccacttacttaatcttgtattctttttcaggactcaaataactagctttgaacataatattaaaacactacttatagaatagatttattaatgttaatacctagtgaatatccatgtggcatcctggttatgttatcggttcagcgttaatcctatagaaaagtggtttggaggggattgggggatagtgggacaggtatagatttaatccatcaggagcaattagatattgtataaggtgcaatgatagcctaatgaaattacccgtcattcatcatttagaagtagcaacagtgaagactggacagtttacttgaatctggttggccactcctctacctacttggttatttgtaaaccttacaaatgtatatattgtgaagctaattttgaaaatattcctaaatatggccaggtacggtgctcacacctgtaatcccagcactttgggaggctgaagtgggcagattacttgaggtcaggagtttgagaccagcctggccaacgtagtgaaaccccgtctctacaaaaatacaaaaattagccaggcgtggtggtgcacgtctgtaatcccagctgctcgggaggctgaggcaggagaatcacttgaaccagggaggtggaggttgcagtgagccaagattgcaccactgcactccagcctgggcgacagagtgagactccatcttggggggaaaaaagtatatatatatacacacacacagacacacacacacacacatatatctctaaatgtgtgtatagaaccttttatcagtataacattgatttataattaaatgtgggtgaggaagaatgtgtggagtgtttcagaaattttgatcttaaaagccttttcagaaactcaaagctttcagaaattaatagttatattaatagccttctaaacagcattaagttttcaattttaatatatctatataaaatatagtgtcaaagaaagtaacatcaatatagtgggtctgtaatggaaatctgtcaatgaacatgaactgagttcttcaactacaggttgaaggataattaaacttttcattaggagtgttcagctacatggattcatggaatggtggttcatagtaagtgatggtaatctttttattcatgggtgtaaaccctttataacttagtgcttaaaatattaatcttttgattatataatgtcccatgaattatagtttaccaatagttctaaaacatgctaacctgaccttttccttctaatttgtttttaacttcattcgagatagtacctctcactcacagatatttatttggttatcaagtgaagataggtgtgtctaaaagtgatcttctgaatcctgtctccctagaggtactagtatctagagtttacccagaaaattttatgattgtaacaaaaggaagtagtgacttatgaaggttttgtttcttgaattttacttttgctacttgtccaatagtggctagtttatgtttatcaatatagttattcactgtgccttaagtttatactttgtttatgcaaactataaaatttcccataaatgtaaacaacatcacacaacaacacaacgacactgtcggaacacaaaaaaatttcgccccgcgcccaagattaacacgtgggcgcgcagaaaaaaagccaagcccgaacacgaaaacggcgtccaaaaacaccgcagggggacacggtcgggccggaaatcacc

SEQ ID NO: 432865 - DNA, 2200 bp, Homo sapiens
aagaaaattgtaatttgatatttaattgccactttggaaaataaaatcatgcatttataaatatcccacaaagttttagtaataaagattgttgattgccctgcttgccagtaagaaggaagagattttgaatacatataatgcagaactgtgttgtttatgaatgccaattcatgaagtcttaacaattggttctttatttttgttttcaatttatggccgagtttggttttgctgttttggactgtctcaactccctgctgatgccaccatacagagtcagatcagtgcaaaaaccgaggtcctgcggggtgactgccccagacgccgctggtgacgggctgcgccgaggtcgagacgccaggcttcaggtacacgtaccagaaatgacgtcacaggcggtgccaggcggggatccacgagctctggatgcttgcttggccggaagcgacgccccgcaaggacccgccccgccccgccccgccccgcgcgagccggtagttgcgcctcccagactgcagttggccagctctcggggtgcggagcccggcgggctaggcgaggcgcgggctggccccgcccctcaggccggcgagtccccttctcagagacttggctaggcgcggcgcgaggcgggcgctgcggcgccagcagccctgtggtggcgacgacgatggaccaggagccagtgggcggtgtggaacgaggagaagccgtcgcagcctcgggagctgcggccgccgcggcattcggggaatctgcagggcagatgagtaacgaaagaggctttgaaaatgtagaactgggagtcataggaaaaaagaagaaagtcccaaggagagtcatccactttgttagtggtgaaacaatggaagaatatagcacagatgaagacgaagttgatggcctggagaagaaagatgttttgcctactgttgatccgacaaaacttacctggggtccctacttatggttttacatgcttcgggctgctacatcaactctctcagtgtgtgacttccttggagagaagattgcatctgttttgggtatcagcaccccaaagtaccaatatgccattgatgaatattatcggatgaagaaggaggaagaagaagaagaagaagaaaacaggatgtctgaagaagcagaaaaacaatatcaacagaataaattgcagactgattccattgttcagacagatcaaccagagacagtgatatccagctcatttgtgaatgtcaattttgaaatggagggagacagtgaagtaattatggaaagcaagcaaaatccagtctctgtcccaccataaaatgaaatgactatcaagcttcaaactcttaagtgtttttttttttaatacaaaaactttcacattctttattcagtgggacttaatacaattatttatattttaaattattaaagtatctggaaagggaaaatgttttcttcatttttaggatctatctagcaaaagccagatctgaaattcagatatttgtactgtttttactgtgtatagaaattagtgctttggttttaaaatgatcttttaaaaaagttaaggacatcctagagccttaatagttaagaagagttaaattatcaagcctatttgtgcatttgctttttttgaaaaaggtaagttgctgattaagtctaattggaattgataattccatagtcttagattaaaatgaggatattttctcctagattttctcatgttatgccatgcatttatatatctaaccattaatttcacactaaggatgcttcaccatataataaaaggagcaagatggaagcactttgaattttctttcattgagaataactgttttatgtaagaatctgtatttataacaccagatattaagataggcttccattttttaatgcaagccacttacttaatcttgtattctttttcaggactcaaataactagctttgaacataatattaaaacactacttatagaatagatttattaatgttaatacctagtgaatatccatgtggcatcctggttatgttatcggttcagcgttaatcctatagaaaagtggtttggaggggattgggggatagtggcaaattttaaattaattcattaagggcgatttaaattttttttttggggcggggatagccttataaaaattaccccccagttctttatttaaaaaggg

SEQ ID NO: 432866 - DNA, 3868 bp, Homo sapiens
aagaaaattgtaatttgatatttaattgccactttggaaaataaaatcatgcatttataaatatcccacaaagttttagtaataaagattgttgattgccctgcttgccagtaagaaggaagagattttgaatacatataatgcagaactgtgttgtttatgaatgccaattcatgaagtcttaacaattggttctttatttttgttttcaatttatggccgagtttggttttgctgttttggactgtctcaactccctgctgatgccaccatacagagtcagatcagcaaccacatcccatcactagcctttgaagtacaacgacacagctgtcttcattttacaagtgcaaaaaccgaggtcctgcggggtgactgccccagacgccgctggtgacgggctgcgccgaggtcgagacgccaggcttcagcgccagcagccctgtggtggcgacgacgatggaccaggagccagtgggcggtgtggaacgaggagaagccgtcgcagcctcgggagctgcggccgccgcggcattcggggaatctgcagggcaggtaggtggggccgccgaggctgacgtccggggagccgagccgcctccttgccttctccgcgggccgctcttttagcctgcgcggccgtcctccgagcaggccgccccagctttggagttcctcctcactgcacccctgtttctgctcactgagaccagcttgtgggaaggagcgccccccgcctcactcaccaaccccttggctggcagcacagcagactctggggcggcctcgggttcctggggtgatagtccagcttctggtgtaccagaggaagaagaaaggcgtgtcccccaaaggctgtccttgcagtagctggaagccaggtgagggcggcttcaaccacttctcagtctcttctggtgcgagcgcctgcctgggcatctgccctttgcttggcatatgccaaacgtttaccagctttaattcactggatccttacagtaaccgctcgagatgagtaacgaaagaggctttgaaaatgtagaactgggagtcataggaaaaaagaagaaagtcccaaggagagtcatccactttgttagtggtgaaacaatggaagaatatagcacagatgaagacgaagttgatggcctggagaagaaagatgttttgcctactgttgatccgacaaaacttacctggggtccctacttatggttttacatgcttcgggctgctacatcaactctctcagtgtgtgacttccttggagagaagattgcatctgttttgggtatcagcaccccaaagtaccaatatgccattgatgaatattatcggatgaagaaggaggaagaagaagaagaagaagaaaacaggatgtctgaagaagcagaaaaacaatatcaacagaataaattgcagactgattccattgttcagacagatcaaccagagacagtgatatccagctcatttgtgaatgtcaattttgaaatggagggagacagtgaagtaattatggaaagcaagcaaaatccagtctctgtcccaccataaaatgaaatgactatcaagcttcaaactcttaagtgtttttttttttaatacaaaaactttcacattctttattcagtgggacttaatacaattatttatattttaaattattaaagtatctggaaagggaaaatgttttcttcatttttaggatctatctagcaaaagccagatctgaaattcagatatttgtactgtttttactgtgtatagaaattagtgctttggttttaaaatgatcttttaaaaaagttaaggacatcctagagccttaatagttaagaagagttaaattatcaagcctatttgtgcatttgctttttttgaaaaaggtaagttgctgattaagtctaattggaattgataattccatagtcttagattaaaatgaggatattttctcctagattttctcatgttatgccatgcatttatatatctaaccattaatttcacactaaggatgcttcaccatataataaaaggagcaagatggaagcactttgaattttctttcattgagaataactgttttatgtaagaatctgtatttataacaccagatattaagataggcttccattttttaatgcaagccacttacttaatcttgtattctttttcaggactcaaataactagctttgaacataatattaaaacactacttatagaatagatttattaatgttaatacctagtgaatatccatgtggcatcctggttatgttatcggttcagcgttaatcctatagaaaagtggtttggaggggattgggggatagtgggacaggtatagatttaatccatcaggagcaattagatattgtataaggtgcaatgatagcctaatgaaattacccgtcattcatcatttagaagtagcaacagtgaagactggacagtttacttgaatctggttggccactcctctacctacttggttatttgtaaaccttacaaatgtatatattgtgaagctaattttgaaaatattcctaaatatggccaggtacggtgctcacacctgtaatcccagcactttgggaggctgaagtgggcagattacttgaggtcaggagtttgagaccagcctggccaacgtagtgaaaccccgtctctacaaaaatacaaaaattagccaggcgtggtggtgcacgtctgtaatcccagctgctcgggaggctgaggcaggagaatcacttgaaccagggaggtggaggttgcagtgagccaagattgcaccactgcactccagcctgggcgacagagtgagactccatcttggggggaaaaaagtatatatatatacacacacacagacacacacacacacacatatatctctaaatgtgtgtatagaaccttttatcagtataacattgatttataattaaatgtgggtgaggaagaatgtgtggagtgtttcagaaattttgatcttaaaagccttttcagaaactcaaagctttcagaaattaatagttatattaatagccttctaaacagcattaagttttcaattttaatatatctatataaaatatagtgtcaaagaaagtaacatcaatatagtgggtctgtaatggaaatctgtcaatgaacatgaactgagttcttcaactacaggttgaaggataattaaacttttcattaggagtgttcagctacatggattcatggaatggtggttcatagtaagtgatggtaatctttttattcatgggtgtaaaccctttataacttagtgcttaaaatattaatcttttgattatataatgtcccatgaattatagtttaccaatagttctaaaacatgctaacctgaccttttccttctaatttgtttttaacttcattcgagatagtacctctcactcacagatatttatttggttatcaagtgaagataggtgtgtctaaaagtgatcttctgaatcctgtctccctagaggtactagtatctagagtttacccagaaaattttatgattgtaacaaaaggaagtagtgacttatgaaggttttgtttcttgaattttacttttgctacttgtccaatagtggctagtttatgtttatcaatatagttattcactgtgccttaagtttatactttgtttatgcaaactataaaatttcccataaatgtaaacaacatcacacaacaacacaacgacactgtcggaacacaaaaaaatttcgccccgcgcccaagattaacacgtgggcgcgcagaaaaaaagccaagcccgaacacgaaaacggcgtccaaaaacaccgcagggggacacggtcgggccggaaatcacc

SEQ ID NO: 432867 - DNA, 3000 bp, Homo sapiens
tttggtcatgtttcgatttcctttgttgttagtaggtcctgagcagtgatagtctcataaccctggggctccggagcgccgcgcctcctgcgtgggcgaattcctcgtgtcgtggccgcgcgggcgctcaggttatatggcagatgagtaacgaaagaggctttgaaaatgtagaactgggagtcataggaaaaaagaagaaagtcccaaggagagtcatccactttgttagtggtgaaacaatggaagaatatagcacagatgaagacgaagttgatggcctggagaagaaagatgttttgcctactgttgatccgacaaaacttacctggggtccctacttatggttttacatgcttcgggctgctacatcaactctctcagtgtgtgacttccttggagagaagattgcatctgttttgggtatcagcaccccaaagtaccaatatgccattgatgaatattatcggatgaagaaggaggaagaagaagaagaagaagaaaacaggatgtctgaagaagcagaaaaacaatatcaacagaataaattgcagactgattccattgttcagacagatcaaccagagacagtgatatccagctcatttgtgaatgtcaattttgaaatggagggagacagtgaagtaattatggaaagcaagcaaaatccagtctctgtcccaccataaaatgaaatgactatcaagcttcaaactcttaagtgtttttttttttaatacaaaaactttcacattctttattcagtgggacttaatacaattatttatattttaaattattaaagtatctggaaagggaaaatgttttcttcatttttaggatctatctagcaaaagccagatctgaaattcagatatttgtactgtttttactgtgtatagaaattagtgctttggttttaaaatgatcttttaaaaaagttaaggacatcctagagccttaatagttaagaagagttaaattatcaagcctatttgtgcatttgctttttttgaaaaaggtaagttgctgattaagtctaattggaattgataattccatagtcttagattaaaatgaggatattttctcctagattttctcatgttatgccatgcatttatatatctaaccattaatttcacactaaggatgcttcaccatataataaaaggagcaagatggaagcactttgaattttctttcattgagaataactgttttatgtaagaatctgtatttataacaccagatattaagataggcttccattttttaatgcaagccacttacttaatcttgtattctttttcaggactcaaataactagctttgaacataatattaaaacactacttatagaatagatttattaatgttaatacctagtgaatatccatgtggcatcctggttatgttatcggttcagcgttaatcctatagaaaagtggtttggaggggattgggggatagtgggacaggtatagatttaatccatcaggagcaattagatattgtataaggtgcaatgatagcctaatgaaattacccgtcattcatcatttagaagtagcaacagtgaagactggacagtttacttgaatctggttggccactcctctacctacttggttatttgtaaaccttacaaatgtatatattgtgaagctaattttgaaaatattcctaaatatggccaggtacggtgctcacacctgtaatcccagcactttgggaggctgaagtgggcagattacttgaggtcaggagtttgagaccagcctggccaacgtagtgaaaccccgtctctacaaaaatacaaaaattagccaggcgtggtggtgcacgtctgtaatcccagctgctcgggaggctgaggcaggagaatcacttgaaccagggaggtggaggttgcagtgagccaagattgcaccactgcactccagcctgggcgacagagtgagactccatcttggggggaaaaaagtatatatatatacacacacacagacacacacacacacacatatatctctaaatgtgtgtatagaaccttttatcagtataacattgatttataattaaatgtgggtgaggaagaatgtgtggagtgtttcagaaattttgatcttaaaagccttttcagaaactcaaagctttcagaaattaatagttatattaatagccttctaaacagcattaagttttcaattttaatatatctatataaaatatagtgtcaaagaaagtaacatcaatatagtgggtctgtaatggaaatctgtcaatgaacatgaactgagttcttcaactacaggttgaaggataattaaacttttcattaggagtgttcagctacatggattcatggaatggtggttcatagtaagtgatggtaatctttttattcatgggtgtaaaccctttataacttagtgcttaaaatattaatcttttgattatataatgtcccatgaattatagtttaccaatagttctaaaacatgctaacctgaccttttccttctaatttgtttttaacttcattcgagatagtacctctcactcacagatatttatttggttatcaagtgaagataggtgtgtctaaaagtgatcttctgaatcctgtctccctagaggtactagtatctagagtttacccagaaaattttatgattgtaacaaaaggaagtagtgacttatgaaggttttgtttcttgaattttacttttgctacttgtccaatagtggctagtttatgtttatcaatatagttattcactgtgccttaagtttatactttgtttatgcaaactataaaatttcccataaatgtaaacaacatcacacaacaacacaacgacactgtcggaacacaaaaaaatttcgccccgcgcccaagattaacacgtgggcgcgcagaaaaaaagccaagcccgaacacgaaaacggcgtccaaaaacaccgcagggggacacggtcgggccggaaatcacc

SEQ ID NO: 432868 - DNA, 3238 bp, Homo sapiens
aagaaaattgtaatttgatatttaattgccactttggaaaataaaatcatgcatttataaatatcccacaaagttttagtaataaagattgttgattgccctgcttgccagtaagaaggaagagattttgaatacatataatgcagaactgtgttgtttatgaatgccaattcatgaagtcttaacaattggttctttatttttgttttcaatttatggccgagtttggttttgctgttttggactgtctcaactccctgctgatgccaccatacagagtcagatcagcaaccacatcccatcactagcctttgaagtacaacgacacagctgtcttcattttacaagtgcaaaaaccgaggtcctgcggggtgactgccccagacgccgctggtgacgggctgcgccgaggtcgagacgccaggcttcagcgccagcagccctgtggtggcgacgacgatggaccaggagccagtgggcggtgtggaacgaggagaagccgtcgcagcctcgggagctgcggccgccgcggcattcggggaatctgcagggcagacaaaacttacctggggtccctacttatggttttacatgcttcgggctgctacatcaactctctcagtgtgtgacttccttggagagaagattgcatctgttttgggtatcagcaccccaaagtaccaatatgccattgatgaatattatcggatgaagaaggaggaagaagaagaagaagaagaaaacaggatgtctgaagaagcagaaaaacaatatcaacagaataaattgcagactgattccattgttcagacagatcaaccagagacagtgatatccagctcatttgtgaatgtcaattttgaaatggagggagacagtgaagtaattatggaaagcaagcaaaatccagtctctgtcccaccataaaatgaaatgactatcaagcttcaaactcttaagtgtttttttttttaatacaaaaactttcacattctttattcagtgggacttaatacaattatttatattttaaattattaaagtatctggaaagggaaaatgttttcttcatttttaggatctatctagcaaaagccagatctgaaattcagatatttgtactgtttttactgtgtatagaaattagtgctttggttttaaaatgatcttttaaaaaagttaaggacatcctagagccttaatagttaagaagagttaaattatcaagcctatttgtgcatttgctttttttgaaaaaggtaagttgctgattaagtctaattggaattgataattccatagtcttagattaaaatgaggatattttctcctagattttctcatgttatgccatgcatttatatatctaaccattaatttcacactaaggatgcttcaccatataataaaaggagcaagatggaagcactttgaattttctttcattgagaataactgttttatgtaagaatctgtatttataacaccagatattaagataggcttccattttttaatgcaagccacttacttaatcttgtattctttttcaggactcaaataactagctttgaacataatattaaaacactacttatagaatagatttattaatgttaatacctagtgaatatccatgtggcatcctggttatgttatcggttcagcgttaatcctatagaaaagtggtttggaggggattgggggatagtgggacaggtatagatttaatccatcaggagcaattagatattgtataaggtgcaatgatagcctaatgaaattacccgtcattcatcatttagaagtagcaacagtgaagactggacagtttacttgaatctggttggccactcctctacctacttggttatttgtaaaccttacaaatgtatatattgtgaagctaattttgaaaatattcctaaatatggccaggtacggtgctcacacctgtaatcccagcactttgggaggctgaagtgggcagattacttgaggtcaggagtttgagaccagcctggccaacgtagtgaaaccccgtctctacaaaaatacaaaaattagccaggcgtggtggtgcacgtctgtaatcccagctgctcgggaggctgaggcaggagaatcacttgaaccagggaggtggaggttgcagtgagccaagattgcaccactgcactccagcctgggcgacagagtgagactccatcttggggggaaaaaagtatatatatatacacacacacagacacacacacacacacatatatctctaaatgtgtgtatagaaccttttatcagtataacattgatttataattaaatgtgggtgaggaagaatgtgtggagtgtttcagaaattttgatcttaaaagccttttcagaaactcaaagctttcagaaattaatagttatattaatagccttctaaacagcattaagttttcaattttaatatatctatataaaatatagtgtcaaagaaagtaacatcaatatagtgggtctgtaatggaaatctgtcaatgaacatgaactgagttcttcaactacaggttgaaggataattaaacttttcattaggagtgttcagctacatggattcatggaatggtggttcatagtaagtgatggtaatctttttattcatgggtgtaaaccctttataacttagtgcttaaaatattaatcttttgattatataatgtcccatgaattatagtttaccaatagttctaaaacatgctaacctgaccttttccttctaatttgtttttaacttcattcgagatagtacctctcactcacagatatttatttggttatcaagtgaagataggtgtgtctaaaagtgatcttctgaatcctgtctccctagaggtactagtatctagagtttacccagaaaattttatgattgtaacaaaaggaagtagtgacttatgaaggttttgtttcttgaattttacttttgctacttgtccaatagtggctagtttatgtttatcaatatagttattcactgtgccttaagtttatactttgtttatgcaaactataaaatttcccataaatgtaaacaacatcacacaacaacacaacgacactgtcggaacacaaaaaaatttcgccccgcgcccaagattaacacgtgggcgcgcagaaaaaaagccaagcccgaacacgaaaacggcgtccaaaaacaccgcagggggacacggtcgggccggaaatcacc

SEQ ID NO: 432869 - DNA, 1444 bp, Homo sapiens
aagaaaattgtaatttgatatttaattgccactttggaaaataaaatcatgcatttataaatatcccacaaagttttagtaataaagattgttgattgccctgcttgccagtaagaaggaagagattttgaatacatataatgcagaactgtgttgtttatgaatgccaattcatgaagtcttaacaattggttctttatttttgttttcaatttatggccgagtttggttttgctgttttggactgtctcaactccctgctgatgccaccatacagagtcagatcagtgcaaaaaccgaggtcctgcggggtgactgccccagacgccgctggtgacgggctgcgccgaggtcgagacgccaggcttcaggtacacgtaccagaaatgacgtcacaggcggtgccaggcggggatccacgagctctggatgcttgcttggccggaagcgacgccccgcaaggacccgccccgccccgccccgccccgcgcgagccggtagttgcgcctcccagactgcagttggccagctctcggggtgcggagcccggcgggctaggcgaggcgcgggctggccccgcccctcaggccggcgagtccccttctcagagacttggctaggcgcggcgcgaggcgggcgctgcggcgccagcagccctgtggtggcgacgacgatggaccaggagccagtgggcggtgtggaacgaggagaagccgtcgcagcctcgggagctgcggccgccgcggcattcggggaatctgcagggcagatgagtaacgaaagaggctttgaaaatgtagaactgggagtcataggaaaaaagaagaaagtcccaaggagagtcatccactttgttagtggtgaaacaatggaagaatatagcacagatgaagacgaagttgatggcctggagaagaaagatgttttgcctactgttgatccgacaaaacttacctggggtccctacttatggttttacatgcttcgggctgctacatcaactctctcagtgtgtgacttccttggagagaagattgcatctgttttgggtatcagcaccccaaagtaccaatatgccattgatgaatattatcggatgaagaaggaggaagaagaagaagaagaagaaaacaggatgtctgaagaagcagaaaaacaatatcaacagaataaattgcagactgattccattgttcagacagatcaaccagagacagtgatatccagctcatttgtgaatgtcaattttgaaatggagggagacagtgaagtaattatggaaagcaagcaaaatccagtctctgtcccaccataaaatgaaatgactatcaagcttcaaactcttaagtgtttttttttttaatacaaaaactttcacattctttattcagtgggacttaatacaattatttatattttaaattattaaagtatctggaaaggg

SEQ ID NO: 432870 - DNA, 1196 bp, Homo sapiens
tgagacggagtcttgctctgttgcccatgctggagtgcagtggtgcgatctcagctcactgcaagctccgcctcccaggagaatcacttgaaccagggaggtggaggttgcagtgagccaagattgcaccactgcactccagcctgggcgacagagtgagactccatcttggggggaaaaaagtatatatatatacacacacacagacacacacacacacacatatatctctaaatgtgtgtatagaaccttttatcagtataacattgatttataattaaatgtgggtgaggaagaatgtgtggagtgtttcagaaattttgatcttaaaagccttttcagaaactcaaagctttcagaaattaatagttatattaatagccttctaaacagcattaagttttcaattttaatatatctatataaaatatagtgtcaaagaaagtaacatcaatatagtgggtctgtaatggaaatctgtcaatgaacatgaactgagttcttcaactacaggttgaaggataattaaacttttcattaggagtgttcagctacatggattcatggaatggtggttcatagtaagtgatggtaatctttttattcatgggtgtaaaccctttataacttagtgcttaaaatattaatcttttgattatataatgtcccatgaattatagtttaccaatagttctaaaacatgctaacctgaccttttccttctaatttgtttttaacttcattcgagatagtacctctcactcacagatatttatttggttatcaagtgaagataggtgtgtctaaaagtgatcttctgaatcctgtctccctagaggtactagtatctagagtttacccagaaaattttatgattgtaacaaaaggaagtagtgacttatgaaggttttgtttcttgaattttacttttgctacttgtccaatagtggctagtttatgtttatcaatatagttattcactgtgccttaagtttatactttgtttatgcaaactataaaatttcccataaatgtaaacaacatcacacaacaacacaacgacactgtcggaacacaaaaaaatttcgccccgcgcccaagattaacacgtgggcgcgcagaaaaaaagccaagcccgaacacgaaaacggcgtccaaaaacaccgcagggggacacggtcgggccggaaatcacc

SEQ ID NO: 432871 - DNA, 1248 bp, Homo sapiens
aagaaaattgtaatttgatatttaattgccactttggaaaataaaatcatgcatttataaatatcccacaaagttttagtaataaagattgttgattgccctgcttgccagtaagaaggaagagattttgaatacatataatgcagaactgtgttgtttatgaatgccaattcatgaagtcttaacaattggttctttatttttgttttcaatttatggccgagtttggttttgctgttttggactgtctcaactccctgctgatgccaccatacagagtcagatcagcaaccacatcccatcactagcctttgaagtacaacgacacagctgtcttcattttacaagtgcaaaaaccgaggtcctgcggggtgactgccccagacgccgctggtgacgggctgcgccgaggtcgagacgccaggcttcagcgccagcagccctgtggtggcgacgacgatggaccaggagccagtgggcggtgtggaacgaggagaagccgtcgcagcctcgggagctgcggccgccgcggcattcggggaatctgcagggcaggtaggtggggccgccgaggctgacgtccggggagccgagccgcctccttgccttctccgcgggccgctcttttagcctgcgcggccgtcctccgagcaggccgccccagctttggagttcctcctcactgcacccctgtttctgctcactgagaccagcttgtgggaaggagcgccccccgcctcactcaccaaccccttggctggcagcacagcagactctggggcggcctcgggttcctggggtgatagtccagcttctggtgtaccagaggaagaagaaaggcgtgtcccccaaaggctgtccttgcagtagctggaagccagaatctcactctgttgcccaggctgaagttcatggcgcgatctcggctcgctgcaacctccacctcccgggttcaagcaattctcctgcctcagcctcctgtgtagctgggattataggcacgctccaccgcgcctggctaatttttgtatttttttagtagaggtgggatttcaccatgttagccagggtggtctcacacccttgacctcaagttgtctgcccgcctcagtctcccaaagtgctggggttacaagcatgagccaccatgcccagccacagtgtaaattttatttgtaattattggatttctggttcaagttgatgtttgaaaaataaaaaaagaaaaatattttaaaaatataatta

SEQ ID NO: 432872 - DNA, 1723 bp, Homo sapiens
aagaaaattgtaatttgatatttaattgccactttggaaaataaaatcatgcatttataaatatcccacaaagttttagtaataaagattgttgattgccctgcttgccagtaagaaggaagagattttgaatacatataatgcagaactgtgttgtttatgaatgccaattcatgaagtcttaacaattggttctttatttttgttttcaatttatggccgagtttggttttgctgttttggactgtctcaactccctgctgatgccaccatacagagtcagatcagcaaccacatcccatcactagcctttgaagtacaacgacacagctgtcttcattttacaagtgcaaaaaccgaggtcctgcggggtgactgccccagacgccgctggtgacgggctgcgccgaggtcgagacgccaggcttcagcgccagcagccctgtggtggcgacgacgatggaccaggagccagtgggcggtgtggaacgaggagaagccgtcgcagcctcgggagctgcggccgccgcggcattcggggaatctgcagggcaggtaggtggggccgccgaggctgacgtccggggagccgagccgcctccttgccttctccgcgggccgctcttttagcctgcgcggccgtcctccgagcaggccgccccagctttggagttcctcctcactgcacccctgtttctgctcactgagaccagcttgtgggaaggagcgccccccgcctcactcaccaaccccttggctggcagcacagcagactctggggcggcctcgggttcctggggtgatagtccagcttctggtgtaccagaggaagaagaaaggcgtgtcccccaaaggctgtccttgcagtagctggaagccaggtgagggcggcttcaaccacttctcagtctcttctggtgcgagcgcctgcctgggcatctgccctttgcttggcatatgccaaacgtttaccagctttaattcactggatccttacagtaaccgctcgaggtgggtgttagccccatttcaccgccgaggcaactaaggctccgagctgcgctgtccaacataaatagaatgcaagctgcattgaaaattgtaatttaaaattttccagtaggcacgttttaaaaaagtgaaaccgatattaattttaatagcatatcttatttaactaatttttgtttttttagtggagacagggtttcaccatgttggccgggctggtctccaactcctgacatcaggttatcttgccttggccccccaaattgctgccattataggcctgagccacagcacccagccttatttttatttttttgagacagtctggctctgttgcccaggcttgagtgcagtggtgcgatctcggctcactgcaacatccacctcctgggttcaagtgattctcatgcctcagcctcccgagtagttgggactacaggcacccgctgctgcgcccagctaattttttatatttttagtagagacagggtttcaccgtggtctcgatctcctgaccttgtgatccgcctgcctcggcctcccaaaatgctgggattacaggtatgagcccgcgcctggcccaacttcaggcagttttattaggagtttaaacttgaggcaagaggacaatgaaaagaagctcttcaccatctcccactatatatatagatatatatagtgtaaatatataggagtaaaatttgtattagaa

SEQ ID NO: 432873 - DNA, 1234 bp, Homo sapiens
aagaaaattgtaatttgatatttaattgccactttggaaaataaaatcatgcatttataaatatcccacaaagttttagtaataaagattgttgattgccctgcttgccagtaagaaggaagagattttgaatacatataatgcagaactgtgttgtttatgaatgccaattcatgaagtcttaacaattggttctttatttttgttttcaatttatggccgagtttggttttgctgttttggactgtctcaactccctgctgatgccaccatacagagtcagatcagtgcaaaaaccgaggtcctgcggggtgactgccccagacgccgctggtgacgggctgcgccgaggtcgagacgccaggcttcaggtacacgtaccagaaatgacgtcacaggcggtgccaggcggggatccacgagctctggatgcttgcttggccggaagcgacgccccgcaaggacccgccccgccccgccccgccccgcgcgagccggtagttgcgcctcccagactgcagttggccagctctcggggtgcggagcccggcgggctaggcgaggcgcgggctggccccgcccctcaggccggcgagtccccttctcagagacttggctaggcgcggcgcgaggcgggcgctgcgggtgagtcccacttcccgacagcctggctcggccagcgactgggcggggagaccaaggatggaagtgggcttaccggccattaccctctttctcaccagcgccagcagccctgtggtggcgacgacgatggaccaggagccagtgggcggtgtggaacgaggagaagccgtcgcagcctcgggagctgcggccgccgcggcattcggggaatctgcagggcagaatctcactctgttgcccaggctgaagttcatggcgcgatctcggctcgctgcaacctccacctcccgggttcaagcaattctcctgcctcagcctcctgtgtagctgggattataggcacgctccaccgcgcctggctaatttttgtatttttttagtagaggtgggatttcaccatgttagccagggtggtctcacacccttgacctcaagttgtctgcccgcctcagtctcccaaagtgctggggttacaagcatgagccaccatgcccagccacagtgtaaattttatttgtaattattggatttctggttcaagttgatgtttgaaaaataaaaaaagaaaaatattttaaaaatataatta

SEQ ID NO: 432874 - DNA, 873 bp, Homo sapiens
aagaaaattgtaatttgatatttaattgccactttggaaaataaaatcatgcatttataaatatcccacaaagttttagtaataaagattgttgattgccctgcttgccagtaagaaggaagagattttgaatacatataatgcagaactgtgttgtttatgaatgccaattcatgaagtcttaacaattggttctttatttttgttttcaatttatggccgagtttggttttgctgttttggactgtctcaactccctgctgatgccaccatacagagtcagatcagtgcaaaaaccgaggtcctgcggggtgactgccccagacgccgctggtgacgggctgcgccgaggtcgagacgccaggcttcaggtacacgtaccagaaatgacgtcacaggcggtgccaggcggggatccacgagctctggatgcttgcttggccggaagcgacgccccgcaaggacccgccccgccccgccccgccccgcgcgagccggtagttgcgcctcccagactgcagttggccagctctcggggtgcggagcccggcgggctaggcgaggcgcgggctggccccgcccctcaggccggcgagtccccttctcagagacttggctaggcgcggcgcgaggcgggcgctgcggcgccagcagccctgtggtggcgacgacgatggaccaggagccagtgggcggtgtggaacgaggagaagccgtcgcagcctcgggagctgcggccgcctcaggccggcgagtccccttctcagagacttggctaggcgcggcgcgaggcgggcgctgcggcgccagcagccctgtggtggcgacgacgatggaccaggagccagtgggcggtgtggaacgaggagaagc

SEQ ID NO: 432875 - DNA, 418 bp, Homo sapiens
cttaagtttatactttgtttatgcaaactataaaatttcccataaatgtattcaatggtttgtcttactttaagcctctttcactcactttttcctatctccttttcagtccttttaagaattccagttccagctgggcacggtggcccacgcctgtagtcccagcactttgggaggccaaggtgggcggatcactaggtcaggagtccgagaccaacctggccaacatggtgaattagtagagatggatttctactaaaaatacaaaaattagccgggcatggtagcaggtgcttgtaatcctagctgctcgggaggctgaggcaggagagtcacttgagcctgggaggcggaggttgcagtgaatggagtttgcaccattgtactccagcctgggcgacacagcaagactcgtctc

SEQ ID NO: 432876 - DNA, 470 bp, Homo sapiens
tgtaatttgatatttaattgccactttggaaaataaaatcatgcatttataaatatcccacaaagttttagtaataaagattgttgattgccctgcttgccagtaagaaggaagagattttgaatacatataatgcagaactgtgttgtttatgaatgccaattcatgaagtcttaacaattggttctttatttttgttttcaatttatggccgagtttggttttgctgttttggactgtctcaactccctgctgatgccaccatacagagtcagatcaggtactaacttgtttacttcagcagcaacctaacttgattttattaccaggatagagagcaatatggatttccaactagtttttaaggcgtagatggttttcaaatgattatttgttttttaaagtttttggttttgtttttaggttccagttatacatagaataggaagtgtacaataacattaggcaga

SEQ ID NO: 432877 - DNA, 3466 bp, Homo sapiens
aagaaaattgtaatttgatatttaattgccactttggaaaataaaatcatgcatttataaatatcccacaaagttttagtaataaagattgttgattgccctgcttgccagtaagaaggaagagattttgaatacatataatgcagaactgtgttgtttatgaatgccaattcatgaagtcttaacaattggttctttatttttgttttcaatttatggccgagtttggttttgctgttttggactgtctcaactccctgctgatgccaccatacagagtcagatcagtgcaaaaaccgaggtcctgcggggtgactgccccagacgccgctggtgacgggctgcgccgaggtcgagacgccaggcttcaggtacacgtaccagaaatgacgtcacaggcggtgccaggcggggatccacgagctctggatgcttgcttggccggaagcgacgccccgcaaggacccgccccgccccgccccgccccgcgcgagccggtagttgcgcctcccagactgcagttggccagctctcggggtgcggagcccggcgggctaggcgaggcgcgggctggccccgcccctcaggccggcgagtccccttctcagagacttggctaggcgcggcgcgaggcgggcgctgcggcgccagcagccctgtggtggcgacgacgatggaccaggagccagtgggcggtgtggaacgaggagaagccgtcgcagcctcgggagctgcggccgccgcggcattcggggaatctgcagggcagatgagtaacgaaagaggctttgaaaatgtagaactgggagtcataggaaaaaagaagaaagtcccaaggagagtcatccactttgttagtggtgaaacaatggaagaatatagcacagatgaagacgaagttgatggcctggagaagaaagatgttttgcctactgttgatccgacaaaacttacctggggtccctacttatggttttacatgcttcgggctgctacatcaactctctcagtgtgtgacttccttggagagaagattgcatctgttttgggtatcagcaccccaaagtaccaatatgccattgatgaatattatcggatgaagaaggaggaagaagaagaagaagaagaaaacaggatgtctgaagaagcagaaaaacaatatcaacagaataaattgcagactgattccattgttcagacagatcaaccagagacagtgatatccagctcatttgtgaatgtcaattttgaaatggagggagacagtgaagtaattatggaaagcaagcaaaatccagtctctgtcccaccataaaatgaaatgactatcaagcttcaaactcttaagtgtttttttttttaatacaaaaactttcacattctttattcagtgggacttaatacaattatttatattttaaattattaaagtatctggaaagggaaaatgttttcttcatttttaggatctatctagcaaaagccagatctgaaattcagatatttgtactgtttttactgtgtatagaaattagtgctttggttttaaaatgatcttttaaaaaagttaaggacatcctagagccttaatagttaagaagagttaaattatcaagcctatttgtgcatttgctttttttgaaaaaggtaagttgctgattaagtctaattggaattgataattccatagtcttagattaaaatgaggatattttctcctagattttctcatgttatgccatgcatttatatatctaaccattaatttcacactaaggatgcttcaccatataataaaaggagcaagatggaagcactttgaattttctttcattgagaataactgttttatgtaagaatctgtatttataacaccagatattaagataggcttccattttttaatgcaagccacttacttaatcttgtattctttttcaggactcaaataactagctttgaacataatattaaaacactacttatagaatagatttattaatgttaatacctagtgaatatccatgtggcatcctggttatgttatcggttcagcgttaatcctatagaaaagtggtttggaggggattgggggatagtgggacaggtatagatttaatccatcaggagcaattagatattgtataaggtgcaatgatagcctaatgaaattacccgtcattcatcatttagaagtagcaacagtgaagactggacagtttacttgaatctggttggccactcctctacctacttggttatttgtaaaccttacaaatgtatatattgtgaagctaattttgaaaatattcctaaatatggccaggtacggtgctcacacctgtaatcccagcactttgggaggctgaagtgggcagattacttgaggtcaggagtttgagaccagcctggccaacgtagtgaaaccccgtctctacaaaaatacaaaaattagccaggcgtggtggtgcacgtctgtaatcccagctgctcgggaggctgaggcaggagaatcacttgaaccagggaggtggaggttgcagtgagccaagattgcaccactgcactccagcctgggcgacagagtgagactccatcttggggggaaaaaagtatatatatatacacacacacagacacacacacacacacatatatctctaaatgtgtgtatagaaccttttatcagtataacattgatttataattaaatgtgggtgaggaagaatgtgtggagtgtttcagaaattttgatcttaaaagccttttcagaaactcaaagctttcagaaattaatagttatattaatagccttctaaacagcattaagttttcaattttaatatatctatataaaatatagtgtcaaagaaagtaacatcaatatagtgggtctgtaatggaaatctgtcaatgaacatgaactgagttcttcaactacaggttgaaggataattaaacttttcattaggagtgttcagctacatggattcatggaatggtggttcatagtaagtgatggtaatctttttattcatgggtgtaaaccctttataacttagtgcttaaaatattaatcttttgattatataatgtcccatgaattatagtttaccaatagttctaaaacatgctaacctgaccttttccttctaatttgtttttaacttcattcgagatagtacctctcactcacagatatttatttggttatcaagtgaagataggtgtgtctaaaagtgatcttctgaatcctgtctccctagaggtactagtatctagagtttacccagaaaattttatgattgtaacaaaaggaagtagtgacttatgaaggttttgtttcttgaattttacttttgctacttgtccaatagtggctagtttatgtttatcaatatagttattcactgtgccttaagtttatactttgtttatgcaaactataaaatttcccataaatgta

SEQ ID NO: 432878 - DNA, 3412 bp, Homo sapiens
aagaaaattgtaatttgatatttaattgccactttggaaaataaaatcatgcatttataaatatcccacaaagttttagtaataaagattgttgattgccctgcttgccagtaagaaggaagagattttgaatacatataatgcagaactgtgttgtttatgaatgccaattcatgaagtcttaacaattggttctttatttttgttttcaatttatggccgagtttggttttgctgttttggactgtctcaactccctgctgatgccaccatacagagtcagatcagcaaccacatcccatcactagcctttgaagtacaacgacacagctgtcttcattttacaagtgcaaaaaccgaggtcctgcggggtgactgccccagacgccgctggtgacgggctgcgccgaggtcgagacgccaggcttcagcgccagcagccctgtggtggcgacgacgatggaccaggagccagtgggcggtgtggaacgaggagaagccgtcgcagcctcgggagctgcggccgccgcggcattcggggaatctgcagggcagatgagtaacgaaagaggctttgaaaatgtagaactgggagtcataggaaaaaagaagaaagtcccaaggagagtcatccactttgttagtggtgaaacaatggaagaatatagcacagatgaagacgaagttgatggcctggagaagaaagatgttttgcctactgttgatccgacaaaacttacctggggtccctacttatggttttacatgcttcgggctgctacatcaactctctcagtgtgtgacttccttggagagaagattgcatctgttttgggtatcagcaccccaaagtaccaatatgccattgatgaatattatcggatgaagaaggaggaagaagaagaagaagaagaaaacaggatgtctgaagaagcagaaaaacaatatcaacagaataaattgcagactgattccattgttcagacagatcaaccagagacagtgatatccagctcatttgtgaatgtcaattttgaaatggagggagacagtgaagtaattatggaaagcaagcaaaatccagtctctgtcccaccataaaatgaaatgactatcaagcttcaaactcttaagtgtttttttttttaatacaaaaactttcacattctttattcagtgggacttaatacaattatttatattttaaattattaaagtatctggaaagggaaaatgttttcttcatttttaggatctatctagcaaaagccagatctgaaattcagatatttgtactgtttttactgtgtatagaaattagtgctttggttttaaaatgatcttttaaaaaagttaaggacatcctagagccttaatagttaagaagagttaaattatcaagcctatttgtgcatttgctttttttgaaaaaggtaagttgctgattaagtctaattggaattgataattccatagtcttagattaaaatgaggatattttctcctagattttctcatgttatgccatgcatttatatatctaaccattaatttcacactaaggatgcttcaccatataataaaaggagcaagatggaagcactttgaattttctttcattgagaataactgttttatgtaagaatctgtatttataacaccagatattaagataggcttccattttttaatgcaagccacttacttaatcttgtattctttttcaggactcaaataactagctttgaacataatattaaaacactacttatagaatagatttattaatgttaatacctagtgaatatccatgtggcatcctggttatgttatcggttcagcgttaatcctatagaaaagtggtttggaggggattgggggatagtgggacaggtatagatttaatccatcaggagcaattagatattgtataaggtgcaatgatagcctaatgaaattacccgtcattcatcatttagaagtagcaacagtgaagactggacagtttacttgaatctggttggccactcctctacctacttggttatttgtaaaccttacaaatgtatatattgtgaagctaattttgaaaatattcctaaatatggccaggtacggtgctcacacctgtaatcccagcactttgggaggctgaagtgggcagattacttgaggtcaggagtttgagaccagcctggccaacgtagtgaaaccccgtctctacaaaaatacaaaaattagccaggcgtggtggtgcacgtctgtaatcccagctgctcgggaggctgaggcaggagaatcacttgaaccagggaggtggaggttgcagtgagccaagattgcaccactgcactccagcctgggcgacagagtgagactccatcttggggggaaaaaagtatatatatatacacacacacagacacacacacacacacatatatctctaaatgtgtgtatagaaccttttatcagtataacattgatttataattaaatgtgggtgaggaagaatgtgtggagtgtttcagaaattttgatcttaaaagccttttcagaaactcaaagctttcagaaattaatagttatattaatagccttctaaacagcattaagttttcaattttaatatatctatataaaatatagtgtcaaagaaagtaacatcaatatagtgggtctgtaatggaaatctgtcaatgaacatgaactgagttcttcaactacaggttgaaggataattaaacttttcattaggagtgttcagctacatggattcatggaatggtggttcatagtaagtgatggtaatctttttattcatgggtgtaaaccctttataacttagtgcttaaaatattaatcttttgattatataatgtcccatgaattatagtttaccaatagttctaaaacatgctaacctgaccttttccttctaatttgtttttaacttcattcgagatagtacctctcactcacagatatttatttggttatcaagtgaagataggtgtgtctaaaagtgatcttctgaatcctgtctccctagaggtactagtatctagagtttacccagaaaattttatgattgtaacaaaaggaagtagtgacttatgaaggttttgtttcttgaattttacttttgctacttgtccaatagtggctagtttatgtttatcaatatagttattcactgtgccttaagtttatactttgtttatgcaaactataaaatttcccataaatgtaaacaacatcacacaacaacacaacgacactgtcggaacacaaaaaaatttcgccccgcgcccaagattaacacgtgggcgcgcagaaaaaaagccaagcccgaacacgaaaacggcgtccaaaaacaccgcagggggacacggtcgggccggaaatcacc

SEQ ID NO: 432879 - DNA, 3477 bp, Homo sapiens
aagaaaattgtaatttgatatttaattgccactttggaaaataaaatcatgcatttataaatatcccacaaagttttagtaataaagattgttgattgccctgcttgccagtaagaaggaagagattttgaatacatataatgcagaactgtgttgtttatgaatgccaattcatgaagtcttaacaattggttctttatttttgttttcaatttatggccgagtttggttttgctgttttggactgtctcaactccctgctgatgccaccatacagagtcagatcagtgcaaaaaccgaggtcctgcggggtgactgccccagacgccgctggtgacgggctgcgccgaggtcgagacgccaggcttcaggtacacgtaccagaaatgacgtcacaggcggtgccaggcggggatccacgagctctggatgcttgcttggccggaagcgacgccccgcaaggacccgccccgccccgccccgccccgcgcgagccggtagttgcgcctcccagactgcagttggccagctctcggggtgcggagcccggcgggctaggcgaggcgcgggctggccccgcccctcaggccggcgagtccccttctcagagacttggctaggcgcggcgcgaggcgggcgctgcggcgccagcagccctgtggtggcgacgacgatggaccaggagccagtgggcggtgtggaacgaggagaagccgtcgcagcctcgggagctgcggccgccgcggcattcggggaatctgcagggcagatgagtaacgaaagaggctttgaaaatgtagaactgggagtcataggaaaaaagaagaaagtcccaaggagagtcatccactttgttagtggtgaaacaatggaagaatatagcacagatgaagacgaagttgatggcctggagaagaaagatgttttgcctactgttgatccgacaaaacttacctggggtccctacttatggttttacatgcttcgggctgctacatcaactctctcagtgtgtgacttccttggagagaagattgcatctgttttgggtatcagcaccccaaagtaccaatatgccattgatgaatattatcggatgaagaaggaggaagaagaagaagaagaagaaaacaggatgtctgaagaagcagaaaaacaatatcaacagaataaattgcagactgattccattgttcagacagatcaaccagagacagtgatatccagctcatttgtgaatgtcaattttgaaatggagggagacagtgaagtaattatggaaagcaagcaaaatccagtctctgtcccaccataaaatgaaatgactatcaagcttcaaactcttaagtgtttttttttttaatacaaaaactttcacattctttattcagtgggacttaatacaattatttatattttaaattattaaagtatctggaaagggaaaatgttttcttcatttttaggatctatctagcaaaagccagatctgaaattcagatatttgtactgtttttactgtgtatagaaattagtgctttggttttaaaatgatcttttaaaaaagttaaggacatcctagagccttaatagttaagaagagttaaattatcaagcctatttgtgcatttgctttttttgaaaaaggtaagttgctgattaagtctaattggaattgataattccatagtcttagattaaaatgaggatattttctcctagattttctcatgttatgccatgcatttatatatctaaccattaatttcacactaaggatgcttcaccatataataaaaggagcaagatggaagcactttgaattttctttcattgagaataactgttttatgtaagaatctgtatttataacaccagatattaagataggcttccattttttaatgcaagccacttacttaatcttgtattctttttcaggactcaaataactagctttgaacataatattaaaacactacttatagaatagatttattaatgttaatacctagtgaatatccatgtggcatcctggttatgttatcggttcagcgttaatcctatagaaaagtggtttggaggggattgggggatagtgggacaggtatagatttaatccatcaggagcaattagatattgtataaggtgcaatgatagcctaatgaaattacccgtcattcatcatttagaagtagcaacagtgaagactggacagtttacttgaatctggttggccactcctctacctacttggttatttgtaaaccttacaaatgtatatattgtgaagctaattttgaaaatattcctaaatatggccaggtacggtgctcacacctgtaatcccagcactttgggaggctgaagtgggcagattacttgaggtcaggagtttgagaccagcctggccaacgtagtgaaaccccgtctctacaaaaatacaaaaattagccaggcgtggtggtgcacgtctgtaatcccagctgctcgggaggctgaggcaggagaatcacttgaaccagggaggtggaggttgcagtgagccaagattgcaccactgcactccagcctgggcgacagagtgagactccatcttggggggaaaaaagtatatatatatacacacacacagacacacacacacacacatatatctctaaatgtgtgtatagaaccttttatcagtataacattgatttataattaaatgtgggtgaggaagaatgtgtggagtgtttcagaaattttgatcttaaaagccttttcagaaactcaaagctttcagaaattaatagttatattaatagccttctaaacagcattaagttttcaattttaatatatctatataaaatatagtgtcaaagaaagtaacatcaatatagtgggtctgtaatggaaatctgtcaatgaacatgaactgagttcttcaactacaggttgaaggataattaaacttttcattaggagtgttcagctacatggattcatggaatggtggttcatagtaagtgatggtaatctttttattcatgggtgtaaaccctttataacttagtgcttaaaatattaatcttttgattatataatgtcccatgaattatagtttaccaatagttctaaaacatgctaacctgaccttttccttctaatttgtttttaacttcattcgagatagtacctctcactcacagatatttatttggttatcaagtgaagataggtgtgtctaaaagtgatcttctgaatcctgtctccctagaggtactagtatctagagtttacccagaaaattttatgattgtaacaaaaggaagtagtgacttatgaaggttttgtttcttgaattttacttttgctacttgtccaatagtggctagtttatgtttatgggaaattttatagtttgcataaacaaagtataaacttaaggcacagtgaataactatattgataaacataaacgtcgacgc

SEQ ID NO: 432880 - DNA, 2683 bp, Homo sapiens
aagaaaattgtaatttgatatttaattgccactttggaaaataaaatcatgcatttataaatatcccacaaagttttagtaataaagattgttgattgccctgcttgccagtaagaaggaagagattttgaatacatataatgcagaactgtgttgtttatgaatgccaattcatgaagtcttaacaattggttctttatttttgttttcaatttatggccgagtttggttttgctgttttggactgtctcaactccctgctgatgccaccatacagagtcagatcagtgcaaaaaccgaggtcctgcggggtgactgccccagacgccgctggtgacgggctgcgccgaggtcgagacgccaggcttcaggtacacgtaccagaaatgacgtcacaggcggtgccaggcggggatccacgagctctggatgcttgcttggccggaagcgacgccccgcaaggacccgccccgccccgccccgccccgcgcgagccggtagttgcgcctcccagactgcagttggccagctctcggggtgcggagcccggcgggctaggcgaggcgcgggctggccccgcccctcaggccggcgagtccccttctcagagacttggctaggcgcggcgcgaggcgggcgctgcggcgccagcagccctgtggtggcgacgacgatggaccaggagccagtgggcggtgtggaacgaggagaagccgtcgcagcctcgggagctgcggccgccgcggcattcggggaatctgcagggcagatgagtaacgaaagaggctttgaaaatgtagaactgggagtcataggaaaaaagaagaaagtcccaaggagagtcatccactttgttagtggtgaaacaatggaagaatatagcacagatgaagacgaagttgatggcctggagaagaaagatgttttgcctactgttgatccgacaaaacttacctggggtccctacttatggttttacatgcttcgggctgctacatcaactctctcagtgtgtgacttccttggagagaagattgcatctgttttgggtatcagcaccccaaagtaccaatatgccattgatgaatattatcggatgaagaaggaggaagaagaagaagaagaagaaaacaggatgtctgaagaagcagaaaaacaatatcaacagaataaattgcagactgattccattgttcagacagatcaaccagagacagtgatatccagctcatttgtgaatgtcaattttgaaatggagggagacagtgaagtaattatggaaagcaagcaaaatccagtctctgtcccaccataaaatgaaatgactatcaagcttcaaactcttaagtgtttttttttttaatacaaaaactttcacattctttattcagtgggacttaatacaattatttatattttaaattattaaagtatctggaaagggaaaatgttttcttcatttttaggatctatctagcaaaagccagatctgaaattcagatatttgtactgtttttactgtgtatagaaattagtgctttggttttaaaatgatcttttaaaaaagttaaggacatcctagagccttaatagttaagaagagttaaattatcaagcctatttgtgcatttgctttttttgaaaaaggtaagttgctgattaagtctaattggaattgataattccatagtcttagattaaaatgaggatattttctcctagattttctcatgttatgccatgcatttatatatctaaccattaatttcacactaaggatgcttcaccatataataaaaggagcaagatggaagcactttgaattttctttcattgagaataactgttttatgtaagaatctgtatttataacaccagatattaagataggcttccattttttaatgcaagccacttacttaatcttgtattctttttcaggactcaaataactagctttgaacataatattaaaacactacttatagaatagatttattaatgttaatacctagtgaatatccatgtggcatcctggttatgttatcggttcagcgttaatcctatagaaaagtggtttggaggggattgggggatagtgggacaggtatagatttaatccatcaggagcaattagatattgtataaggtgcaatgatagcctaatgaaattacccgtcattcatcatttagaagtagcaacagtgaagactggacagtttacttgaatctggttggccactcctctacctacttggttatttgtaaaccttacaaatgtatatattgtgaagctaattttgaaaatattcctaaatatggccaggtacggtgctcacacctgtaatcccagcactttgggaggctgaagtgggcagattacttgaggtcaggagtttgagaccagcctggccaacgtagtgaaaccccgtctctacaaaaatacaaaaattagccaggcgtggtggtgcacgtctgtaatcccagctgctcgggaggctgaggcaggagaatcacttgaaccagggaggtggaggttgcagtgagccaagattgcaccactgcactccagcctgggcgacagagtgagactccatcttggggggaaaaagtttttttttatttccctccccctgtcccccaccccccccccatttattttttaaaggtggtgatgaaccct

SEQ ID NO: 432881 - DNA, 3738 bp, Homo sapiens
aagaaaattgtaatttgatatttaattgccactttggaaaataaaatcatgcatttataaatatcccacaaagttttagtaataaagattgttgattgccctgcttgccagtaagaaggaagagattttgaatacatataatgcagaactgtgttgtttatgaatgccaattcatgaagtcttaacaattggttctttatttttgttttcaatttatggccgagtttggttttgctgttttggactgtctcaactccctgctgatgccaccatacagagtcagatcagcaaccacatcccatcactagcctttgaagtacaacgacacagctgtcttcattttacaagtgcaaaaaccgaggtcctgcggggtgactgccccagacgccgctggtgacgggctgcgccgaggtcgagacgccaggcttcagcgccagcagccctgtggtggcgacgacgatggaccaggagccagtgggcggtgtggaacgaggagaagccgtcgcagcctcgggagctgcggccgccgcggcattcggggaatctgcagggcaggtaggtggggccgccgaggctgacgtccggggagccgagccgcctccttgccttctccgcgggccgctcttttagcctgcgcggccgtcctccgagcaggccgccccagctttggagttcctcctcactgcacccctgtttctgctcactgagaccagcttgtgggaaggagcgccccccgcctcactcaccaaccccttggctggcagcacagcagactctggggcggcctcgggttcctggggtgatagtccagcttctggtgtaccagaggaagaagaaaggcgtgtcccccaaaggctgtccttgcagtagctggaagccagatgagtaacgaaagaggctttgaaaatgtagaactgggagtcataggaaaaaagaagaaagtcccaaggagagtcatccactttgttagtggtgaaacaatggaagaatatagcacagatgaagacgaagttgatggcctggagaagaaagatgttttgcctactgttgatccgacaaaacttacctggggtccctacttatggttttacatgcttcgggctgctacatcaactctctcagtgtgtgacttccttggagagaagattgcatctgttttgggtatcagcaccccaaagtaccaatatgccattgatgaatattatcggatgaagaaggaggaagaagaagaagaagaagaaaacaggatgtctgaagaagcagaaaaacaatatcaacagaataaattgcagactgattccattgttcagacagatcaaccagagacagtgatatccagctcatttgtgaatgtcaattttgaaatggagggagacagtgaagtaattatggaaagcaagcaaaatccagtctctgtcccaccataaaatgaaatgactatcaagcttcaaactcttaagtgtttttttttttaatacaaaaactttcacattctttattcagtgggacttaatacaattatttatattttaaattattaaagtatctggaaagggaaaatgttttcttcatttttaggatctatctagcaaaagccagatctgaaattcagatatttgtactgtttttactgtgtatagaaattagtgctttggttttaaaatgatcttttaaaaaagttaaggacatcctagagccttaatagttaagaagagttaaattatcaagcctatttgtgcatttgctttttttgaaaaaggtaagttgctgattaagtctaattggaattgataattccatagtcttagattaaaatgaggatattttctcctagattttctcatgttatgccatgcatttatatatctaaccattaatttcacactaaggatgcttcaccatataataaaaggagcaagatggaagcactttgaattttctttcattgagaataactgttttatgtaagaatctgtatttataacaccagatattaagataggcttccattttttaatgcaagccacttacttaatcttgtattctttttcaggactcaaataactagctttgaacataatattaaaacactacttatagaatagatttattaatgttaatacctagtgaatatccatgtggcatcctggttatgttatcggttcagcgttaatcctatagaaaagtggtttggaggggattgggggatagtgggacaggtatagatttaatccatcaggagcaattagatattgtataaggtgcaatgatagcctaatgaaattacccgtcattcatcatttagaagtagcaacagtgaagactggacagtttacttgaatctggttggccactcctctacctacttggttatttgtaaaccttacaaatgtatatattgtgaagctaattttgaaaatattcctaaatatggccaggtacggtgctcacacctgtaatcccagcactttgggaggctgaagtgggcagattacttgaggtcaggagtttgagaccagcctggccaacgtagtgaaaccccgtctctacaaaaatacaaaaattagccaggcgtggtggtgcacgtctgtaatcccagctgctcgggaggctgaggcaggagaatcacttgaaccagggaggtggaggttgcagtgagccaagattgcaccactgcactccagcctgggcgacagagtgagactccatcttggggggaaaaaagtatatatatatacacacacacagacacacacacacacacatatatctctaaatgtgtgtatagaaccttttatcagtataacattgatttataattaaatgtgggtgaggaagaatgtgtggagtgtttcagaaattttgatcttaaaagccttttcagaaactcaaagctttcagaaattaatagttatattaatagccttctaaacagcattaagttttcaattttaatatatctatataaaatatagtgtcaaagaaagtaacatcaatatagtgggtctgtaatggaaatctgtcaatgaacatgaactgagttcttcaactacaggttgaaggataattaaacttttcattaggagtgttcagctacatggattcatggaatggtggttcatagtaagtgatggtaatctttttattcatgggtgtaaaccctttataacttagtgcttaaaatattaatcttttgattatataatgtcccatgaattatagtttaccaatagttctaaaacatgctaacctgaccttttccttctaatttgtttttaacttcattcgagatagtacctctcactcacagatatttatttggttatcaagtgaagataggtgtgtctaaaagtgatcttctgaatcctgtctccctagaggtactagtatctagagtttacccagaaaattttatgattgtaacaaaaggaagtagtgacttatgaaggttttgtttcttgaattttacttttgctacttgtccaatagtggctagtttatgtttatcaatatagttattcactgtgccttaagtttatactttgtttatgcaaactataaaatttcccataaatgtaaacaacatcacacaacaacacaacgacactgtcggaacacaaaaaaatttcgccccgcgcccaagattaacacgtgggcgcgcagaaaaaaagccaagcccgaacacgaaaacggcgtccaaaaacaccgcagggggacacggtcgggccggaaatcacc

SEQ ID NO: 432882 - DNA, 3952 bp, Homo sapiens
aagaaaattgtaatttgatatttaattgccactttggaaaataaaatcatgcatttataaatatcccacaaagttttagtaataaagattgttgattgccctgcttgccagtaagaaggaagagattttgaatacatataatgcagaactgtgttgtttatgaatgccaattcatgaagtcttaacaattggttctttatttttgttttcaatttatggccgagtttggttttgctgttttggactgtctcaactccctgctgatgccaccatacagagtcagatcagtgcaaaaaccgaggtcctgcggggtgactgccccagacgccgctggtgacgggctgcgccgaggtcgagacgccaggcttcaggtacacgtaccagaaatgacgtcacaggcggtgccaggcggggatccacgagctctggatgcttgcttggccggaagcgacgccccgcaaggacccgccccgccccgccccgccccgcgcgagccggtagttgcgcctcccagactgcagttggccagctctcggggtgcggagcccggcgggctaggcgaggcgcgggctggccccgcccctcaggccggcgagtccccttctcagagacttggctaggcgcggcgcgaggcgggcgctgcggcgccagcagccctgtggtggcgacgacgatggaccaggagccagtgggcggtgtggaacgaggagaagccgtcgcagcctcgggagctgcggccgccgcggcattcggggaatctgcagggcaggtaggtggggccgccgaggctgacgtccggggagccgagccgcctccttgccttctccgcgggccgctcttttagcctgcgcggccgtcctccgagcaggccgccccagctttggagttcctcctcactgcacccctgtttctgctcactgagaccagcttgtgggaaggagcgccccccgcctcactcaccaaccccttggctggcagcacagcagactctggggcggcctcgggttcctggggtgatagtccagcttctggtgtaccagaggaagaagaaaggcgtgtcccccaaaggctgtccttgcagtagctggaagccagatgagtaacgaaagaggctttgaaaatgtagaactgggagtcataggaaaaaagaagaaagtcccaaggagagtcatccactttgttagtggtgaaacaatggaagaatatagcacagatgaagacgaagttgatggcctggagaagaaagatgttttgcctactgttgatccgacaaaacttacctggggtccctacttatggttttacatgcttcgggctgctacatcaactctctcagtgtgtgacttccttggagagaagattgcatctgttttgggtatcagcaccccaaagtaccaatatgccattgatgaatattatcggatgaagaaggaggaagaagaagaagaagaagaaaacaggatgtctgaagaagcagaaaaacaatatcaacagaataaattgcagactgattccattgttcagacagatcaaccagagacagtgatatccagctcatttgtgaatgtcaattttgaaatggagggagacagtgaagtaattatggaaagcaagcaaaatccagtctctgtcccaccataaaatgaaatgactatcaagcttcaaactcttaagtgtttttttttttaatacaaaaactttcacattctttattcagtgggacttaatacaattatttatattttaaattattaaagtatctggaaagggaaaatgttttcttcatttttaggatctatctagcaaaagccagatctgaaattcagatatttgtactgtttttactgtgtatagaaattagtgctttggttttaaaatgatcttttaaaaaagttaaggacatcctagagccttaatagttaagaagagttaaattatcaagcctatttgtgcatttgctttttttgaaaaaggtaagttgctgattaagtctaattggaattgataattccatagtcttagattaaaatgaggatattttctcctagattttctcatgttatgccatgcatttatatatctaaccattaatttcacactaaggatgcttcaccatataataaaaggagcaagatggaagcactttgaattttctttcattgagaataactgttttatgtaagaatctgtatttataacaccagatattaagataggcttccattttttaatgcaagccacttacttaatcttgtattctttttcaggactcaaataactagctttgaacataatattaaaacactacttatagaatagatttattaatgttaatacctagtgaatatccatgtggcatcctggttatgttatcggttcagcgttaatcctatagaaaagtggtttggaggggattgggggatagtgggacaggtatagatttaatccatcaggagcaattagatattgtataaggtgcaatgatagcctaatgaaattacccgtcattcatcatttagaagtagcaacagtgaagactggacagtttacttgaatctggttggccactcctctacctacttggttatttgtaaaccttacaaatgtatatattgtgaagctaattttgaaaatattcctaaatatggccaggtacggtgctcacacctgtaatcccagcactttgggaggctgaagtgggcagattacttgaggtcaggagtttgagaccagcctggccaacgtagtgaaaccccgtctctacaaaaatacaaaaattagccaggcgtggtggtgcacgtctgtaatcccagctgctcgggaggctgaggcaggagaatcacttgaaccagggaggtggaggttgcagtgagccaagattgcaccactgcactccagcctgggcgacagagtgagactccatcttggggggaaaaaagtatatatatatacacacacacagacacacacacacacacatatatctctaaatgtgtgtatagaaccttttatcagtataacattgatttataattaaatgtgggtgaggaagaatgtgtggagtgtttcagaaattttgatcttaaaagccttttcagaaactcaaagctttcagaaattaatagttatattaatagccttctaaacagcattaagttttcaattttaatatatctatataaaatatagtgtcaaagaaagtaacatcaatatagtgggtctgtaatggaaatctgtcaatgaacatgaactgagttcttcaactacaggttgaaggataattaaacttttcattaggagtgttcagctacatggattcatggaatggtggttcatagtaagtgatggtaatctttttattcatgggtgtaaaccctttataacttagtgcttaaaatattaatcttttgattatataatgtcccatgaattatagtttaccaatagttctaaaacatgctaacctgaccttttccttctaatttgtttttaacttcattcgagatagtacctctcactcacagatatttatttggttatcaagtgaagataggtgtgtctaaaagtgatcttctgaatcctgtctccctagaggtactagtatctagagtttacccagaaaattttatgattgtaacaaaaggaagtagtgacttatgaaggttttgtttcttgaattttacttttgctacttgtccaatagtggctagtttatgtttatcaatatagttattcactgtgccttaagtttatactttgtttatgcaaactataaaatttcccataaatgtaaacaacatcacacaacaacacaacgacactgtcggaacacaaaaaaatttcgccccgcgcccaagattaacacgtgggcgcgcagaaaaaaagccaagcccgaacacgaaaacggcgtccaaaaacaccgcagggggacacggtcgggccggaaatcacc

SEQ ID NO: 432883 - DNA, 2954 bp, Homo sapiens
  misc_feature (73)..(73): n is a, c, g, or t
cttctcctcgttccacaccgcccactggctcctggtccatcgtcgtcgccaccacagggctgctggcgccgcngcattcggggaatctgcagggcagatgagtaacgaaagaggctttgaaaatgtagaactgggagtcataggaaaaaagaagaaagtcccaaggagagtcatccactttgttagtggtgaaacaatggaagaatatagcacagatgaagacgaagttgatggcctggagaagaaagatgttttgcctactgttgatccgacaaaacttacctggggtccctacttatggttttacatgcttcgggctgctacatcaactctctcagtgtgtgacttccttggagagaagattgcatctgttttgggtatcagcaccccaaagtaccaatatgccattgatgaatattatcggatgaagaaggaggaagaagaagaagaagaagaaaacaggatgtctgaagaagcagaaaaacaatatcaacagaataaattgcagactgattccattgttcagacagatcaaccagagacagtgatatccagctcatttgtgaatgtcaattttgaaatggagggagacagtgaagtaattatggaaagcaagcaaaatccagtctctgtcccaccataaaatgaaatgactatcaagcttcaaactcttaagtgtttttttttttaatacaaaaactttcacattctttattcagtgggacttaatacaattatttatattttaaattattaaagtatctggaaagggaaaatgttttcttcatttttaggatctatctagcaaaagccagatctgaaattcagatatttgtactgtttttactgtgtatagaaattagtgctttggttttaaaatgatcttttaaaaaagttaaggacatcctagagccttaatagttaagaagagttaaattatcaagcctatttgtgcatttgctttttttgaaaaaggtaagttgctgattaagtctaattggaattgataattccatagtcttagattaaaatgaggatattttctcctagattttctcatgttatgccatgcatttatatatctaaccattaatttcacactaaggatgcttcaccatataataaaaggagcaagatggaagcactttgaattttctttcattgagaataactgttttatgtaagaatctgtatttataacaccagatattaagataggcttccattttttaatgcaagccacttacttaatcttgtattctttttcaggactcaaataactagctttgaacataatattaaaacactacttatagaatagatttattaatgttaatacctagtgaatatccatgtggcatcctggttatgttatcggttcagcgttaatcctatagaaaagtggtttggaggggattgggggatagtgggacaggtatagatttaatccatcaggagcaattagatattgtataaggtgcaatgatagcctaatgaaattacccgtcattcatcatttagaagtagcaacagtgaagactggacagtttacttgaatctggttggccactcctctacctacttggttatttgtaaaccttacaaatgtatatattgtgaagctaattttgaaaatattcctaaatatggccaggtacggtgctcacacctgtaatcccagcactttgggaggctgaagtgggcagattacttgaggtcaggagtttgagaccagcctggccaacgtagtgaaaccccgtctctacaaaaatacaaaaattagccaggcgtggtggtgcacgtctgtaatcccagctgctcgggaggctgaggcaggagaatcacttgaaccagggaggtggaggttgcagtgagccaagattgcaccactgcactccagcctgggcgacagagtgagactccatcttggggggaaaaaagtatatatatatacacacacacagacacacacacacacacatatatctctaaatgtgtgtatagaaccttttatcagtataacattgatttataattaaatgtgggtgaggaagaatgtgtggagtgtttcagaaattttgatcttaaaagccttttcagaaactcaaagctttcagaaattaatagttatattaatagccttctaaacagcattaagttttcaattttaatatatctatataaaatatagtgtcaaagaaagtaacatcaatatagtgggtctgtaatggaaatctgtcaatgaacatgaactgagttcttcaactacaggttgaaggataattaaacttttcattaggagtgttcagctacatggattcatggaatggtggttcatagtaagtgatggtaatctttttattcatgggtgtaaaccctttataacttagtgcttaaaatattaatcttttgattatataatgtcccatgaattatagtttaccaatagttctaaaacatgctaacctgaccttttccttctaatttgtttttaacttcattcgagatagtacctctcactcacagatatttatttggttatcaagtgaagataggtgtgtctaaaagtgatcttctgaatcctgtctccctagaggtactagtatctagagtttacccagaaaattttatgattgtaacaaaaggaagtagtgacttatgaaggttttgtttcttgaattttacttttgctacttgtccaatagtggctagtttatgtttatcaatatagttattcactgtgccttaagtttatactttgtttatgcaaactataaaatttcccataaatgtaaacaacatcacacaacaacacaacgacactgtcggaacacaaaaaaatttcgccccgcgcccaagattaacacgtgggcgcgcagaaaaaaagccaagcccgaacacgaaaacggcgtccaaaaacaccgcagggggacacggtcgggccggaaatcacc

SEQ ID NO: 432884 - DNA, 1368 bp, Homo sapiens
aagaaaattgtaatttgatatttaattgccactttggaaaataaaatcatgcatttataaatatcccacaaagttttagtaataaagattgttgattgccctgcttgccagtaagaaggaagagattttgaatacatataatgcagaactgtgttgtttatgaatgccaattcatgaagtcttaacaattggttctttatttttgttttcaatttatggccgagtttggttttgctgttttggactgtctcaactccctgctgatgccaccatacagagtcagatcagtgcaaaaaccgaggtcctgcggggtgactgccccagacgccgctggtgacgggctgcgccgaggtcgagacgccaggcttcaggtacacgtaccagaaatgacgtcacaggcggtgccaggcggggatccacgagctctggatgcttgcttggccggaagcgacgccccgcaaggacccgccccgccccgccccgccccgcgcgagccggtagttgcgcctcccagactgcagttggccagctctcggggtgcggagcccggcgggctaggcgaggcgcgggctggccccgcccctcaggccggcgagtccccttctcagagacttggctaggcgcggcgcgaggcgggcgctgcgggtgagtcccacttcccgacagcctggctcggccagcgactgggcggggagaccaaggatggaagtgggcttaccggccattaccctctttctcaccagcgccagcagccctgtggtggcgacgacgatggaccaggagccagtgggcggtgtggaacgaggagaagccgtcgcagcctcgggagctgcggccgccgcggcattcggggaatctgcagggcagacaaaacttacctggggtccctacttatggttttacatgcttcgggctgctacatcaactctctcagtgtgtgacttccttggagagaagattgcatctgttttgggtatcagcaccccaaagtaccaatatgccattgatgaatattatcggatgaagaaggaggaagaagaagaagaagaagaaaacaggatgtctgaagaagcagaaaaacaatatcaacagaataaattgcagactgattccattgttcagacagatcaaccagagacagtgatatccagctcatttgtgaatgtcaattttgaaatggagggagacagtgaagtaattatggaaagcaagcaaaatccagtctctgtcccaccataaaatgaaatgactatcaagcttcaaactcttaagtgtttttttttttaatacaaaaactttcacattctttattcagtgggacttaatacaattatttatattttaaattattaaagtatctggaaaggg

SEQ ID NO: 432885 - DNA, 1136 bp, Homo sapiens
aagaaaattgtaatttgatatttaattgccactttggaaaataaaatcatgcatttataaatatcccacaaagttttagtaataaagattgttgattgccctgcttgccagtaagaaggaagagattttgaatacatataatgcagaactgtgttgtttatgaatgccaattcatgaagtcttaacaattggttctttatttttgttttcaatttatggccgagtttggttttgctgttttggactgtctcaactccctgctgatgccaccatacagagtcagatcagtgcaaaaaccgaggtcctgcggggtgactgccccagacgccgctggtgacgggctgcgccgaggtcgagacgccaggcttcaggtacacgtaccagaaatgacgtcacaggcggtgccaggcggggatccacgagctctggatgcttgcttggccggaagcgacgccccgcaaggacccgccccgccccgccccgccccgcgcgagccggtagttgcgcctcccagactgcagttggccagctctcggggtgcggagcccggcgggctaggcgaggcgcgggctggccccgcccctcaggccggcgagtccccttctcagagacttggctaggcgcggcgcgaggcgggcgctgcggcgccagcagccctgtggtggcgacgacgatggaccaggagccagtgggcggtgtggaacgaggagaagccgtcgcagcctcgggagctgcggccgccgcggcattcggggaatctgcagggcagaatctcactctgttgcccaggctgaagttcatggcgcgatctcggctcgctgcaacctccacctcccgggttcaagcaattctcctgcctcagcctcctgtgtagctgggattataggcacgctccaccgcgcctggctaatttttgtatttttttagtagaggtgggatttcaccatgttagccagggtggtctcacacccttgacctcaagttgtctgcccgcctcagtctcccaaagtgctggggttacaagcatgagccaccatgcccagccacagtgtaaattttatttgtaattattggatttctggttcaagttgatgtttgaaaaataaaaaaagaaaaatattttaaaaatataatta

SEQ ID NO: 432886 - DNA, 2988 bp, Homo sapiens
tgtgaaaggcagtgggctaagtggtagggggagaaggaagatacagagtgctttcaaaagtgcctaaatgtaagtcaacagggcagtgtgccaattacagtgttataatgttctacagaagagggatgtacaccaagaatgccagcctggacctctggtgtgtcttggaagacttaaccaggaaggggacgattcgtttctatttgacccaagactgatgctgcgtggtgaaggagaggaactgcgttccaggcagaggaagtccagatgcgcaagagcagagatgggagggacagcacagtggcttctcagaattgaatatggtgttagacttctaaaagagctgtggtagagggagaaaactgtcaaaggaaatcagtaactgttaaaggaaaataccttaaacgtcctgttttcaggctgactaatgccttaggggagcaaatgagcaacagaaacgatatgagcaactgctgttctttcaaaatacccaggcagaggaaccggcagacgatgggcagcatcgaacaaacaactgagatcctgttgtgcctatcacctgttgaagttgccagtcttaaggaaggaatcaatttctttcgcaataagagcactggcaaagactacgtcttgtacaagaataagagccgactgagggcatgcaagaatatgtgcaagcaccaaggaggcctgttcataaaagatatcgaggatttagccggaagttgttgaaatggatgaaaacaacggacttttgcttttagaactgaatcctcctaacccttgggacttacagcccagatctcctgaagagttggcttttggagaagtacagataacatatctcactcatgcctgcatggacctcaagttaggagacaagagaatggtgtttgacccttggttaatcggtcctgcttttgcccgtggatggtggttgctccatgagcctccatctgattggctggagaggctgtgccaggcagacctcatttacatcagtcatctgcactcagaccacctgagttaccccacactgaaaaagcttgctgggagaagaccagatattcccatttatgttggaaacacagaaaggcctgtattttggaatctgaatcagagcggtgtccagttgactaatatcaatgtcgtgccatttggaatatggcagcaggtggacaaaaatcttcgattcatgatcttgatggacggtgttcatcctgagatggacacttgcattattgtggagtacaaaggtcataaaatactcaatatagtagactgcaccagacccaatgggggaaggctgcctatgaaggttgctctaatgatgagtgattttgctggaggagcatcaggctttccaatgactttcagtggtggaaaatttacggaggaatggaaagcccaattcattaaaacagaaaggaagaagctcctgaactacaaggctcggctggtgaagaacctgcaaccccgaatttattgtccctttgctgggtattttgtggaatctcacccatcagacaagtacatcaaggaaacaaacaccaaaaatgacccaaatgaactcaacaatcttatcaagaaaaactctgatgtgataacatggacccctcgaccgggagccacccttgatctgggaagaatgctgaaggatcgaacagacagcaagggcatcatagagcctccagaggggacaaaaatttacaaggattcctgggattttgaaccttatttggaaatcttgaatgctgctctaggagatgaaatatttcttcactcatcctggataaaagaatacttcacttgggctggatttaaagattacaaccttgtggtcaggatgattgagacagatgaggacttcaatccttttcctggaggatatgactatttggttgactttttagatttatccttcccaaaagaaagaccacaacgagaacatccctatgaggaaatccatagccgggtggatgtcatcagacacgtggtgaagaatggtctactctgggatgagttgtatataggattccaaacacggctccagcgggatcctgacatataccatcacctgttttggaatcattttcaaataaaactccccctcacaccacccaactggaagtcattcctgatgtgctgtgagcagaatgggcctgcgattttgcaagaatgcaaaaccacatgaaaatttcaagaattcactgatctgatgcaaaataaaaatttatcattacatcttgaacccaggaagcttacagcaaagagactatgctttatgacgtcagcaatagataattccacgttgcctttgtgatttgtatatatagcttacatttgtggatcactacatagccagattcaaaaatattttacttgttccatccacagttctctacagaaagaaccaatgaacccaataggaacaaattctctgtggaaaacaaagcatagctgtagtagatacgaatccaatcacagaggaaacaggaagagaaaaacatccaagactacagtgaaaactggaaatggtctgttttcgtgatattcgtatgattaagatgcaaattttttcttaggaaaatgtgattgttaactagcattctgttttacatgttgacatttctaacacacacaccactgatttgaacttcaaaatttattttctgattatatatgctaggtctgattctgaagatacaagaattcaatggtggaatttgtctcctgaaatttctagattcataattagaagtgtttattaccaacttctcacttagattaacatcaatgatgtttgattattctggttaaccgctcacatgcataacaataatgctagaaattcaggaattataattttgtgatttatactgtgtggtaaattattcagttctcactgcaaataaatataatgtatatcaatgtaatgtaggtcagaatgtctatggtgagcaaataaaagattattttaaaatatga

SEQ ID NO: 432887 - DNA, 2737 bp, Homo sapiens
cagcaggctgagtgttcatgtcaccagaagtctgactcgcctgctgtgctcttgcctgctgtgctctcgtaattactttcggaaaggttttctggctacaataaaatctgattaaatttgttaccaagcaaattgaattgttcaggctgcaacctttctagaagttttaaacgttatttaaaagaagatttcaacctcactccatttcagctttctctgaggagctgctcttgtgctgtttggcccctgcctactcggaatggaacaaagcatcgaacaaacaactgagatcctgttgtgcctatcacctgttgaagttgccagtcttaaggaaggaatcaatttctttcgcaataagagcactggcaaagactacgtcttgtacaagaataagagccgactgagggcatgcaagaatatgtgcaagcaccaaggaggcctgttcataaaagatatcgaggatttagccggaagttgttgaaatggatgaaaacaacggacttttgcttttagaactgaatcctcctaacccttgggacttacagcccagatctcctgaagagttggcttttggagaagtacagataacatatctcactcatgcctgcatggacctcaagttaggagacaagagaatggtgtttgacccttggttaatcggtcctgcttttgcccgtggatggtggttgctccatgagcctccatctgattggctggagaggctgtgccaggcagacctcatttacatcagtcatctgcactcagaccacctgagttaccccacactgaaaaagcttgctgggagaagaccagatattcccatttatgttggaaacacagaaaggcctgtattttggaatctgaatcagagcggtgtccagttgactaatatcaatgtcgtgccatttggaatatggcagcaggtggacaaaaatcttcgattcatgatcttgatggacggtgttcatcctgagatggacacttgcattattgtggagtacaaaggtcataaaatactcaatatagtagactgcaccagacccaatgggggaaggctgcctatgaaggttgctctaatgatgagtgattttgctggaggagcatcaggctttccaatgactttcagtggtggaaaatttacggaggaatggaaagcccaattcattaaaacagaaaggaagaagctcctgaactacaaggctcggctggtgaagaacctgcaaccccgaatttattgtccctttgctgggtattttgtggaatctcacccatcagacaagtacatcaaggaaacaaacaccaaaaatgacccaaatgaactcaacaatcttatcaagaaaaactctgatgtgataacatggacccctcgaccgggagccacccttgatctgggaagaatgctgaaggatcgaacagacagcaagggcatcatagagcctccagaggggacaaaaatttacaaggattcctgggattttgaaccttatttggaaatcttgaatgctgctctaggagatgaaatatttcttcactcatcctggataaaagaatacttcacttgggctggatttaaagattacaaccttgtggtcaggatgattgagacagatgaggacttcaatccttttcctggaggatatgactatttggttgactttttagatttatccttcccaaaagaaagaccacaacgagaacatccctatgaggaaatccatagccgggtggatgtcatcagacacgtggtgaagaatggtctactctgggatgagttgtatataggattccaaacacggctccagcgggatcctgacatataccatcacctgttttggaatcattttcaaataaaactccccctcacaccacccaactggaagtcattcctgatgtgctgtgagcagaatgggcctgcgattttgcaagaatgcaaaaccacatgaaaatttcaagaattcactgatctgatgcaaaataaaaatttatcattacatcttgaacccaggaagcttacagcaaagagactatgctttatgacgtcagcaatagataattccacgttgcctttgtgatttgtatatatagcttacatttgtggatcactacatagccagattcaaaaatattttacttgttccatccacagttctctacagaaagaaccaatgaacccaataggaacaaattctctgtggaaaacaaagcatagctgtagtagatacgaatccaatcacagaggaaacaggaagagaaaaacatccaagactacagtgaaaactggaaatggtctgttttcgtgatattcgtatgattaagatgcaaattttttcttaggaaaatgtgattgttaactagcattctgttttacatgttgacatttctaacacacacaccactgatttgaacttcaaaatttattttctgattatatatgctaggtctgattctgaagatacaagaattcaatggtggaatttgtctcctgaaatttctagattcataattagaagtgtttattaccaacttctcacttagattaacatcaatgatgtttgattattctggttaaccgctcacatgcataacaataatgctagaaattcaggaattataattttgtgatttatactgtgtggtaaattattcagttctcactgcaaataaatataatgtatatcaatgtaatgtaggtcagaatgtctatggtgagcaaataaaagattattttaaaatatga

SEQ ID NO: 432888 - DNA, 2950 bp, Homo sapiens
tgtgaaaggcagtgggctaagtggtagggggagaaggaagatacagagtgctttcaaaagtgcctaaatgtaagtcaacagggcagtgtgccaattacagtgttataatgttctacagaagagggatgtacaccaagaatgccagcctggacctctggtgtgtcttggaagacttaaccaggaaggggacgattcgtttctatttgacccaagactgatgctgcgtggtgaaggagaggaactgcgttccaggcagaggaagtccagatgcgcaagagcagagatgggagggacagcacagtggcttctcagaattgaatatggtgttagacttctaaaagagctgtggtagagggagaaaactgtcaaaggaaatcagtaactgttaaaggaaaataccttaaacgtcctgttttcaggctgactaatgccttaggggagcaaatgagcaacagaaacgatatgagcaactgctgttctttccatcgaacaaacaactgagatcctgttgtgcctatcacctgttgaagttgccagtcttaaggaaggaatcaatttctttcgcaataagagcactggcaaagactacgtcttgtacaagaataagagccgactgagggcatgcaagaatatgtgcaagcaccaaggaggcctgttcataaaagatatcgaggatttagccggaagttgttgaaatggatgaaaacaacggacttttgcttttagaactgaatcctcctaacccttgggacttacagcccagatctcctgaagagttggcttttggagaagtacagataacatatctcactcatgcctgcatggacctcaagttaggagacaagagaatggtgtttgacccttggttaatcggtcctgcttttgcccgtggatggtggttgctccatgagcctccatctgattggctggagaggctgtgccaggcagacctcatttacatcagtcatctgcactcagaccacctgagttaccccacactgaaaaagcttgctgggagaagaccagatattcccatttatgttggaaacacagaaaggcctgtattttggaatctgaatcagagcggtgtccagttgactaatatcaatgtcgtgccatttggaatatggcagcaggtggacaaaaatcttcgattcatgatcttgatggacggtgttcatcctgagatggacacttgcattattgtggagtacaaaggtcataaaatactcaatatagtagactgcaccagacccaatgggggaaggctgcctatgaaggttgctctaatgatgagtgattttgctggaggagcatcaggctttccaatgactttcagtggtggaaaatttacggaggaatggaaagcccaattcattaaaacagaaaggaagaagctcctgaactacaaggctcggctggtgaagaacctgcaaccccgaatttattgtccctttgctgggtattttgtggaatctcacccatcagacaagtacatcaaggaaacaaacaccaaaaatgacccaaatgaactcaacaatcttatcaagaaaaactctgatgtgataacatggacccctcgaccgggagccacccttgatctgggaagaatgctgaaggatcgaacagacagcaagggcatcatagagcctccagaggggacaaaaatttacaaggattcctgggattttgaaccttatttggaaatcttgaatgctgctctaggagatgaaatatttcttcactcatcctggataaaagaatacttcacttgggctggatttaaagattacaaccttgtggtcaggatgattgagacagatgaggacttcaatccttttcctggaggatatgactatttggttgactttttagatttatccttcccaaaagaaagaccacaacgagaacatccctatgaggaaatccatagccgggtggatgtcatcagacacgtggtgaagaatggtctactctgggatgagttgtatataggattccaaacacggctccagcgggatcctgacatataccatcacctgttttggaatcattttcaaataaaactccccctcacaccacccaactggaagtcattcctgatgtgctgtgagcagaatgggcctgcgattttgcaagaatgcaaaaccacatgaaaatttcaagaattcactgatctgatgcaaaataaaaatttatcattacatcttgaacccaggaagcttacagcaaagagactatgctttatgacgtcagcaatagataattccacgttgcctttgtgatttgtatatatagcttacatttgtggatcactacatagccagattcaaaaatattttacttgttccatccacagttctctacagaaagaaccaatgaacccaataggaacaaattctctgtggaaaacaaagcatagctgtagtagatacgaatccaatcacagaggaaacaggaagagaaaaacatccaagactacagtgaaaactggaaatggtctgttttcgtgatattcgtatgattaagatgcaaattttttcttaggaaaatgtgattgttaactagcattctgttttacatgttgacatttctaacacacacaccactgatttgaacttcaaaatttattttctgattatatatgctaggtctgattctgaagatacaagaattcaatggtggaatttgtctcctgaaatttctagattcataattagaagtgtttattaccaacttctcacttagattaacatcaatgatgtttgattattctggttaaccgctcacatgcataacaataatgctagaaattcaggaattataattttgtgatttatactgtgtggtaaattattcagttctcactgcaaataaatataatgtatatcaatgtaatgtaggtcagaatgtctatggtgagcaaataaaagattattttaaaatatga

SEQ ID NO: 432889 - DNA, 3542 bp, Homo sapiens
  misc_feature (258)..(258): n is a, c, g, or t
  misc_feature (574)..(574): n is a, c, g, or t
  misc_feature (1384)..(1384): n is a, c, g, or t
  misc_feature (1396)..(1396): n is a, c, g, or t
ttgtaagttgcagattaccaactaaggtttctagctcaaaacatgatggagcatgaaggaaatgttgagatctgagagcacctcaggaggagccaagaaagagaatcatctggattcaccatgtagaccgtagagcagaacaggaaaggcctgaagtgggtcatccaggcttaggtgctcttggaatatggttcctaatggggtgtgtgcagcctcaatgtagacacatccccttggcactgtggatgctcatatcanggagcagtgtgcccagaagagagtcctctagttggggacctctagtgcacccagaggagggtcctctggttgggggtcttaggcaggagcccttctgctctgggtccaagagtggggttggggttgacattggggaagtgtgtatcctcaacactagtattgtaagtgctcaatacatgtccacttaataaattaatgtatctgataagtgatccctgtctaacagtgtggcagaaaatgccctgctttgcaatatgaagataacctttgtcccgttctttgctttcttctctaagtctatattcattgcctcccngagtgtgtaaccacatgagaaatagagggaaggttctgtccttaagaagttaaaagtgtgactgggaaggtaaaacatacttattaagggttaactagcatcatgccattctgtgtgatggtgagtttgtgtgtgtgtgcacatgtgcgtgagtacacacatatacatttaaaaaggtcttgaatataccaaaatattatgtctaggtgatgggtagcttgtatattttttctgtatccttgtctgtgtttgtcaaattttatagaaacaataacagtaacagctctctgaccttctaccctgtatgttctgcgtcctgtctaattcctcaagttccttcactgcctgtcactctgatgcttgctatatatcagtccatcctgctttttgtttcttagacccaaagtgtcaagtgcacacctgccctgggtctttgtgtttgctgtttccatttcctggagtgcagctggccctgatttgcatgtgaccagcaacttttcatctatgtctcaactcaaatgtcacctcttcactgaccatcctgtctaatgattccctccatctcatcccactcaccccagccactctctgttccattgccctgttttattttcttcacggtgcatcattctttgcaatgactttatttacttgttcattatttgcttctctcactagaatgaacactccatgagagcagggacctgctttgccttgttcaccactttattcccagtggctagaaccacgtctgacacagagtaggtgcacaataaatattggttacgtgaatgaataagcaaatgaacngcactgtgagangggcatcatgactccatttacagagaagatacagacatggagaagttaggtagtttgcccaaggctgcccaaccagtaagtggtgggtcaggattttcaacctaactgactccaacgtcatgctcttaatcactgtgtatttgtcagattatgttgaacacacctgttataatctacaaatataatgaagccattttcatgttagtaaagagttaatttcaagaattacaatgcccttaaaatgtgcatgcacaccaactacgattatgcatcctaccctgtgtattcagctagggtccgaatgaattgccatatacaaggagaaagctcagtgcctttggctggcttggtaacattttcctagtaaccaattgaaatttccaagataaaaactccggggaaatcctccactaatgacatggagccttgttctatttctgccttagttacctatcaattttatctcctgaaagagttccaatctgctagaacatgtgtttttctgtgatttttccagcagaggagactccaatctaaatcctgtcatttcagaggaatggaaagcccaattcattaaaacagaaaggaagaagctcctgaactacaaggctcggctggtgaagaacctgcaaccccgaatttattgtccctttgctgggtattttgtggaatctcacccatcagacaagtacatcaaggaaacaaacaccaaaaatgacccaaatgaactcaacaatcttatcaagaaaaactctgatgtgataacatggacccctcgaccgggagccacccttgatctgggaagaatgctgaaggatcgaacagacagcaagggcatcatagagcctccagaggggacaaaaatttacaaggattcctgggattttgaaccttatttggaaatcttgaatgctgctctaggagatgaaatatttcttcactcatcctggataaaagaatacttcacttgggctggatttaaagattacaaccttgtggtcaggatgattgagacagatgaggacttcaatccttttcctggaggatatgactatttggttgactttttagatttatccttcccaaaagaaagaccacaacgagaacatccctatgaggaaatccatagccgggtggatgtcatcagacacgtggtgaagaatggtctactctgggatgagttgtatataggattccaaacacggctccagcgggatcctgacatataccatcacctgttttggaatcattttcaaataaaactccccctcacaccacccaactggaagtcattcctgatgtgctgtgagcagaatgggcctgcgattttgcaagaatgcaaaaccacatgaaaatttcaagaattcactgatctgatgcaaaataaaaatttatcattacatcttgaacccaggaagcttacagcaaagagactatgctttatgacgtcagcaatagataattccacgttgcctttgtgatttgtatatatagcttacatttgtggatcactacatagccagattcaaaaatattttacttgttccatccacagttctctacagaaagaaccaatgaacccaataggaacaaattctctgtggaaaacaaagcatagctgtagtagatacgaatccaatcacagaggaaacaggaagagaaaaacatccaagactacagtgaaaactggaaatggtctgttttcgtgatattcgtatgattaagatgcaaattttttcttaggaaaatgtgattgttaactagcattctgttttacatgttgacatttctaacacacacaccactgatttgaacttcaaaatttattttctgattatatatgctaggtctgattctgaagatacaagaattcaatggtggaatttgtctcctgaaatttctagattcataattagaagtgtttattaccaacttctcacttagattaacatcaatgatgtttgattattctggttaaccgctcacatgcataacaataatgctagaaattcaggaattataattttgtgatttatactgtgtggtaaattattcagttctcactgcaaataaatataatgtatatcaatgtaatgtaggtcagaatgtctatggtgagcaaataaaagattattttaaaatatga

SEQ ID NO: 432890 - DNA, 3684 bp, Homo sapiens
  misc_feature (1526)..(1526): n is a, c, g, or t
  misc_feature (1538)..(1538): n is a, c, g, or t
tgtgaaaggcagtgggctaagtggtagggggagaaggaagatacagagtgctttcaaaagtgcctaaatgtaagtcaacagggcagtgtgccaattacagtgttataatgttctacagaagagggatgtacaccaagaatgccagcctggacctctggtgtgtcttggaagacttaaccaggaaggggacgattcgtttctatttgacccaagactgatgctgcgtggtgaaggagaggaactgcgttccaggcagaggaagtccagatgcgcaagagcagagatgggagggacagcacagtggcttctcagaattgaatatggtgttagacttctaaaagagctgtggtagagggagaaaactgtcaaaggaaatcagtaactgttaaaggaaaataccttaaacgtcctgttttcaggctgactaatgccttaggggagcaaatgagcaacagaaacgatatgagcaactgctgttctttcaaaatacccaggcagaggaaccggcagacgatgggcagcatcgaacaaacaactgagatcctgttgtgcctatcacctgttgaagttgccagtcttaaggaaggaatcaatttctttcgcaataagagcactggcaaagactacgtcttgtacaagaataagagccgactgagggcatgcaagaatatgtgcaagcaccaaggaggcctgttcataaaagatatcgaggatttagccggaagttgttgaaatggatgaaaacaacggacttttgcttttagaactgaatcctcctaacccttgggacttacagcccagatctcctgaagagttggcttttggagaagtacagataacatatctcactcatgcctgcatggacctcaagttaggagacaagagaatggtgtttgacccttggttaatcggtcctgcttttgcccgtggatggtggttgctccatgagcctccatctgattggctggagaggctgtgccaggcagacctcatttacatcagtcatctgcactcagaccacctgagttaccccacactgaaaaagcttgctgggagaagaccagatattcccatttatgttggaaacacagaaaggcctgtattttggaatctgaatcagagcggtgtccagttgactaatatcaatgtcgtgccatttggaatatggcagcaggtggacaaaaatcttcgattcatgatcttgatggacggtgttcatcctgagatggacacttgcattattgtggagtacaaaggtcataaaatactcaatatagtagactgcaccagacccaatgggggaaggctgcctatgaaggttgctctaatgatgagtgattttgctggaggagcatcaggctttccaatgactttcagtggtggaaaatttacggaatgaacactccatgagagcagggacctgctttgccttgttcaccactttattcccagtggctagaaccacgtctgacacagagtaggtgcacaataaatattggttacgtgaatgaataagcaaatgaacngcactgtgagangggcatcatgactccatttacagagaagatacagacatggagaagttaggtagtttgcccaaggctgcccaaccagtaagtggtgggtcaggattttcaacctaactgactccaacgtcatgctcttaatcactgtgtatttgtcagattatgttgaacacacctgttataatctacaaatataatgaagccattttcatgttagtaaagagttaatttcaagaattacaatgcccttaaaatgtgcatgcacaccaactacgattatgcatcctaccctgtgtattcagctagggtccgaatgaattgccatatacaaggagaaagctcagtgcctttggctggcttggtaacattttcctagtaaccaattgaaatttccaagataaaaactccggggaaatcctccactaatgacatggagccttgttctatttctgccttagttacctatcaattttatctcctgaaagagttccaatctgctagaacatgtgtttttctgtgatttttccagcagaggagactccaatctaaatcctgtcatttcagaggaatggaaagcccaattcattaaaacagaaaggaagaagctcctgaactacaaggctcggctggtgaagaacctgcaaccccgaatttattgtccctttgctgggtattttgtggaatctcacccatcagacaagtacatcaaggaaacaaacaccaaaaatgacccaaatgaactcaacaatcttatcaagaaaaactctgatgtgataacatggacccctcgaccgggagccacccttgatctgggaagaatgctgaaggatcgaacagacagcaagggcatcatagagcctccagaggggacaaaaatttacaaggattcctgggattttgaaccttatttggaaatcttgaatgctgctctaggagatgaaatatttcttcactcatcctggataaaagaatacttcacttgggctggatttaaagattacaaccttgtggtcaggatgattgagacagatgaggacttcaatccttttcctggaggatatgactatttggttgactttttagatttatccttcccaaaagaaagaccacaacgagaacatccctatgaggaaatccatagccgggtggatgtcatcagacacgtggtgaagaatggtctactctgggatgagttgtatataggattccaaacacggctccagcgggatcctgacatataccatcacctgttttggaatcattttcaaataaaactccccctcacaccacccaactggaagtcattcctgatgtgctgtgagcagaatgggcctgcgattttgcaagaatgcaaaaccacatgaaaatttcaagaattcactgatctgatgcaaaataaaaatttatcattacatcttgaacccaggaagcttacagcaaagagactatgctttatgacgtcagcaatagataattccacgttgcctttgtgatttgtatatatagcttacatttgtggatcactacatagccagattcaaaaatattttacttgttccatccacagttctctacagaaagaaccaatgaacccaataggaacaaattctctgtggaaaacaaagcatagctgtagtagatacgaatccaatcacagaggaaacaggaagagaaaaacatccaagactacagtgaaaactggaaatggtctgttttcgtgatattcgtatgattaagatgcaaattttttcttaggaaaatgtgattgttaactagcattctgttttacatgttgacatttctaacacacacaccactgatttgaacttcaaaatttattttctgattatatatgctaggtctgattctgaagatacaagaattcaatggtggaatttgtctcctgaaatttctagattcataattagaagtgtttattaccaacttctcacttagattaacatcaatgatgtttgattattctggttaaccgctcacatgcataacaataatgctagaaattcaggaattataattttgtgatttatactgtgtggtaaattattcagttctcactgcaaataaatataatgtatatcaatgtaatgtaggtcagaatgtctatggtgagcaaataaaagattattttaaaatatga

SEQ ID NO: 432891 - DNA, 3940 bp, Homo sapiens
  misc_feature (1526)..(1526): n is a, c, g, or t
  misc_feature (1538)..(1538): n is a, c, g, or t
tgtgaaaggcagtgggctaagtggtagggggagaaggaagatacagagtgctttcaaaagtgcctaaatgtaagtcaacagggcagtgtgccaattacagtgttataatgttctacagaagagggatgtacaccaagaatgccagcctggacctctggtgtgtcttggaagacttaaccaggaaggggacgattcgtttctatttgacccaagactgatgctgcgtggtgaaggagaggaactgcgttccaggcagaggaagtccagatgcgcaagagcagagatgggagggacagcacagtggcttctcagaattgaatatggtgttagacttctaaaagagctgtggtagagggagaaaactgtcaaaggaaatcagtaactgttaaaggaaaataccttaaacgtcctgttttcaggctgactaatgccttaggggagcaaatgagcaacagaaacgatatgagcaactgctgttctttcaaaatacccaggcagaggaaccggcagacgatgggcagcatcgaacaaacaactgagatcctgttgtgcctatcacctgttgaagttgccagtcttaaggaaggaatcaatttctttcgcaataagagcactggcaaagactacgtcttgtacaagaataagagccgactgagggcatgcaagaatatgtgcaagcaccaaggaggcctgttcataaaagatatcgaggatttagccggaagttgttgaaatggatgaaaacaacggacttttgcttttagaactgaatcctcctaacccttgggacttacagcccagatctcctgaagagttggcttttggagaagtacagataacatatctcactcatgcctgcatggacctcaagttaggagacaagagaatggtgtttgacccttggttaatcggtcctgcttttgcccgtggatggtggttgctccatgagcctccatctgattggctggagaggctgtgccaggcagacctcatttacatcagtcatctgcactcagaccacctgagttaccccacactgaaaaagcttgctgggagaagaccagatattcccatttatgttggaaacacagaaaggcctgtattttggaatctgaatcagagcggtgtccagttgactaatatcaatgtcgtgccatttggaatatggcagcaggtggacaaaaatcttcgattcatgatcttgatggacggtgttcatcctgagatggacacttgcattattgtggagtacaaaggtcataaaatactcaatatagtagactgcaccagacccaatgggggaaggctgcctatgaaggttgctctaatgatgagtgattttgctggaggagcatcaggctttccaatgactttcagtggtggaaaatttacggaatgaacactccatgagagcagggacctgctttgccttgttcaccactttattcccagtggctagaaccacgtctgacacagagtaggtgcacaataaatattggttacgtgaatgaataagcaaatgaacngcactgtgagangggcatcatgactccatttacagagaagatacagacatggagaagttaggtagtttgcccaaggctgcccaaccagtaagtggtgggtcaggattttcaacctaactgactccaacgtcatgctcttaatcactgtgtatttgtcagattatgttgaacacacctgttataatctacaaatataatgaagccattttcatgttagtaaagagttaatttcaagaattacaatgcccttaaaatgtgcatgcacaccaactacgattatgcatcctaccctgtgtattcagctagggtccgaatgaattgccatatacaaggagaaagctcagtgcctttggctggcttggtaacattttcctagtaaccaattgaaatttccaagataaaaactccggggaaatcctccactaatgacatggagccttgttctatttctgccttagttacctatcaattttatctcctgaaagagttccaatctgctagaacatgtgtttttctgtgatttttccagcagaggagactccaatctaaatcctgtcatttcagaggaatggaaagcccaattcattaaaacagaaaggaagaagctcctgaactacaaggctcggctggtgaagaacctgcaaccccgaatttattgtccctttgctgggtattttgtggaatctcacccatcagacaagtacatcaaggaaacaaacaccaaaaatgacccaaatgaactcaacaatcttatcaagaaaaactctgatgtgataacatggacccctcgaccgggagccacccttgatctgggaagaatgctgaaggatcgaacagacagcaagggcatcatagagcctccagaggggacaaaaatttacaaggattcctgggattttgaaccttatttggaaatcttgaatgctgctctaggagatgaaatatttcttcactcatcctggataaaagaatacttcacttgggctggatttaaagattacaaccttgtggtcaggatgattgagacagatgaggacttcaatccttttcctggaggatatgactatttggttgactttttagatttatccttcccaaaagaaagaccacaacgagaacatccctatgaggaaatccatagccgggtggatgtcatcagacacgtggtgaagaatggtctactctgggatgagttgtatataggattccaaacacggctccagcgggatcctgacatataccatcacctatatagatctagattttcacatataaggattccttaaagcaaggaacatcatagtacaataaaaataagacaaaatctcgttcaaggagctgtctgtattcaacaccctgaaagttctgagctacatcaacagctggaacagtacagaaacactatctctcagggaggacagagtaccaggtaccaaatagatcctggcaaaggaacaggcatggaagtttccagagcacattcccatgctttatctctcttacaggttttggaatcattttcaaataaaactccccctcacaccacccaactggaagtcattcctgatgtgctgtgagcagaatgggcctgcgattttgcaagaatgcaaaaccacatgaaaatttcaagaattcactgatctgatgcaaaataaaaatttatcattacatcttgaacccaggaagcttacagcaaagagactatgctttatgacgtcagcaatagataattccacgttgcctttgtgatttgtatatatagcttacatttgtggatcactacatagccagattcaaaaatattttacttgttccatccacagttctctacagaaagaaccaatgaacccaataggaacaaattctctgtggaaaacaaagcatagctgtagtagatacgaatccaatcacagaggaaacaggaagagaaaaacatccaagactacagtgaaaactggaaatggtctgttttcgtgatattcgtatgattaagatgcaaattttttcttaggaaaatgtgattgttaactagcattctgttttacatgttgacatttctaacacacacaccactgatttgaacttcaaaatttattttctgattatatatgctaggtctgattctgaagatacaagaattcaatggtggaatttgtctcctgaaatttctagattcataattagaagtgtttattaccaacttctcacttagattaacatcaatgatgtttgattattctggttaaccgctcacatgcataacaataatgctagaaattcaggaattataattttgtgatttatactgtgtggtaaattattcagttctcactgcaaataaatataatgtatatcaatgtaatgtaggtcagaatgtctatggtgagcaaataaaagattattttaaaatatga

SEQ ID NO: 432892 - DNA, 3747 bp, Homo sapiens
  misc_feature (1526)..(1526): n is a, c, g, or t
  misc_feature (1538)..(1538): n is a, c, g, or t
tgtgaaaggcagtgggctaagtggtagggggagaaggaagatacagagtgctttcaaaagtgcctaaatgtaagtcaacagggcagtgtgccaattacagtgttataatgttctacagaagagggatgtacaccaagaatgccagcctggacctctggtgtgtcttggaagacttaaccaggaaggggacgattcgtttctatttgacccaagactgatgctgcgtggtgaaggagaggaactgcgttccaggcagaggaagtccagatgcgcaagagcagagatgggagggacagcacagtggcttctcagaattgaatatggtgttagacttctaaaagagctgtggtagagggagaaaactgtcaaaggaaatcagtaactgttaaaggaaaataccttaaacgtcctgttttcaggctgactaatgccttaggggagcaaatgagcaacagaaacgatatgagcaactgctgttctttcaaaatacccaggcagaggaaccggcagacgatgggcagcatcgaacaaacaactgagatcctgttgtgcctatcacctgttgaagttgccagtcttaaggaaggaatcaatttctttcgcaataagagcactggcaaagactacgtcttgtacaagaataagagccgactgagggcatgcaagaatatgtgcaagcaccaaggaggcctgttcataaaagatatcgaggatttagccggaagttgttgaaatggatgaaaacaacggacttttgcttttagaactgaatcctcctaacccttgggacttacagcccagatctcctgaagagttggcttttggagaagtacagataacatatctcactcatgcctgcatggacctcaagttaggagacaagagaatggtgtttgacccttggttaatcggtcctgcttttgcccgtggatggtggttgctccatgagcctccatctgattggctggagaggctgtgccaggcagacctcatttacatcagtcatctgcactcagaccacctgagttaccccacactgaaaaagcttgctgggagaagaccagatattcccatttatgttggaaacacagaaaggcctgtattttggaatctgaatcagagcggtgtccagttgactaatatcaatgtcgtgccatttggaatatggcagcaggtggacaaaaatcttcgattcatgatcttgatggacggtgttcatcctgagatggacacttgcattattgtggagtacaaaggtcataaaatactcaatatagtagactgcaccagacccaatgggggaaggctgcctatgaaggttgctctaatgatgagtgattttgctggaggagcatcaggctttccaatgactttcagtggtggaaaatttacggaatgaacactccatgagagcagggacctgctttgccttgttcaccactttattcccagtggctagaaccacgtctgacacagagtaggtgcacaataaatattggttacgtgaatgaataagcaaatgaacngcactgtgagangggcatcatgactccatttacagagaagatacagacatggagaagttaggtagtttgcccaaggctgcccaaccagtaagtggtgggtcaggattttcaacctaactgactccaacgtcatgctcttaatcactgtgtatttgtcagattatgttgaacacacctgttataatctacaaatataatgaagccattttcatgttagtaaagagttaatttcaagaattacaatgcccttaaaatgtgcatgcacaccaactacgattatgcatcctaccctgtgtattcagctagggtccgaatgaattgccatatacaaggagaaagctcagtgcctttggctggcttggtaacattttcctagtaaccaattgaaatttccaagataaaaactccggggaaatcctccactaatgacatggagccttgttctatttctgccttagttacctatcaattttatctcctgaaagagttccaatctgctagaacatgtgtttttctgtgatttttccagcagaggagactccaatctaaatcctgtcatttcagaggaatggaaagcccaattcattaaaacagaaaggaagaagctcctgaactacaaggctcggctggtgaagaacctgcaaccccgaatttattgtccctttgctgggtattttgtggaatctcacccatcagacaagtacatcaaggaaacaaacaccaaaaatgacccaaatgaactcaacaatcttatcaagaaaaactctgatgtgataacatggacccctcgaccgggagccacccttgatctgggaagaatgctgaaggatcgaacagacagcaagggcatcatagagcctccagaggggacaaaaatttacaaggattcctgggattttgaaccttatttggaaatcttgaatgctgctctaggagatgaaatatttcttcactcatcctggataaaagaatacttcacttgggctggatttaaagattacaaccttgtggtcaggatccatagccgggtggatgtcatcagacacgtggtgaagaatggtctactctgggatgagttgtatataggattccaaacacggctccagcgggatcctgacatataccatcacctatatagatctagattttcacatataaggattccttaaagcaaggaacatcatagtacaataaaaataagacaaaatctcgttcaaggagctgtctgtattcaacaccctgaaagttctgagctacatcaacagctggaacagtacagaaacactatctctcagggaggacagagtaccaggttttggaatcattttcaaataaaactccccctcacaccacccaactggaagtcattcctgatgtgctgtgagcagaatgggcctgcgattttgcaagaatgcaaaaccacatgaaaatttcaagaattcactgatctgatgcaaaataaaaatttatcattacatcttgaacccaggaagcttacagcaaagagactatgctttatgacgtcagcaatagataattccacgttgcctttgtgatttgtatatatagcttacatttgtggatcactacatagccagattcaaaaatattttacttgttccatccacagttctctacagaaagaaccaatgaacccaataggaacaaattctctgtggaaaacaaagcatagctgtagtagatacgaatccaatcacagaggaaacaggaagagaaaaacatccaagactacagtgaaaactggaaatggtctgttttcgtgatattcgtatgattaagatgcaaattttttcttaggaaaatgtgattgttaactagcattctgttttacatgttgacatttctaacacacacaccactgatttgaacttcaaaatttattttctgattatatatgctaggtctgattctgaagatacaagaattcaatggtggaatttgtctcctgaaatttctagattcataattagaagtgtttattaccaacttctcacttagattaacatcaatgatgtttgattattctggttaaccgctcacatgcataacaataatgctagaaattcaggaattataattttgtgatttatactgtgtggtaaattattcagttctcactgcaaataaatataatgtatatcaatgtaatgtaggtcagaatgtctatggtgagcaaataaaagattattttaaaatatga

SEQ ID NO: 432893 - DNA, 3536 bp, Homo sapiens
  misc_feature (1378)..(1378): n is a, c, g, or t
  misc_feature (1390)..(1390): n is a, c, g, or t
tgtgaaaggcagtgggctaagtggtagggggagaaggaagatacagagtgctttcaaaagtgcctaaatgtaagtcaacagggcagtgtgccaattacagtgttataatgttctacagaagagggatgtacaccaagaatgccagcctggacctctggtgtgtcttggaagacttaaccaggaaggggacgattcgtttctatttgacccaagactgatgctgcgtggtgaaggagaggaactgcgttccaggcagaggaagtccagatgcgcaagagcagagatgggagggacagcacagtggcttctcagaattgaatatggtgttagacttctaaaagagctgtggtagagggagaaaactgtcaaaggaaatcagtaactgttaaaggaaaataccttaaacgtcctgttttcaggctgactaatgccttaggggagcaaatgagcaacagaaacgatatgagcaactgctgttctttcaaaatacccaggcagaggaaccggcagacgatgggcagcatcgaacaaacaactgagatcctgttgtgcctatcacctgttgaagttgccagtcttaaggaaggaatcaatttctttcgcaataagagcactggcaaagactacgtcttgtacaagaataagagccgactgagggcatgcaagaatatgtgcaagcaccaaggaggcctgttcataaaagatatcgaggatttagccggaagttgttgaaatggatgaaaacaacggacttttgcttttagaactgaatcctcctaacccttgggacttacagcccagatctcctgaagagttggcttttggagaagtacagataacatatctcactcatgcctgcatggacctcaagttaggagacaagagaatggtgtttgacccttggttaatcggtcctgcttttgcccgtggatggtggttgctccatgagcctccatctgattggctggagaggctgtgccaggcagacctcatttacatcagtcatctgcactcagaccacctgaggtggacaaaaatcttcgattcatgatcttgatggacggtgttcatcctgagatggacacttgcattattgtggagtacaaaggtcataaaatactcaatatagtagactgcaccagacccaatgggggaaggctgcctatgaaggttgctctaatgatgagtgattttgctggaggagcatcaggctttccaatgactttcagtggtggaaaatttacggaatgaacactccatgagagcagggacctgctttgccttgttcaccactttattcccagtggctagaaccacgtctgacacagagtaggtgcacaataaatattggttacgtgaatgaataagcaaatgaacngcactgtgagangggcatcatgactccatttacagagaagatacagacatggagaagttaggtagtttgcccaaggctgcccaaccagtaagtggtgggtcaggattttcaacctaactgactccaacgtcatgctcttaatcactgtgtatttgtcagattatgttgaacacacctgttataatctacaaatataatgaagccattttcatgttagtaaagagttaatttcaagaattacaatgcccttaaaatgtgcatgcacaccaactacgattatgcatcctaccctgtgtattcagctagggtccgaatgaattgccatatacaaggagaaagctcagtgcctttggctggcttggtaacattttcctagtaaccaattgaaatttccaagataaaaactccggggaaatcctccactaatgacatggagccttgttctatttctgccttagttacctatcaattttatctcctgaaagagttccaatctgctagaacatgtgtttttctgtgatttttccagcagaggagactccaatctaaatcctgtcatttcagaggaatggaaagcccaattcattaaaacagaaaggaagaagctcctgaactacaaggctcggctggtgaagaacctgcaaccccgaatttattgtccctttgctgggtattttgtggaatctcacccatcagacaagtacatcaaggaaacaaacaccaaaaatgacccaaatgaactcaacaatcttatcaagaaaaactctgatgtgataacatggacccctcgaccgggagccacccttgatctgggaagaatgctgaaggatcgaacagacagcaagggcatcatagagcctccagaggggacaaaaatttacaaggattcctgggattttgaaccttatttggaaatcttgaatgctgctctaggagatgaaatatttcttcactcatcctggataaaagaatacttcacttgggctggatttaaagattacaaccttgtggtcaggatgattgagacagatgaggacttcaatccttttcctggaggatatgactatttggttgactttttagatttatccttcccaaaagaaagaccacaacgagaacatccctatgaggaaatccatagccgggtggatgtcatcagacacgtggtgaagaatggtctactctgggatgagttgtatataggattccaaacacggctccagcgggatcctgacatataccatcacctgttttggaatcattttcaaataaaactccccctcacaccacccaactggaagtcattcctgatgtgctgtgagcagaatgggcctgcgattttgcaagaatgcaaaaccacatgaaaatttcaagaattcactgatctgatgcaaaataaaaatttatcattacatcttgaacccaggaagcttacagcaaagagactatgctttatgacgtcagcaatagataattccacgttgcctttgtgatttgtatatatagcttacatttgtggatcactacatagccagattcaaaaatattttacttgttccatccacagttctctacagaaagaaccaatgaacccaataggaacaaattctctgtggaaaacaaagcatagctgtagtagatacgaatccaatcacagaggaaacaggaagagaaaaacatccaagactacagtgaaaactggaaatggtctgttttcgtgatattcgtatgattaagatgcaaattttttcttaggaaaatgtgattgttaactagcattctgttttacatgttgacatttctaacacacacaccactgatttgaacttcaaaatttattttctgattatatatgctaggtctgattctgaagatacaagaattcaatggtggaatttgtctcctgaaatttctagattcataattagaagtgtttattaccaacttctcacttagattaacatcaatgatgtttgattattctggttaaccgctcacatgcataacaataatgctagaaattcaggaattataattttgtgatttatactgtgtggtaaattattcagttctcactgcaaataaatataatgtatatcaatgtaatgtaggtcagaatgtctatggtgagcaaataaaagattattttaaaatatga

SEQ ID NO: 432894 - DNA, 2929 bp, Homo sapiens
  misc_feature (258)..(258): n is a, c, g, or t
  misc_feature (574)..(574): n is a, c, g, or t
ttgtaagttgcagattaccaactaaggtttctagctcaaaacatgatggagcatgaaggaaatgttgagatctgagagcacctcaggaggagccaagaaagagaatcatctggattcaccatgtagaccgtagagcagaacaggaaaggcctgaagtgggtcatccaggcttaggtgctcttggaatatggttcctaatggggtgtgtgcagcctcaatgtagacacatccccttggcactgtggatgctcatatcanggagcagtgtgcccagaagagagtcctctagttggggacctctagtgcacccagaggagggtcctctggttgggggtcttaggcaggagcccttctgctctgggtccaagagtggggttggggttgacattggggaagtgtgtatcctcaacactagtattgtaagtgctcaatacatgtccacttaataaattaatgtatctgataagtgatccctgtctaacagtgtggcagaaaatgccctgctttgcaatatgaagataacctttgtcccgttctttgctttcttctctaagtctatattcattgcctcccngagtgtgtaaccacatgagaaatagagggaaggttctgtccttaagaagttaaaagtgtgactgggaaggtaaaacatacttattaagggttaactagcatcatgccattctgtgtgatggtgagtttgtgtgtgtgtgcacatgtgcgtgagtacacacatatacatttaaaaaggtcttgaatataccaaaatattatgtctaggtgatgggtagcttgtatattttttctgtatccttgtctgtgtttgtcaaattttatagaaacaataacagtaacagctctctgaccttctaccctgtatgttctgcgtcctgtctaattcctcaagttccttcactgcctgtcactctgatgcttgctatatatcagtccatcctgctttttgtttcttagacccaaagtgtcaagtgcacacctgccctgggtctttgtgtttgctgtttccatttcctggagtgcagctggccctgatttgcatgtgaccagcaacttttcatctatgtctcaactcaaatgtcacctcttcactgaccatcctgtctaatgattccctccatctcatcccactcaccccagccactctctgttccattgccctgttttattttcttcacggtgcatcattctttgcaatgactttatttacttgttcattatttgcttctctcactagaatgaacactccatgagagcagggacctgctttgccttgttcaccactttattcccagtggctagaaccacgtctgacacagaaggaatggaaagcccaattcattaaaacagaaaggaagaagctcctgaactacaaggctcggctggtgaagaacctgcaaccccgaatttattgtccctttgctgggtattttgtggaatctcacccatcagacaagtacatcaaggaaacaaacaccaaaaatgacccaaatgaactcaacaatcttatcaagaaaaactctgatgtgataacatggacccctcgaccgggagccacccttgatctgggaagaatgctgaaggatcgaacagacagcaagggcatcatagagcctccagaggggacaaaaatttacaaggattcctgggattttgaaccttatttggaaatcttgaatgctgctctaggagatgaaatatttcttcactcatcctggataaaagaatacttcacttgggctggatttaaagattacaaccttgtggtcaggatgattgagacagatgaggacttcaatccttttcctggaggatatgactatttggttgactttttagatttatccttcccaaaagaaagaccacaacgagaacatccctatgaggaaatccatagccgggtggatgtcatcagacacgtggtgaagaatggtctactctgggatgagttgtatataggattccaaacacggctccagcgggatcctgacatataccatcacctgttttggaatcattttcaaataaaactccccctcacaccacccaactggaagtcattcctgatgtgctgtgagcagaatgggcctgcgattttgcaagaatgcaaaaccacatgaaaatttcaagaattcactgatctgatgcaaaataaaaatttatcattacatcttgaacccaggaagcttacagcaaagagactatgctttatgacgtcagcaatagataattccacgttgcctttgtgatttgtatatatagcttacatttgtggatcactacatagccagattcaaaaatattttacttgttccatccacagttctctacagaaagaaccaatgaacccaataggaacaaattctctgtggaaaacaaagcatagctgtagtagatacgaatccaatcacagaggaaacaggaagagaaaaacatccaagactacagtgaaaactggaaatggtctgttttcgtgatattcgtatgattaagatgcaaattttttcttaggaaaatgtgattgttaactagcattctgttttacatgttgacatttctaacacacacaccactgatttgaacttcaaaatttattttctgattatatatgctaggtctgattctgaagatacaagaattcaatggtggaatttgtctcctgaaatttctagattcataattagaagtgtttattaccaacttctcacttagattaacatcaatgatgtttgattattctggttaaccgctcacatgcataacaataatgctagaaattcaggaattataattttgtgatttatactgtgtggtaaattattcagttctcactgcaaataaatataatgtatatcaatgtaatgtaggtcagaatgtctatggtgagcaaataaaagattattttaaaatatga

SEQ ID NO: 432895 - DNA, 3171 bp, Homo sapiens
  misc_feature (1526)..(1526): n is a, c, g, or t
  misc_feature (1538)..(1538): n is a, c, g, or t
tgtgaaaggcagtgggctaagtggtagggggagaaggaagatacagagtgctttcaaaagtgcctaaatgtaagtcaacagggcagtgtgccaattacagtgttataatgttctacagaagagggatgtacaccaagaatgccagcctggacctctggtgtgtcttggaagacttaaccaggaaggggacgattcgtttctatttgacccaagactgatgctgcgtggtgaaggagaggaactgcgttccaggcagaggaagtccagatgcgcaagagcagagatgggagggacagcacagtggcttctcagaattgaatatggtgttagacttctaaaagagctgtggtagagggagaaaactgtcaaaggaaatcagtaactgttaaaggaaaataccttaaacgtcctgttttcaggctgactaatgccttaggggagcaaatgagcaacagaaacgatatgagcaactgctgttctttcaaaatacccaggcagaggaaccggcagacgatgggcagcatcgaacaaacaactgagatcctgttgtgcctatcacctgttgaagttgccagtcttaaggaaggaatcaatttctttcgcaataagagcactggcaaagactacgtcttgtacaagaataagagccgactgagggcatgcaagaatatgtgcaagcaccaaggaggcctgttcataaaagatatcgaggatttagccggaagttgttgaaatggatgaaaacaacggacttttgcttttagaactgaatcctcctaacccttgggacttacagcccagatctcctgaagagttggcttttggagaagtacagataacatatctcactcatgcctgcatggacctcaagttaggagacaagagaatggtgtttgacccttggttaatcggtcctgcttttgcccgtggatggtggttgctccatgagcctccatctgattggctggagaggctgtgccaggcagacctcatttacatcagtcatctgcactcagaccacctgagttaccccacactgaaaaagcttgctgggagaagaccagatattcccatttatgttggaaacacagaaaggcctgtattttggaatctgaatcagagcggtgtccagttgactaatatcaatgtcgtgccatttggaatatggcagcaggtggacaaaaatcttcgattcatgatcttgatggacggtgttcatcctgagatggacacttgcattattgtggagtacaaaggtcataaaatactcaatatagtagactgcaccagacccaatgggggaaggctgcctatgaaggttgctctaatgatgagtgattttgctggaggagcatcaggctttccaatgactttcagtggtggaaaatttacggaatgaacactccatgagagcagggacctgctttgccttgttcaccactttattcccagtggctagaaccacgtctgacacagagtaggtgcacaataaatattggttacgtgaatgaataagcaaatgaacngcactgtgagangggcatcatgactccatttacagagaagatacagacatggagaagttaggtagtttgcccaaggctgcccaaccagtaagtggtgggtcaggattttcaacctaactgactccaacgtcatgctcttaatcactgtgtatttgtcagattatgttgaacacacctgttataatctacaaatataatgaagccattttcatgttagtaaagagttaatttcaagaattacaatgcccttaaaatgtgcatgcacaccaactacgattatgcatcctaccctgtgtattcagctagggtccgaatgaattgccatatacaaggagaaagctcagtgcctttggctggcttggtaacattttcctagtaaccaattgaaatttccaagataaaaactccggggaaatcctccactaatgacatggagccttgttctatttctgccttagttacctatcaattttatctcctgaaagagttccaatctgctagaacatgtgtttttctgtgatttttccagcagaggagactccaatctaaatcctgtcatttcagaggaatggaaagcccaattcattaaaacagaaaggaagaagctcctgaactacaaggctcggctggtgaagaacctgcaaccccgaatttattgtccctttgctgggtattttgtggaatctcacccatcagacaagtacatcaaggaaacaaacaccaaaaatgacccaaatgaactcaacaatcttatcaagaaaaactctgatgtgataacatggacccctcgaccgggagccacccttgatctgggaagaatgctgaaggatcgaacagacagatccatagccgggtggatgtcatcagacacgtggtgaagaatggtctactctgggatgagttgtatataggattccaaacacggctccagcgggatcctgacatataccatcacctgttttggaatcattttcaaataaaactccccctcacaccacccaactggaagtcattcctgatgtgctgtgagcagaatgggcctgcgattttgcaattctctacagaaagaaccaatgaacccaataggaacaaattctctgtggaaaacaaagcatagctgtagtagatacgaatccaatcacagaggaaacaggaagagaaaaacatccaagactacagtgaaaactggaaatggtctgttttcgtgatattcgtatgattaagatgcaaattttttcttaggaaaatgtgattgttaactagcattctgttttacatgttgacatttctaacacacacaccactgatttgaacttcaaaatttattttctgattatatatgctaggtctgattctgaagatacaagaattcaatggtggaatttgtctcctgaaatttctagattcataattagaagtgtttattaccaacttctcacttagattaacatcaatgatgtttgattattctggttaaccgctcacatgcataacaataatgctagaaattcaggaattataattttgtgatttatactgtgtggtaaattattcagttctcactgcaaataaatataatgtatatcaatgtaatgtaggtcagaatgtctatggtgagcaaataaaagattattttaaaatatga

SEQ ID NO: 432896 - DNA, 1345 bp, Homo sapiens
tgtaagttaaattcctaggagcggggctgctggattctatgaatacagcgtctaggcttttagtgccctctgccaaatcgttcttcgggaagccagttcacctttccaaaaataatgtatgagagaatacatttacctgtaccttcactaatactagattctgttgcttttgtgtacaagatatagatctagattttcacatataaggattccttaaagcaaggaacatcatagtacaataaaaataagacaaaatctcgttcaaggagctgtctgtattcaacaccctgaaagttctgagctacatcaacagctggaacagtacagaaacactatctctcagggaggacagagtaccaggtaccaaatagatcctggcaaaggaacaggcatggaagtttccagagcacattcccatgctttatctctcttacaggttttggaatcattttcaaataaaactccccctcacaccacccaactggaagtcattcctgatgtgctgtgagcagaatgggcctgcgattttgcaagaatgcaaaaccacatgaaaatttcaagaattcactgatctgatgcaaaataaaaatttatcattacatcttgaacccaggaagcttacagcaaagagactatgctttatgacgtcagcaatagataattccacgttgcctttgtgatttgtatatatagcttacatttgtggatcactacatagccagattcaaaaatattttacttgttccatccacagttctctacagaaagaaccaatgaacccaataggaacaaattctctgtggaaaacaaagcatagctgtagtagatacgaatccaatcacagaggaaacaggaagagaaaaacatccaagactacagtgaaaactggaaatggtctgttttcgtgatattcgtatgattaagatgcaaattttttcttaggaaaatgtgattgttaactagcattctgttttacatgttgacatttctaacacacacaccactgatttgaacttcaaaatttattttctgattatatatgctaggtctgattctgaagatacaagaattcaatggtggaatttgtctcctgaaatttctagattcataattagaagtgtttattaccaacttctcacttagattaacatcaatgatgtttgattattctggttaaccgctcacatgcataacaataatgctagaaattcaggaattataattttgtgatttatactgtgtggtaaattattcagttctcactgcaaataaatataatgtatatcaatgtaatgtaggtcagaatgtctatggtgagcaaataaaagattattttaaaatatga

SEQ ID NO: 432897 - DNA, 2187 bp, Homo sapiens
tgtgaaaggcagtgggctaagtggtagggggagaaggaagatacagagtgctttcaaaagtgcctaaatgtaagtcaacagggcagtgtgccaattacagtgttataatgttctacagaagagggatgtacaccaagaatgccagcctggacctctggtgtgtcttggaagacttaaccaggaaggggacgattcgtttctatttgacccaagactgatgctgcgtggtgaaggagaggaactgcgttccaggcagaggaagtccagatgcgcaagagcagagatgggagggacagcacagtggcttctcagaattgaatatggtgttagacttctaaaagagctgtggtagagggagaaaactgtcaaaggaaatcagtaactgttaaaggaaaataccttaaacgtcctgttttcaggctgactaatgccttaggggagcaaatgagcaacagaaacgatatgagcaactgctgttctttcaaaatacccaggcagaggaaccggcagacgatgggcagcatcgaacaaacaactgagatcctgttgtgcctatcacctgttgaagttgccagtcttaaggaaggaatcaatttctttcgcaataagagcactggcaaagactacgtcttgtacaagaataagagccgactgagggcatgcaagaatatgtgcaagcaccaaggaggcctgttcataaaagatatcgaggatttagccggaagttgttgaaatggatgaaaacaacggacttttgcttttagaactgaatcctcctaacccttgggacttacagcccagatctcctgaagagttggcttttggagaagtacagataacatatctcactcatgcctgcatggacctcaagttaggagacaagagaatggtgtttgacccttggttaatcggtcctgcttttgcccgtggatggtggttgctccatgagcctccatctgattggctggagaggctgtgccaggcagacctcatttacatcagtcatctgcactcagaccacctgagttaccccacactgaaaaagcttgctgggagaagaccagatattcccatttatgttggaaacacagaaaggcctgtattttggaatctgaatcagagcggtgtccagttgactaatatcaatgtcgtgccatttggaatatggcagcaggtggacaaaaatcttcgattcatgatcttgatggacggtgttcatcctgagatggacacttgcattattgtggagtacaaaggtcataaaatactcaatatagtagactgcaccagacccaatgggggaaggctgcctatgaaggttgctctaatgatgagtgattttgctggaggagcatcaggctttccaatgactttcagtggtggaaaatttacggcagaggagactccaatctaaatcctgtcatttcagaggaatggaaagcccaattcattaaaacagaaaggaagaagctcctgaactacaaggctcggctggtgaagaacctgcaaccccgaatttattgtccctttgctgggtattttgtggaatctcacccatcagacaagtatggctagacactttgtacatttttacatacaacttaacgtatggtggaatgagcgactttgctgtgaaagcagtgtgacatgagaaggaaagtgattagtaggtgtctggaactttttaacaagctgctggagaacccagagcatgaataaaagttacacttggcagccaggaactctttcagaagataaaataacagatagatattctccgaaaggatcccaggaaagaggatggcaactgccatttattatgtgaagtgaactggggacttttaactaagccatctaagttaatctcccaatagcactatgcgtaggaagggggtattgttccttttttgcagataaggaatctgaaactcagaaaggtcaagggacgtgcccaaagtcaccctgttggaaacatgagttgagaatggaaccctggtatgcttagttctaaagctcttttctctataccatactgcattccagaatagaattatgtctttcttctcatgttttaggtatctaatgtgatttttcttgcagcaatataacttctgcaaatactatgaatcatcaccaatgtatgaaattgttgaaagaaataaaagaccatgaatttgaaacaaaaaa

SEQ ID NO: 432898 - DNA, 953 bp, Homo sapiens
tgtgaaaggcagtgggctaagtggtagggggagaaggaagatacagagtgctttcaaaagtgcctaaatgtaagtcaacagggcagtgtgccaattacagtgttataatgttctacagaagagggatgtacaccaagaatgccagcctggacctctggtgtgtcttggaagacttaaccaggaaggggacgattcgtttctatttgacccaagactgatgctgcgtggtgaaggagaggaactgcgttccaggcagaggaagtccagatgcgcaagagcagagatgggagggacagcacagtggcttctcagaattgaatatggtgttagacttctaaaagagctgtggtagagggagaaaactgtcaaaggaaatcagtaactgttaaaggaaaataccttaaacgtcctgttttcaggctgactaatgccttaggggagcaaatgagcaacagaaacgatatgagcaactgctgttctttcaaaatacccaggcagaggaaccggcagacgatgggcagcatcgaacaaacaactgagatcctgttgtgcctatcacctgttgaagttgccagtcttaaggaaggaatcaatttctttcgcaataagagcactggcaaagactacgtcttgtacaagaataagagccgactgagggcatgcaagaatatgtgcaagcaccaaggaggcctgttcataaaagatatcgaggatttagccggaagtttctaggttccagccaagaacagagacctacctgttctacccaccattattcagccatttttcttctcaacacaaccaagatcaacaaatcctataagccatgattctcatctttaaagcctatcaatttttcacaacctcctctaactggaaaactgttgtctccctgtcatctatgaccgcatggttctgccaattttccctttcatggcctggcatgccaaata

SEQ ID NO: 432899 - DNA, 723 bp, Homo sapiens
agtataaggcatgtctagaaaagtgacatgccatggtaagtgaacaatagatgttgaccatatcagccccatgaaataaacaggaataccatgtggcccacagtcagttggtaaatccttaagacttgggaggagggtcatattccagttcacattccagttttagattctcgcttatcttaaagcattatagaccttgaactaaataagaataaaaatttgccccagtgcagtaagaaaatgaaaaggcattgaaatgagattcatactgttgttcattaataatatcttcatttcacaggaatgcaaaaccacatgaaaatttcaagaattcactgatctgatgcaaaataaaaatttatcattacatcttgaacccaggaagcttacagcaaagagactatgctttatgacgtcagcaatagataattccacgttgcctttgtgatttgtatatatagcttacatttgtggatcactacatagccagattcaaaaatattttacttgttccatccacagttctctacagaaagaaccaatgaacccaataggaacaaattctctgtggaaaacaaagcatagctgtagtagatacgaatccaatcacagaggaaacaggaagagaaaaacatccaagactacagtgaaaactggaaatggtctgttttcgtgatattcgtatgattaagatgcaaattttttcttaggaaaatgtgattg

SEQ ID NO: 432900 - DNA, 236 bp, Homo sapiens
gactctggtgagagtccagtttttcaattcctcacttctctgtcaatatgttggtataaggaacaaactgtctgtcatactagatgacactatttttttctcttttcaacctttccatctgtcttatcctagttaccccacactgaaaaagcttgctgggagaagaccagatattcccatttatgttggaaacacagaaaggcctgtattttggaatctgaatcagagcggtgtcc

SEQ ID NO: 432901 - DNA, 2647 bp, Homo sapiens
gtctacaccagcggtgtcgctgcccgaaagtgagagaaggctgatattgctagctggaatccaggcctgggtgctgcatggtggcgcccctccccgtgaccaccgctgcgttttctcgggctttctctgaggagctgctcttgtgctgtttggcccctgcctactcggaatggaacaaagcatcgaacaaacaactgagatcctgttgtgcctatcacctgttgaagttgccagtcttaaggaaggaatcaatttctttcgcaataagagcactggcaaagactacgtcttgtacaagaataagagccgactgagggcatgcaagaatatgtgcaagcaccaaggaggcctgttcataaaagatatcgaggatttagccggaagttgttgaaatggatgaaaacaacggacttttgcttttagaactgaatcctcctaacccttgggacttacagcccagatctcctgaagagttggcttttggagaagtacagataacatatctcactcatgcctgcatggacctcaagttaggagacaagagaatggtgtttgacccttggttaatcggtcctgcttttgcccgtggatggtggttgctccatgagcctccatctgattggctggagaggctgtgccaggcagacctcatttacatcagtcatctgcactcagaccacctgagttaccccacactgaaaaagcttgctgggagaagaccagatattcccatttatgttggaaacacagaaaggcctgtattttggaatctgaatcagagcggtgtccagttgactaatatcaatgtcgtgccatttggaatatggcagcaggtggacaaaaatcttcgattcatgatcttgatggacggtgttcatcctgagatggacacttgcattattgtggagtacaaaggtcataaaatactcaatatagtagactgcaccagacccaatgggggaaggctgcctatgaaggttgctctaatgatgagtgattttgctggaggagcatcaggctttccaatgactttcagtggtggaaaatttacggaggaatggaaagcccaattcattaaaacagaaaggaagaagctcctgaactacaaggctcggctggtgaagaacctgcaaccccgaatttattgtccctttgctgggtattttgtggaatctcacccatcagacaagtacatcaaggaaacaaacaccaaaaatgacccaaatgaactcaacaatcttatcaagaaaaactctgatgtgataacatggacccctcgaccgggagccacccttgatctgggaagaatgctgaaggatcgaacagacagcaagggcatcatagagcctccagaggggacaaaaatttacaaggattcctgggattttgaaccttatttggaaatcttgaatgctgctctaggagatgaaatatttcttcactcatcctggataaaagaatacttcacttgggctggatttaaagattacaaccttgtggtcaggatgattgagacagatgaggacttcaatccttttcctggaggatatgactatttggttgactttttagatttatccttcccaaaagaaagaccacaacgagaacatccctatgaggaaatccatagccgggtggatgtcatcagacacgtggtgaagaatggtctactctgggatgagttgtatataggattccaaacacggctccagcgggatcctgacatataccatcacctgttttggaatcattttcaaataaaactccccctcacaccacccaactggaagtcattcctgatgtgctgtgagcagaatgggcctgcgattttgcaagaatgcaaaaccacatgaaaatttcaagaattcactgatctgatgcaaaataaaaatttatcattacatcttgaacccaggaagcttacagcaaagagactatgctttatgacgtcagcaatagataattccacgttgcctttgtgatttgtatatatagcttacatttgtggatcactacatagccagattcaaaaatattttacttgttccatccacagttctctacagaaagaaccaatgaacccaataggaacaaattctctgtggaaaacaaagcatagctgtagtagatacgaatccaatcacagaggaaacaggaagagaaaaacatccaagactacagtgaaaactggaaatggtctgttttcgtgatattcgtatgattaagatgcaaattttttcttaggaaaatgtgattgttaactagcattctgttttacatgttgacatttctaacacacacaccactgatttgaacttcaaaatttattttctgattatatatgctaggtctgattctgaagatacaagaattcaatggtggaatttgtctcctgaaatttctagattcataattagaagtgtttattaccaacttctcacttagattaacatcaatgatgtttgattattctggttaaccgctcacatgcataacaataatgctagaaattcaggaattataattttgtgatttatactgtgtggtaaattattcagttctcactgcaaataaatataatgtatatcaatgtaatgtaggtcagaatgtctatggtgagcaaataaaagattattttaaaatatga

SEQ ID NO: 432902 - DNA, 2536 bp, Homo sapiens
tgtgaaaggcagtgggctaagtggtagggggagaaggaagatacagagtgctttcaaaagtgcctaaatcatcgaacaaacaactgagatcctgttgtgcctatcacctgttgaagttgccagtcttaaggaaggaatcaatttctttcgcaataagagcactggcaaagactacgtcttgtacaagaataagagccgactgagggcatgcaagaatatgtgcaagcaccaaggaggcctgttcataaaagatatcgaggatttagccggaagttgttgaaatggatgaaaacaacggacttttgcttttagaactgaatcctcctaacccttgggacttacagcccagatctcctgaagagttggcttttggagaagtacagataacatatctcactcatgcctgcatggacctcaagttaggagacaagagaatggtgtttgacccttggttaatcggtcctgcttttgcccgtggatggtggttgctccatgagcctccatctgattggctggagaggctgtgccaggcagacctcatttacatcagtcatctgcactcagaccacctgagttaccccacactgaaaaagcttgctgggagaagaccagatattcccatttatgttggaaacacagaaaggcctgtattttggaatctgaatcagagcggtgtccagttgactaatatcaatgtcgtgccatttggaatatggcagcaggtggacaaaaatcttcgattcatgatcttgatggacggtgttcatcctgagatggacacttgcattattgtggagtacaaaggtcataaaatactcaatatagtagactgcaccagacccaatgggggaaggctgcctatgaaggttgctctaatgatgagtgattttgctggaggagcatcaggctttccaatgactttcagtggtggaaaatttacggaggaatggaaagcccaattcattaaaacagaaaggaagaagctcctgaactacaaggctcggctggtgaagaacctgcaaccccgaatttattgtccctttgctgggtattttgtggaatctcacccatcagacaagtacatcaaggaaacaaacaccaaaaatgacccaaatgaactcaacaatcttatcaagaaaaactctgatgtgataacatggacccctcgaccgggagccacccttgatctgggaagaatgctgaaggatcgaacagacagcaagggcatcatagagcctccagaggggacaaaaatttacaaggattcctgggattttgaaccttatttggaaatcttgaatgctgctctaggagatgaaatatttcttcactcatcctggataaaagaatacttcacttgggctggatttaaagattacaaccttgtggtcaggatgattgagacagatgaggacttcaatccttttcctggaggatatgactatttggttgactttttagatttatccttcccaaaagaaagaccacaacgagaacatccctatgaggaaatccatagccgggtggatgtcatcagacacgtggtgaagaatggtctactctgggatgagttgtatataggattccaaacacggctccagcgggatcctgacatataccatcacctgttttggaatcattttcaaataaaactccccctcacaccacccaactggaagtcattcctgatgtgctgtgagcagaatgggcctgcgattttgcaagaatgcaaaaccacatgaaaatttcaagaattcactgatctgatgcaaaataaaaatttatcattacatcttgaacccaggaagcttacagcaaagagactatgctttatgacgtcagcaatagataattccacgttgcctttgtgatttgtatatatagcttacatttgtggatcactacatagccagattcaaaaatattttacttgttccatccacagttctctacagaaagaaccaatgaacccaataggaacaaattctctgtggaaaacaaagcatagctgtagtagatacgaatccaatcacagaggaaacaggaagagaaaaacatccaagactacagtgaaaactggaaatggtctgttttcgtgatattcgtatgattaagatgcaaattttttcttaggaaaatgtgattgttaactagcattctgttttacatgttgacatttctaacacacacaccactgatttgaacttcaaaatttattttctgattatatatgctaggtctgattctgaagatacaagaattcaatggtggaatttgtctcctgaaatttctagattcataattagaagtgtttattaccaacttctcacttagattaacatcaatgatgtttgattattctggttaaccgctcacatgcataacaataatgctagaaattcaggaattataattttgtgatttatactgtgtggtaaattattcagttctcactgcaaataaatataatgtatatcaatgtaatgtaggtcagaatgtctatggtgagcaaataaaagattattttaaaatatga

SEQ ID NO: 432903 - DNA, 2767 bp, Homo sapiens
tgtgaaaggcagtgggctaagtggtagggggagaaggaagatacagagtgctttcaaaagtgcctaaatgtaagtcaacagggcagtgtgccaattacagtgttataatgttctacagaagagggatgtacaccaagaatgccagcctggacctctggtgtgtcttggaagacttaaccaggaaggggacgattcgtttctatttgacccaagactgatgctgcgtggtgaaggagaggaactgcgttccaggcagaggaagtccagatgcgcaagagcagagatgggagggacagcacagtggcttctcagaattgaatatggtgttagacttctaaaagagctgtggtagagggagaaaactgtcaaaggaaatcagtaactgttaaaggaaaataccttaaacgtcctgttttcaggctgactaatgccttaggggagcaaatgagcaacagaaacgatatgagcaactgctgttctttcaaaatacccaggcagaggaaccggcagacgatgggcagcatcgaacaaacaactgagatcctgttgtgcctatcacctgttgaagttgccagtcttaaggaaggaatcaatttctttcgcaataagagcactggcaaagactacgtcttgtacaagaataagagccgactgagggcatgcaagaatatgtgcaagcaccaaggaggcctgttcataaaagatatcgaggatttagccggaagttgttgaaatggatgaaaacaacggacttttgcttttagaactgaatcctcctaacccttgggacttacagcccagatctcctgaagagttggcttttggagaagtacagataacatatctcactcatgcctgcatggacctcaagttaggagacaagagaatggtgtttgacccttggttaatcggtcctgcttttgcccgtggatggtggttgctccatgagcctccatctgattggctggagaggctgtgccaggcagacctcatttacatcagtcatctgcactcagaccacctgagttaccccacactgaaaaagcttgctgggagaagaccagatattcccatttatgttggaaacacagaaaggcctgtattttggaatctgaatcagagcggtgtccagttgactaatatcaatgtcgtgccatttggaatatggcagcaggtggacaaaaatcttcgattcatgatcttgatggacggtgttcatcctgagatggacacttgcattattgtggagtacaaaggtcataaaatactcaatatagtagactgcaccagacccaatgggggaaggctgcctatgaaggttgctctaatgatgagtgattttgctggaggagcatcaggctttccaatgactttcagtggtggaaaatttacggaggaatggaaagcccaattcattaaaacagaaaggaagaagctcctgaactacaaggctcggctggtgaagaacctgcaaccccgaatttattgtccctttgctgggtattttgtggaatctcacccatcagacaagtacatcaaggaaacaaacaccaaaaatgacccaaatgaactcaacaatcttatcaagaaaaactctgatgtgataacatggacccctcgaccgggagccacccttgatctgggaagaatgctgaaggatcgaacagacagcaagggcatcatagagcctccagaggggacaaaaatttacaaggattcctgggattttgaaccttatttggaaatcttgaatgctgctctaggagatgaaatatttcttcactcatcctggataaaagaatacttcacttgggctggatttaaagattacaaccttgtggtcaggatgattgagacagatgaggacttcaatccttttcctggaggatatgactatttggttgactttttagatttatccttcccaaaagaaagaccacaacgagaacatccctatgaggaaatccatagccgggtggatgtcatcagacacgtggtgaagaatggtctactctgggatgagttgtatataggattccaaacacggctccagcgggatcctgacatataccatcacctgttttggaatcattttcaaataaaactccccctcacaccacccaactggaagtcattcctgatgtgctgtgagcagaatgggcctgcgattttgcaattctctacagaaagaaccaatgaacccaataggaacaaattctctgtggaaaacaaagcatagctgtagtagatacgaatccaatcacagaggaaacaggaagagaaaaacatccaagactacagtgaaaactggaaatggtctgttttcgtgatattcgtatgattaagatgcaaattttttcttaggaaaatgtgattgttaactagcattctgttttacatgttgacatttctaacacacacaccactgatttgaacttcaaaatttattttctgattatatatgctaggtctgattctgaagatacaagaattcaatggtggaatttgtctcctgaaatttctagattcataattagaagtgtttattaccaacttctcacttagattaacatcaatgatgtttgattattctggttaaccgctcacatgcataacaataatgctagaaattcaggaattataattttgtgatttatactgtgtggtaaattattcagttctcactgcaaataaatataatgtatatcaatgtaatgtaggtcagaatgtctatggtgagcaaataaaagattattttaaaatatga

SEQ ID NO: 432904 - DNA, 3134 bp, Homo sapiens
  misc_feature (976)..(976): n is a, c, g, or t
  misc_feature (988)..(988): n is a, c, g, or t
tgactctacaggatccccaggacagtcttaaggaaggaatcaatttctttcgcaataagagcactggcaaagactacgtcttgtacaagaataagagccgactgagggcatgcaagaatatgtgcaagcaccaaggaggcctgttcataaaagatatcgaggatttagccggaagttgttgaaatggatgaaaacaacggacttttgcttttagaactgaatcctcctaacccttgggacttacagcccagatctcctgaagagttggcttttggagaagtacagataacatatctcactcatgcctgcatggacctcaagttaggagacaagagaatggtgtttgacccttggttaatcggtcctgcttttgcccgtggatggtggttgctccatgagcctccatctgattggctggagaggctgtgccaggcagacctcatttacatcagtcatctgcactcagaccacctgagttaccccacactgaaaaagcttgctgggagaagaccagatattcccatttatgttggaaacacagaaaggcctgtattttggaatctgaatcagagcggtgtccagttgactaatatcaatgtcgtgccatttggaatatggcagcaggtggacaaaaatcttcgattcatgatcttgatggacggtgttcatcctgagatggacacttgcattattgtggagtacaaaggtcataaaatactcaatatagtagactgcaccagacccaatgggggaaggctgcctatgaaggttgctctaatgatgagtgattttgctggaggagcatcaggctttccaatgactttcagtggtggaaaatttacggaatgaacactccatgagagcagggacctgctttgccttgttcaccactttattcccagtggctagaaccacgtctgacacagagtaggtgcacaataaatattggttacgtgaatgaataagcaaatgaacngcactgtgagangggcatcatgactccatttacagagaagatacagacatggagaagttaggtagtttgcccaaggctgcccaaccagtaagtggtgggtcaggattttcaacctaactgactccaacgtcatgctcttaatcactgtgtatttgtcagattatgttgaacacacctgttataatctacaaatataatgaagccattttcatgttagtaaagagttaatttcaagaattacaatgcccttaaaatgtgcatgcacaccaactacgattatgcatcctaccctgtgtattcagctagggtccgaatgaattgccatatacaaggagaaagctcagtgcctttggctggcttggtaacattttcctagtaaccaattgaaatttccaagataaaaactccggggaaatcctccactaatgacatggagccttgttctatttctgccttagttacctatcaattttatctcctgaaagagttccaatctgctagaacatgtgtttttctgtgatttttccagcagaggagactccaatctaaatcctgtcatttcagaggaatggaaagcccaattcattaaaacagaaaggaagaagctcctgaactacaaggctcggctggtgaagaacctgcaaccccgaatttattgtccctttgctgggtattttgtggaatctcacccatcagacaagtacatcaaggaaacaaacaccaaaaatgacccaaatgaactcaacaatcttatcaagaaaaactctgatgtgataacatggacccctcgaccgggagccacccttgatctgggaagaatgctgaaggatcgaacagacagcaagggcatcatagagcctccagaggggacaaaaatttacaaggattcctgggattttgaaccttatttggaaatcttgaatgctgctctaggagatgaaatatttcttcactcatcctggataaaagaatacttcacttgggctggatttaaagattacaaccttgtggtcaggatgattgagacagatgaggacttcaatccttttcctggaggatatgactatttggttgactttttagatttatccttcccaaaagaaagaccacaacgagaacatccctatgaggaaatccatagccgggtggatgtcatcagacacgtggtgaagaatggtctactctgggatgagttgtatataggattccaaacacggctccagcgggatcctgacatataccatcacctgttttggaatcattttcaaataaaactccccctcacaccacccaactggaagtcattcctgatgtgctgtgagcagaatgggcctgcgattttgcaagaatgcaaaaccacatgaaaatttcaagaattcactgatctgatgcaaaataaaaatttatcattacatcttgaacccaggaagcttacagcaaagagactatgctttatgacgtcagcaatagataattccacgttgcctttgtgatttgtatatatagcttacatttgtggatcactacatagccagattcaaaaatattttacttgttccatccacagttctctacagaaagaaccaatgaacccaataggaacaaattctctgtggaaaacaaagcatagctgtagtagatacgaatccaatcacagaggaaacaggaagagaaaaacatccaagactacagtgaaaactggaaatggtctgttttcgtgatattcgtatgattaagatgcaaattttttcttaggaaaatgtgattgttaactagcattctgttttacatgttgacatttctaacacacacaccactgatttgaacttcaaaatttattttctgattatatatgctaggtctgattctgaagatacaagaattcaatggtggaatttgtctcctgaaatttctagattcataattagaagtgtttattaccaacttctcacttagattaacatcaatgatgtttgattattctggttaaccgctcacatgcataacaataatgctagaaattcaggaattataattttgtgatttatactgtgtggtaaattattcagttctcactgcaaataaatataatgtatatcaatgtaatgtaggtcagaatgtctatggtgagcaaataaaagattattttaaaatatga

SEQ ID NO: 432905 - DNA, 2852 bp, Homo sapiens
tgtgaaaggcagtgggctaagtggtagggggagaaggaagatacagagtgctttcaaaagtgcctaaatgtaagtcaacagggcagtgtgccaattacagtgttataatgttctacagaagagggatgtacaccaagaatgccagcctggacctctggtgtgtcttggaagacttaaccaggaaggggacgattcgtttctatttgacccaagactgatgctgcgtggtgaaggagaggaactgcgttccaggcagaggaagtccagatgcgcaagagcagagatgggagggacagcacagtggcttctcagaattgaatatggtgttagacttctaaaagagctgtggtagagggagaaaactgtcaaaggaaatcagtaactgttaaaggaaaataccttaaacgtcctgttttcaggctgactaatgccttaggggagcaaatgagcaacagaaacgatatgagcaactgctgttctttcaaaatacccaggcagaggaaccggcagacgatgggcagcatcgaacaaacaactgagatcctgttgtgcctatcacctgttgaagttgccagtcttaaggaaggaatcaatttctttcgcaataagagcactggcaaagactacgtcttgtacaagaataagagccgactgagggcatgcaagaatatgtgcaagcaccaaggaggcctgttcataaaagatatcgaggatttagccggaagttgttgaaatggatgaaaacaacggacttttgcttttagaactgaatcctcctaacccttgggacttacagcccagatctcctgaagagttggcttttggagaagtacagataacatatctcactcatgcctgcatggacctcaagttaggagacaagagaatggtgtttgacccttggttaatcggtcctgcttttgcccgtggatggtggttgctccatgagcctccatctgattggctggagaggctgtgccaggcagacctcatttacatcagtcatctgcactcagaccacctgagttaccccacactgaaaaagcttgctgggagaagaccagatattcccatttatgttggaaacacagaaaggcctgtattttggaatctgaatcagagcggtgtccagttgactaatatcaatgtcgtgccatttggaatatggcagcaggtggacaaaaatcttcgattcatgatcttgatggacggtgttcatcctgagatggacacttgcattattgtggagtacaaaggtcataaaatactcaatatagtagactgcaccagacccaatgggggaaggctgcctatgaaggttgctctaatgatgagtgattttgctggaggagcatcaggctttccaatgactttcagtggtggaaaatttacgggtacatcaaggaaacaaacaccaaaaatgacccaaatgaactcaacaatcttatcaagaaaaactctgatgtgataacatggacccctcgaccgggagccacccttgatctgggaagaatgctgaaggatcgaacagacagcaagggcatcatagagcctccagaggggacaaaaatttacaaggattcctgggattttgaaccttatttggaaatcttgaatgctgctctaggagatgaaatatttcttcactcatcctggataaaagaatacttcacttgggctggatttaaagattacaaccttgtggtcaggatgattgagacagatgaggacttcaatccttttcctggaggatatgactatttggttgactttttagatttatccttcccaaaagaaagaccacaacgagaacatccctatgaggaaatccatagccgggtggatgtcatcagacacgtggtgaagaatggtctactctgggatgagttgtatataggattccaaacacggctccagcgggatcctgacatataccatcacctgttttggaatcattttcaaataaaactccccctcacaccacccaactggaagtcattcctgatgtgctgtgagcagaatgggcctgcgattttgcaagaatgcaaaaccacatgaaaatttcaagaattcactgatctgatgcaaaataaaaatttatcattacatcttgaacccaggaagcttacagcaaagagactatgctttatgacgtcagcaatagataattccacgttgcctttgtgatttgtatatatagcttacatttgtggatcactacatagccagattcaaaaatattttacttgttccatccacagttctctacagaaagaaccaatgaacccaataggaacaaattctctgtggaaaacaaagcatagctgtagtagatacgaatccaatcacagaggaaacaggaagagaaaaacatccaagactacagtgaaaactggaaatggtctgttttcgtgatattcgtatgattaagatgcaaattttttcttaggaaaatgtgattgttaactagcattctgttttacatgttgacatttctaacacacacaccactgatttgaacttcaaaatttattttctgattatatatgctaggtctgattctgaagatacaagaattcaatggtggaatttgtctcctgaaatttctagattcataattagaagtgtttattaccaacttctcacttagattaacatcaatgatgtttgattattctggttaaccgctcacatgcataacaataatgctagaaattcaggaattataattttgtgatttatactgtgtggtaaattattcagttctcactgcaaataaatataatgtatatcaatgtaatgtaggtcagaatgtctatggtgagcaaataaaagattattttaaaatatga

SEQ ID NO: 432906 - DNA, 2270 bp, Homo sapiens
tgtgaaaggcagtgggctaagtggtagggggagaaggaagatacagagtgctttcaaaagtgcctaaatgtaagtcaacagggcagtgtgccaattacagtgttataatgttctacagaagagggatgtacaccaagaatgccagcctggacctctggtgtgtcttggaagacttaaccaggaaggggacgattcgtttctatttgacccaagactgatgctgcgtggtgaaggagaggaactgcgttccaggcagaggaagtccagatgcgcaagagcagagatgggagggacagcacagtggcttctcagaattgaatatggtgttagacttctaaaagagctgtggtagagggagaaaactgtcaaaggaaatcagtaactgttaaaggaaaataccttaaacgtcctgttttcaggctgactaatgccttaggggagcaaatgagcaacagaaacgatatgagcaactgctgttctttcaaaatacccaggcagaggaaccggcagacgatgggcagcatcgaacaaacaactgagatcctgttgtgcctatcacctgttgaagttgccagtcttaaggaaggaatcaatttctttcgcaataagagcactggcaaagactacgtcttgtacaagaataagagccgactgagggcatgcaagaatatgtgcaagcaccaaggaggcctgttcataaaagatatcgaggatttagccggaagttgttgaaatggatgaaaacaacggacttttgcttttagaactgaatcctcctaacccttgggacttacagcccagatctcctgaagagttggcttttggagaagtacagataacatatctcactcatgcctgcatggacctcaagttaggagacaagagaatggtgtttgacccttggttaatcggtcctgcttttgcccgtggatggtggttgctccatgagcctccatctgattggctggagaggctgtgccaggcagacctcatttacatcagtcatctgcactcagaccacctgagttaccccacactgaaaaagcttgctgggagaagaccagatattcccatttatgttggaaacacagaaaggcctgtattttggaatctgaatcagagcggtgtccagttgactaatatcaatgtcgtgccatttggaatatggcagcaggtggacaaaaatcttcgattcatgatcttgatggacggtgttcatcctgagatggacacttgcattattgtggagtacaaaggtcataaaatactcaatatagtagactgcaccagacccaatgggggaaggctgcctatgaaggttgctctaatgatgagtgattttgctggaggagcatcaggctttccaatgactttcagtggtggaaaatttacggaatgaacactccatgagagcagggacctgctttgccttgttcaccactttattcccagtggctagaaccacgtctgacacagacagaggagactccaatctaaatcctgtcatttcagaggaatggaaagcccaattcattaaaacagaaaggaagaagctcctgaactacaaggctcggctggtgaagaacctgcaaccccgaatttattgtccctttgctgggtattttgtggaatctcacccatcagacaagtatggctagacactttgtacatttttacatacaacttaacgtatggtggaatgagcgactttgctgtgaaagcagtgtgacatgagaaggaaagtgattagtaggtgtctggaactttttaacaagctgctggagaacccagagcatgaataaaagttacacttggcagccaggaactctttcagaagataaaataacagatagatattctccgaaaggatcccaggaaagaggatggcaactgccatttattatgtgaagtgaactggggacttttaactaagccatctaagttaatctcccaatagcactatgcgtaggaagggggtattgttccttttttgcagataaggaatctgaaactcagaaaggtcaagggacgtgcccaaagtcaccctgttggaaacatgagttgagaatggaaccctggtatgcttagttctaaagctcttttctctataccatactgcattccagaatagaattatgtctttcttctcatgttttaggtatctaatgtgatttttcttgcagcaatataacttctgcaaatactatgaatcatcaccaatgtatgaaattgttgaaagaaataaaagaccatgaatttgaaacaaaaaa

SEQ ID NO: 432907 - DNA, 2277 bp, Homo sapiens
tgtgaaaggcagtgggctaagtggtagggggagaaggaagatacagagtgctttcaaaagtgcctaaatgtaagtcaacagggcagtgtgccaattacagtgttataatgttctacagaagagggatgtacaccaagaatgccagcctggacctctggtgtgtcttggaagacttaaccaggaaggggacgattcgtttctatttgacccaagactgatgctgcgtggtgaaggagaggaactgcgttccaggcagaggaagtccagatgcgcaagagcagagatgggagggacagcacagtggcttctcagaattgaatatggtgttagacttctaaaagagctgtggtagagggagaaaactgtcaaaggaaatcagtaactgttaaaggaaaataccttaaacgtcctgttttcaggctgactaatgccttaggggagcaaatgagcaacagaaacgatatgagcaactgctgttctttcaaaatacccaggcagaggaaccggcagacgatgggcagcatcgaacaaacaactgagatcctgttgtgcctatcacctgttgaagttgccagtcttaaggaaggaatcaatttctttcgcaataagagcactggcaaagactacgtcttgtacaagaataagagccgactgagggcatgcaagaatatgtgcaagcaccaaggaggcctgttcataaaagatatcgaggatttagccggaagttgttgaaatggatgaaaacaacggacttttgcttttagaactgaatcctcctaacccttgggacttacagcccagatctcctgaagagttggcttttggagaagtacagataacatatctcactcatgcctgcatggacctcaagttaggagacaagagaatggtgtttgacccttggttaatcggtcctgcttttgcccgtggatggtggttgctccatgagcctccatctgattggctggagaggctgtgccaggcagacctcatttacatcagtcatctgcactcagaccacctgagttaccccacactgaaaaagcttgctgggagaagaccagatattcccatttatgttggaaacacagaaaggcctgtattttggaatctgaatcagagcggtgtccagttgactaatatcaatgtcgtgccatttggaatatggcagcaggtggacaaaaatcttcgattcatgatcttgatggacggtgttcatcctgagatggacacttgcattattgtggagtacaaaggtcataaaatactcaatatagtagactgcaccagacccaatgggggaaggctgcctatgaaggttgctctaatgatgagtgattttgctggaggagcatcaggctttccaatgactttcagtggtggaaaatttacggaggaatggaaagcccaattcattaaaacagaaaggaagaagctcctgaactacaaggctcggctggtgaagaacctgcaaccccgaatttattgtccctttgctgggtattttgtggaatctcacccatcagacaagtacatcaaggaaacaaacaccaaaaatgacccaaatgaactcaacaatcttatcaagaaaaactctgatgtgataacatggacccctcgaccgggagccacccttgatctgggaagaatgctgaaggatcgaacagacagcaagggcatcatagagcctccagaggggacaaaaatttacaaggattcctgggattttgaaccttatttggaaatcttgaatgctgctctaggagatgaaatatttcttcactcatcctggataaaagaatacttcacttgggctggatttaaagattacaaccttgtggtcaggatgattgagacagatgaggacttcaatccttttcctggaggatatgactatttggttgactttttagatttatccttcccaaaagaaagaccacaacgagaacatccctatgaggaaatccatagccgggtggatgtcatcagacacgtggtgaagaatggtctactctgggatgagttgtatataggattccaaacacggctccagcgggatcctgacatataccatcacctgtaagtctggaagcacctggcgcccccaggccattgctgaggacgctgtggatatgcataagcagtcagtgactgccgaagcccccagattctgactaatgtgtgagattccaccattagagcttcattcctttgttagtttgttaaaaagcaaatctggttaggaaggtataacattaaagagtcatttatacattc

SEQ ID NO: 432908 - DNA, 7379 bp, Homo sapiens
atggaatcacagcggcagcggcggctgcggcgcgcgcgagccgagtgtgagcggaaaggggcccggcgtctgcctcgagactgaagaccgataaactcaagccatggagggattactgcattacatcaaccctgcacacgccatttctctcctaagtgccctgaatgaggagcgtctcaaaggacagctgtgtgatgtgctgctgattgttggagaccaaaagttccgagctcataaaaacgtcttggctgccagcagcgaatactttcagagtttattcacaaataaggaaaatgagtcacaaactgtatttcagcttgacttctgtgagccagatgcttttgataatgttttaaactacatttattcttcctctctatttgttgagaagagcagccttgctgctgtgcaagaacttggctatagtcttgggatttcctttctgactaacatcgtttctaaaacacctcaagccccctttccaacgtgtcctaatagaaaaaaagtgtttgtagaagatgatgaaaacagttctcaaaagagaagtgtcattgtttgtcaaagtagaaacgaagcgcaaggaaaaactgttagtcaaaatcaacccgatgtaagccatacttcccggccctctcctagcattgcagtcaaggccaataccaataagccacatgtcccaaaaccaatagaaccacttcataatttgtcattaactgaaaagagttggccgaaagatagttctgtggtatatgcaaagtctcttgagcattctggatctttggatgatcctaatagaatcagtttggtgaaaagaaatgcagtgttgccttcaaagcctctgcaagacagagaagctatggatgataaaccaggtgtgagtggtcagcttccaaaaggaaaagctctagagctggctttgaagagaccacggccacctgttttgtctgtttgtagctcatcagagactccctatctattaaaagaaactaacaaaggaaatggtcaaggtgaagatagaaacttgttgtactattcaaagttaggcttagtgatcccatccagtggatctggttctggaaaccaaagcattgacaggagtggcccacttgttaagagtctcctcagacggtcattgtcgatggatagccaggttcctgtctattcaccttccatagatttgaaatcttcccagggatcatcttcggtgtccagtgatgcaccagggaatgtgttgtgtgctttatctcagaagtcatctttaaaagattgtagtgaaaaaacagccctagatgacaggcctcaagtgctacaaccgcatcgcctcaggtcctttagtgcttctcagtcaacagacagggagggagcttcccctgtgactgaggtgcgcataaagactgagcccagcagcccgctgtcggacccctcggacatcatccgcgtcactgtgggagatgcggcaacaacagcagctgcctcatcttcgtcggtcacaagagacctgtctctgaaaacagaagatgaccaaaaagacatgagcagactcccagcaaaaaggaggttccaagcggaccgaagattgccgtttaagaagttaaaggtgaatgagcacgggtctcctgtgtcagaagataattttgaggaaggctcaagccctactctccttgatgcagattttccagattctgatttgaataaagacgaatttggtgagttggaggggacgagaccaaacaaaaaatttaaatgcaaacattgccttaagatctttagatcaacagcaggtcttcaccgtcatgttaacatgtaccataacccagaaaagccctacgcttgtgacatctgtcacaagaggtttcacaccaacttcaaagtgtggacacactgtcagacccaacacggcatagtgaagaacccatcaccagcctctagttcacatgctgttttggatgaaaaattccaaagaaagctgattgacatagtgagagagagagaaattaagaaggccctgatcattaagttaaggcgcggcaagcctggttttcagggacagagtagctcccaagcacagcaagtcatcaagaggaacttgagatctcgagccaaaggagcttacatttgtacttactgcggaaaagcgtaccgctttctctctcaatttaagcagcatataaaaatgcatccaggagaaaaaccccttggagtaaataaagttgctaaaccaaaagagcatgctcctcttgcaagtccagtagaaaacaaggaggtttaccagtgccgcctctgtaatgctaagctctcttctctcctagagcaaggaagccacgagcggctgtgccggaacgcggccgtctgcccttactgcagcctcaggtttttctcgcccgagctgaagcaagaacacgagagcaagtgtgagtataagaagctgacctgcctcgagtgcatgcgcaccttcaagtcctctttcagcatctggcggcaccaggttgaagtccataatcagaacaacatggcacccaccgaaaacttttctttgcccgttttggaccacaatggtgatgtgactggttcttcaaggccccaatcccagcctgagcccaacaaagtaaaccacatcgtcaccacaaaagacgacaacgtgttcagtgattcttcagaacaagttaacttcgactcggaagattcctcttgtcttcccgaagaccttagtctttccaagcaactgaaaatccaagtcaaagaggagcctgtggaggaggctgaagaagaggcacccgaggccagcacagcccccaaagaagcgggtcctagcaaagaagccagcctgtggccctgcgagaagtgtgggaagatgttcacggtgcataagcagctggagcgtcaccaggagcttctgtgctctgtgaaaccatttatttgtcacgtgtgcaacaaagcttttcgcactaattttcgactctggagtcacttccaatcgcacatgtctcaggcttcagaggaatcggcacataaggaatctgaggtgtgccctgttcccacaaactctccctctccaccacctctgccaccgccaccaccactgcccaagatccagcctctggagcctgacagccccacaggcctgtccgaaaacccaactccagccacagaaaaactgtttgtgccccaagaatcagacacccttttttaccatgccccacccctttcagcaatcacatttaaaagacagtttatgtgtaaactttgccacaggacattcaagactgcatttagtctttggagtcacgaacaaacacacaattgaaagaccaacactttttacctatgggaggcagtccccagatttcaacctgaattgtgaaatgtgtcataagaaacaaaatattttttaaacaagaataataaaggttggagattgttacgcttgaaattaagttggaggcaaattgataattacttagtaatgtccttaactttagaaatacagcttttaaaatattgtggttctggaccttacaagaacaagatggtttgatttcattaatgttgaaattggattagtcttgattgtgtgcatggttcctcattccatggtgtcagtataatcatttaattgaggtttttggttttttattgattagtggaatactgtcgaagtattccttcttttaattattttagacacttgagttctagttaaatcttaaccatgttcttaagtccaaaataggaagaagtggagtagtttgcagtattgatttatatcttagactactttagcaataaaagataaatctcaactttaataagttatcctgacacttgataaaaataaatatttggtattttgtggtcatgtaaaacttctttttgtatgaaaattgtgagaaatttaaatcagcaatagtaacacttagatttttataaactaacaaaaacttgctctcagtcaatataataaatgatagttaaactctaaggaagacctgggaaatgaaaacaatttatggaagtcccctacagtcagtttataagggcttcagtagtgatagacattgttataaaaacttgtaccatgttacatgtacactgcaccacagtctaaattcagaccagcatttgaaggactgcacatatttcatttcctctgatttatgctgtcacaaattgaaaatctgagtgtagttaggacaaaaaacaaagctaaccatatggcactaattttgattttaacattagtgtaacaaataaggtcgggacatatatttacatagatcccagacactcaagaattagcacagctgatgtaaaattctaaattaccatttacttccagatagagcagaggagaaacacctcactgcagtttcaacatgctttccaagaacaatatatacgacatatacattttcctgcctctctcttgtgacaatttctgttagaatttgttgggggtctgatggttaaaatcatgggcaaggccattctctacatcattgcttaatatttcaaaaataggtattagagcactatcagtggtccaaaattagttttagctacttattttgctccatgggttttgggcttttcaaagaatactatgtataatttgtaattgaaagcctttcagtaggatatccaaagttcaatgtgtttcaaaagggaaaacttttacttgtgggggtgggagttagatgtattaaaaaaacgaaactacaaaatccttttaagaaagtaataccaatttagactctagtttgtgttacgaggtattctttcaaattttttttaaaagccaactactgtcattaagaaataattttagatttgtgctctagcagaaaataactctgtacccatcaatcttattgccaacattccataccagtggtaggaaagatattctcattttttttattgaaccagacatttttataaaatactgattgactttgtacattatggatattatatatgaaattttgccttgtattctttcacttgaaaaaactccaaaattccacaatattttagtagttaacttcctattctttcttaaatttgatggagaagggaaaataaattgcagttattgattcttgccatctttgttttcttaaagaaatctatgcattttaaggataaaactaaagcatatgggtttacatgaaacatcaggatggattattgtacattgaattcattccgcgtataatgtggtatttcttactctgtccatcttggtagctgtcacttcaaaagaagacagtttccctgagtaatcatcacctacatggccattagagtatctatcggtgataattccatgatacagagtatcttggcattataaattcagtatcccaggacctaaacctttatgctacattttcgaagattttttaaaaataatattgttaatcagtaaaaaaaaaaaatatttttgatctaaacataggttctgcatatctgttagattttaaaaatgactggtgttttgtcttcacatttttgtctaagcaaggaatataagatttcaaataaaattttgaaccaaaaacatttataatgccgttctggtttttctattactttttatactgtactttaaaagcattaggctgaaagagtttattttggtggtcaaaaaaaatatgcttccactcatgtaactattttaaatgttaagaagtaaaataatgaaagatatgttaattactttattcagtaaagttttttaagaatgtttatctcagccagtaggcaaatacttggtgtaaaacaagttggtcttaaattgttgcaactcattagctagtgaagatattcatgtaaatatattttaggattgtaattaattttgaaaatgtagaaagctctttattccatgtaagtatgcaggatgcctgcttttttatgcagttgtggaaagaatgtaaaatgttttaatatattctttgttaatctgagaacttgatactgaatcgttttctttatgtgggagaaggaaggagtaacataaaacatgtttttatcactcaaagtaagcaatggaggtaacaaatattgtgcattttaacagtaatatttgaagatttgtagaatattcacctttaaaactagttagtatgcatttataattttaccagaatatacaactaacaattcaacagtgatgttctttgcatttgtggggagatgtgtgatgttcttggttttctggtttggaatggaacgtttatagccttgcctgtaaaaatgtgccccagcacttaatgagtgaccgtttgaatccatatgtagtcccattggtgctaatgagagtagctgctgtgaaacaggaataaaatgtgtctgttcacggaggtgcggtgtggatgcacctacaaggccaactctctgatcagggtgagggagagatggaagaattaacagatctaaagttggcctttgttgtctcaaattgggtttgtacacacatgcatgcatgtgtgtatacaactgtaatctggaacttcaggaagtaaaattatttgaagtttcttagtaaaaagtaattaggtataattccaaatagatttctgtataaattgtatctaactggattacaagtcagtttgacaatttacgatgtctcagtgatgtttctgcaataattgtgaaatgcattattgatttaaataatgctgacacgtactctttaaaagtgttctttaacactgactactaaactttaagttttaaaaaataggttttcatttatggctttttgtggttttagcactttaagaagtttaattttttgtaatttttaatatgctctttcagtgtatctcagcgggtactccagcttgtggcattcccatgtgactggggagaagacaaaattggtgtttagattctggaggagaaaaaatgagttacaatgtcaggtgtttttaaaaattccttttagagacagtcttttgggaaccaaagtattttactgtaaatctttaaaataacagaattcagtgctctttcatttgttaatgctgtccagatttttcacacagttatactcagttaatactagttttcagaacattagtccaaggctatttcaagttttccattgaatatatgcttatggttaaaagaaaaacgaatggttttataattctgtgtattttgtcatatgccttagcagagtaagtcatttttccattttacttaggaataagctttttcgaactgaaaattcatggtaaaataggatttctatctaatgttaatccattgcttatttgtattcaattccattgtctacagtttgcttaaatgttgactaagaatgattggagtcaataaatttgtactgtattttgaaaaaagtcagt

SEQ ID NO: 432909 - DNA, 7473 bp, Homo sapiens
aaacagatgtgggagcagggacgagagttgtggagtttaagtaccatgctggacctgaggatatactgtgatggaaccgttcagtaggtacctgagaggctggagcctcaagagtctaaacagagatacagatttgggaatcatcgtccagtagtgattaaagtcacaaggtctaatagaaaaagcaaagaatactgccacgttttggggctctgtaacggatgctggagaaataaagataaactcaagccatggagggattactgcattacatcaaccctgcacacgccatttctctcctaagtgccctgaatgaggagcgtctcaaaggacagctgtgtgatgtgctgctgattgttggagaccaaaagttccgagctcataaaaacgtcttggctgccagcagcgaatactttcagagtttattcacaaataaggaaaatgagtcacaaactgtatttcagcttgacttctgtgagccagatgcttttgataatgttttaaactacatttattcttcctctctatttgttgagaagagcagccttgctgctgtgcaagaacttggctatagtcttgggatttcctttctgactaacatcgtttctaaaacacctcaagccccctttccaacgtgtcctaatagaaaaaaagtgtttgtagaagatgatgaaaacagttctcaaaagagaagtgtcattgtttgtcaaagtagaaacgaagcgcaaggaaaaactgttagtcaaaatcaacccgatgtaagccatacttcccggccctctcctagcattgcagtcaaggccaataccaataagccacatgtcccaaaaccaatagaaccacttcataatttgtcattaactgaaaagagttggccgaaagatagttctgtggtatatgcaaagtctcttgagcattctggatctttggatgatcctaatagaatcagtttggtgaaaagaaatgcagtgttgccttcaaagcctctgcaagacagagaagctatggatgataaaccaggtgtgagtggtcagcttccaaaaggaaaagctctagagctggctttgaagagaccacggccacctgttttgtctgtttgtagctcatcagagactccctatctattaaaagaaactaacaaaggaaatggtcaaggtgaagatagaaacttgttgtactattcaaagttaggcttagtgatcccatccagtggatctggttctggaaaccaaagcattgacaggagtggcccacttgttaagagtctcctcagacggtcattgtcgatggatagccaggttcctgtctattcaccttccatagatttgaaatcttcccagggatcatcttcggtgtccagtgatgcaccagggaatgtgttgtgtgctttatctcagaagtcatctttaaaagattgtagtgaaaaaacagccctagatgacaggcctcaagtgctacaaccgcatcgcctcaggtcctttagtgcttctcagtcaacagacagggagggagcttcccctgtgactgaggtgcgcataaagactgagcccagcagcccgctgtcggacccctcggacatcatccgcgtcactgtgggagatgcggcaacaacagcagctgcctcatcttcgtcggtcacaagagacctgtctctgaaaacagaagatgaccaaaaagacatgagcagactcccagcaaaaaggaggttccaagcggaccgaagattgccgtttaagaagttaaaggtgaatgagcacgggtctcctgtgtcagaagataattttgaggaaggctcaagccctactctccttgatgcagattttccagattctgatttgaataaagacgaatttggtgagttggaggggacgagaccaaacaaaaaatttaaatgcaaacattgccttaagatctttagatcaacagcaggtcttcaccgtcatgttaacatgtaccataacccagaaaagccctacgcttgtgacatctgtcacaagaggtttcacaccaacttcaaagtgtggacacactgtcagacccaacacggcatagtgaagaacccatcaccagcctctagttcacatgctgttttggatgaaaaattccaaagaaagctgattgacatagtgagagagagagaaattaagaaggccctgatcattaagttaaggcgcggcaagcctggttttcagggacagagtagctcccaagcacagcaagtcatcaagaggaacttgagatctcgagccaaaggagcttacatttgtacttactgcggaaaagcgtaccgctttctctctcaatttaagcagcatataaaaatgcatccaggagaaaaaccccttggagtaaataaagttgctaaaccaaaagagcatgctcctcttgcaagtccagtagaaaacaaggaggtttaccagtgccgcctctgtaatgctaagctctcttctctcctagagcaaggaagccacgagcggctgtgccggaacgcggccgtctgcccttactgcagcctcaggtttttctcgcccgagctgaagcaagaacacgagagcaagtgtgagtataagaagctgacctgcctcgagtgcatgcgcaccttcaagtcctctttcagcatctggcggcaccaggttgaagtccataatcagaacaacatggcacccaccgaaaacttttctttgcccgttttggaccacaatggtgatgtgactggttcttcaaggccccaatcccagcctgagcccaacaaagtaaaccacatcgtcaccacaaaagacgacaacgtgttcagtgattcttcagaacaagttaacttcgactcggaagattcctcttgtcttcccgaagaccttagtctttccaagcaactgaaaatccaagtcaaagaggagcctgtggaggaggctgaagaagaggcacccgaggccagcacagcccccaaagaagcgggtcctagcaaagaagccagcctgtggccctgcgagaagtgtgggaagatgttcacggtgcataagcagctggagcgtcaccaggagcttctgtgctctgtgaaaccatttatttgtcacgtgtgcaacaaagcttttcgcactaattttcgactctggagtcacttccaatcgcacatgtctcaggcttcagaggaatcggcacataaggaatctgaggtgtgccctgttcccacaaactctccctctccaccacctctgccaccgccaccaccactgcccaagatccagcctctggagcctgacagccccacaggcctgtccgaaaacccaactccagccacagaaaaactgtttgtgccccaagaatcagacacccttttttaccatgccccacccctttcagcaatcacatttaaaagacagtttatgtgtaaactttgccacaggacattcaagactgcatttagtctttggagtcacgaacaaacacacaattgaaagaccaacactttttacctatgggaggcagtccccagatttcaacctgaattgtgaaatgtgtcataagaaacaaaatattttttaaacaagaataataaaggttggagattgttacgcttgaaattaagttggaggcaaattgataattacttagtaatgtccttaactttagaaatacagcttttaaaatattgtggttctggaccttacaagaacaagatggtttgatttcattaatgttgaaattggattagtcttgattgtgtgcatggttcctcattccatggtgtcagtataatcatttaattgaggtttttggttttttattgattagtggaatactgtcgaagtattccttcttttaattattttagacacttgagttctagttaaatcttaaccatgttcttaagtccaaaataggaagaagtggagtagtttgcagtattgatttatatcttagactactttagcaataaaagataaatctcaactttaataagttatcctgacacttgataaaaataaatatttggtattttgtggtcatgtaaaacttctttttgtatgaaaattgtgagaaatttaaatcagcaatagtaacacttagatttttataaactaacaaaaacttgctctcagtcaatataataaatgatagttaaactctaaggaagacctgggaaatgaaaacaatttatggaagtcccctacagtcagtttataagggcttcagtagtgatagacattgttataaaaacttgtaccatgttacatgtacactgcaccacagtctaaattcagaccagcatttgaaggactgcacatatttcatttcctctgatttatgctgtcacaaattgaaaatctgagtgtagttaggacaaaaaacaaagctaaccatatggcactaattttgattttaacattagtgtaacaaataaggtcgggacatatatttacatagatcccagacactcaagaattagcacagctgatgtaaaattctaaattaccatttacttccagatagagcagaggagaaacacctcactgcagtttcaacatgctttccaagaacaatatatacgacatatacattttcctgcctctctcttgtgacaatttctgttagaatttgttgggggtctgatggttaaaatcatgggcaaggccattctctacatcattgcttaatatttcaaaaataggtattagagcactatcagtggtcctactatgtataatttgtaattgaaagcctttcagtaggatatccaaagttcaatgtgtttcaaaagggaaaacttttacttgtgggggtgggagttagatgtattaaaaaaacgaaactacaaaatccttttaagaaagtaataccaatttagactctagtttgtgttacgaggtattctttcaaattttttttaaaagccaactactgtcattaagaaataattttagatttgtgctctagcagaaaataactctgtacccatcaatcttattgccaacattccataccagtggtaggaaagatattctcattttttttattgaaccagacatttttataaaatactgattgactttgtacattatggatattatatatgaaattttgccttgtattctttcacttgaaaaaactccaaaattccacaatattttagtagttaacttcctattctttcttaaatttgatggagaagggaaaataaattgcagttattgattcttgccatctttgttttcttaaagaaatctatgcattttaaggataaaactaaagcatatgggtttacatgaaacatcaggatggattattgtacattgaattcattccgcgtataatgtggtatttcttactctgtccatcttggtagctgtcacttcaaaagaagacagtttccctgagtaatcatcacctacatggccattagagtatctatcggtgataattccatgatacagagtatcttggcattataaattcagtatcccaggacctaaacctttatgctacattttcgaagattttttaaaaataatattgttaatcagtaaaaaaaaaaaatatttttgatctaaacataggttctgcatatctgttagattttaaaaatgactggtgttttgtcttcacatttttgtctaagcaaggaatataagatttcaaataaaattttgaaccaaaaacatttataatgccgttctggtttttctattactttttatactgtactttaaaagcattaggctgaaagagtttattttggtggtcaaaaaaaatatgcttccactcatgtaactattttaaatgttaagaagtaaaataatgaaagatatgttaattactttattcagtaaagttttttaagaatgtttatctcagccagtaggcaaatacttggtgtaaaacaagttggtcttaaattgttgcaactcattagctagtgaagatattcatgtaaatatattttaggattgtaattaattttgaaaatgtagaaagctctttattccatgtaagtatgcaggatgcctgcttttttatgcagttgtggaaagaatgtaaaatgttttaatatattctttgttaatctgagaacttgatactgaatcgttttctttatgtgggagaaggaaggagtaacataaaacatgtttttatcactcaaagtaagcaatggaggtaacaaatattgtgcattttaacagtaatatttgaagatttgtagaatattcacctttaaaactagttagtatgcatttataattttaccagaatatacaactaacaattcaacagtgatgttctttgcatttgtggggagatgtgtgatgttcttggttttctggtttggaatggaacgtttatagccttgcctgtaaaaatgtgccccagcacttaatgagtgaccgtttgaatccatatgtagtcccattggtgctaatgagagtagctgctgtgaaacaggaataaaatgtgtctgttcacggaggtgcggtgtggatgcacctacaaggccaactctctgatcagggtgagggagagatggaagaattaacagatctaaagttggcctttgttgtctcaaattgggtttgtacacacatgcatgcatgtgtgtatacaactgtaatctggaacttcaggaagtaaaattatttgaagtttcttagtaaaaagtaattaggtataattccaaatagatttctgtataaattgtatctaactggattacaagtcagtttgacaatttacgatgtctcagtgatgtttctgcaataattgtgaaatgcattattgatttaaataatgctgacacgtactctttaaaagtgttctttaacactgactactaaactttaagttttaaaaaataggttttcatttatggctttttgtggttttagcactttaagaagtttaattttttgtaatttttaatatgctctttcagtgtatctcagcgggtactccagcttgtggcattcccatgtgactggggagaagacaaaattggtgtttagattctggaggagaaaaaatgagttacaatgtcaggtgtttttaaaaattccttttagagacagtcttttgggaaccaaagtattttactgtaaatctttaaaataacagaattcagtgctctttcatttgttaatgctgtccagatttttcacacagttatactcagttaatactagttttcagaacattagtccaaggctatttcaagttttccattgaatatatgcttatggttaaaagaaaaacgaatggttttataattctgtgtattttgtcatatgccttagcagagtaagtcatttttccattttacttaggaataagctttttcgaactgaaaattcatggtaaaataggatttctatctaatgttaatccattgcttatttgtattcaattccattgtctacagtttgcttaaatgttgactaagaatgattggagtcaataaatttgtactgtattttgaaaaaagtcagt

SEQ ID NO: 432910 - DNA, 6924 bp, Homo sapiens
aaacagatgtgggagcagggacgagagttgtggagtttaagtaccatgctggacctgaggatatactgtgatggaaccgttcagtaggtacctgagaggctggagcctcaagagtctaaacagagatacagatttgggaatcatcgtccagtagtgattaaagtcacaaggtctaatagaaaaagcaaagaatactgccacgttttggggctctgtaacggatgctggagaaataaagataaactcaagccatggagggattactgcattacatcaaccctgcacacgccatttctctcctaagtgccctgaatgaggagcgtctcaaaggacagctgtgtgatgtgctgctgattgttggagaccaaaagttccgagctcataaaaacgtcttggctgccagcagcgaatactttcagagtttattcacaaataaggaaaatgagtcacaaactgtatttcagcttgacttctgtgagccagatgcttttgataatgttttaaactacatttattcttcctctctatttgttgagaagagcagccttgctgctgtgcaagaacttggctatagtcttgggatttcctttctgactaacatcgtttctaaaacacctcaagccccctttccaacgtgtcctaatagaaaaaaagtgtttgtagaagatgatgaaaacagttctcaaaagagaagtgtcattgtttgtcaaagtagaaacgaagcgcaaggaaaaactgttagtcaaaatcaacccgatgtaagccatacttcccggccctctcctagcattgcagtcaaggccaataccaataagccacatgtcccaaaaccaatagaaccacttcataatttgtcattaactgaaaagagttggccgaaagatagttctgtggtatatgcaaagtctcttgagcattctggatctttggatgatcctaatagaatcagtttggtgaaaagaaatgcagtgttgccttcaaagcctctgcaagacagagaagctatggatgataaaccaggtgtgagtggtcagcttccaaaaggaaaagctctagagctggctttgaagagaccacggccacctgttttgtctgtttgtagctcatcagagactccctatctattaaaagaaactaacaaaggaaatggtcaaggtgaagatagaaacttgttgtactattcaaagttaggcttagtgatcccatccagtggatctggttctggaaaccaaagcattgacaggagtggcccacttgttaagagtctcctcagacggtcattgtcgatggatagccaggttcctgtctattcaccttccatagatttgaaatcttcccagggatcatcttcggtgtccagtgatgcaccagggaatgtgttgtgtgctttatctcagaagtcatctttaaaagattgtagtgaaaaaacagccctagatgacaggcctcaagtgctacaaccgcatcgcctcaggtcctttagtgcttctcagtcaacagacagggagggagcttcccctgtgactgaggtgcgcataaagactgagcccagcagcccgctgtcggacccctcggacatcatccgcgtcactgtgggagatgcggcaacaacagcagctgcctcatcttcgtcggtcacaagagacctgtctctgaaaacagaagatgaccaaaaagacatgagcagactcccagcaaaaaggaggttccaagcggaccgaagattgccgtttaagaagttaaaggtgaatgagcacgggtctcctgtgtcagaagataattttgaggaaggctcaagccctactctccttgatgcagattttccagattctgatttgaataaagacgaatttgagcaaggaagccacgagcggctgtgccggaacgcggccgtctgcccttactgcagcctcaggtttttctcgcccgagctgaagcaagaacacgagagcaagtgtgagtataagaagctgacctgcctcgagtgcatgcgcaccttcaagtcctctttcagcatctggcggcaccaggttgaagtccataatcagaacaacatggcacccaccgaaaacttttctttgcccgttttggaccacaatggtgatgtgactggttcttcaaggccccaatcccagcctgagcccaacaaagtaaaccacatcgtcaccacaaaagacgacaacgtgttcagtgattcttcagaacaagttaacttcgactcggaagattcctcttgtcttcccgaagaccttagtctttccaagcaactgaaaatccaagtcaaagaggagcctgtggaggaggctgaagaagaggcacccgaggccagcacagcccccaaagaagcgggtcctagcaaagaagccagcctgtggccctgcgagaagtgtgggaagatgttcacggtgcataagcagctggagcgtcaccaggagcttctgtgctctgtgaaaccatttatttgtcacgtgtgcaacaaagcttttcgcactaattttcgactctggagtcacttccaatcgcacatgtctcaggcttcagaggaatcggcacataaggaatctgaggtgtgccctgttcccacaaactctccctctccaccacctctgccaccgccaccaccactgcccaagatccagcctctggagcctgacagccccacaggcctgtccgaaaacccaactccagccacagaaaaactgtttgtgccccaagaatcagacacccttttttaccatgccccacccctttcagcaatcacatttaaaagacagtttatgtgtaaactttgccacaggacattcaagactgcatttagtctttggagtcacgaacaaacacacaattgaaagaccaacactttttacctatgggaggcagtccccagatttcaacctgaattgtgaaatgtgtcataagaaacaaaatattttttaaacaagaataataaaggttggagattgttacgcttgaaattaagttggaggcaaattgataattacttagtaatgtccttaactttagaaatacagcttttaaaatattgtggttctggaccttacaagaacaagatggtttgatttcattaatgttgaaattggattagtcttgattgtgtgcatggttcctcattccatggtgtcagtataatcatttaattgaggtttttggttttttattgattagtggaatactgtcgaagtattccttcttttaattattttagacacttgagttctagttaaatcttaaccatgttcttaagtccaaaataggaagaagtggagtagtttgcagtattgatttatatcttagactactttagcaataaaagataaatctcaactttaataagttatcctgacacttgataaaaataaatatttggtattttgtggtcatgtaaaacttctttttgtatgaaaattgtgagaaatttaaatcagcaatagtaacacttagatttttataaactaacaaaaacttgctctcagtcaatataataaatgatagttaaactctaaggaagacctgggaaatgaaaacaatttatggaagtcccctacagtcagtttataagggcttcagtagtgatagacattgttataaaaacttgtaccatgttacatgtacactgcaccacagtctaaattcagaccagcatttgaaggactgcacatatttcatttcctctgatttatgctgtcacaaattgaaaatctgagtgtagttaggacaaaaaacaaagctaaccatatggcactaattttgattttaacattagtgtaacaaataaggtcgggacatatatttacatagatcccagacactcaagaattagcacagctgatgtaaaattctaaattaccatttacttccagatagagcagaggagaaacacctcactgcagtttcaacatgctttccaagaacaatatatacgacatatacattttcctgcctctctcttgtgacaatttctgttagaatttgttgggggtctgatggttaaaatcatgggcaaggccattctctacatcattgcttaatatttcaaaaataggtattagagcactatcagtggtccaaaattagttttagctacttattttgctccatgggttttgggcttttcaaagaatactatgtataatttgtaattgaaagcctttcagtaggatatccaaagttcaatgtgtttcaaaagggaaaacttttacttgtgggggtgggagttagatgtattaaaaaaacgaaactacaaaatccttttaagaaagtaataccaatttagactctagtttgtgttacgaggtattctttcaaattttttttaaaagccaactactgtcattaagaaataattttagatttgtgctctagcagaaaataactctgtacccatcaatcttattgccaacattccataccagtggtaggaaagatattctcattttttttattgaaccagacatttttataaaatactgattgactttgtacattatggatattatatatgaaattttgccttgtattctttcacttgaaaaaactccaaaattccacaatattttagtagttaacttcctattctttcttaaatttgatggagaagggaaaataaattgcagttattgattcttgccatctttgttttcttaaagaaatctatgcattttaaggataaaactaaagcatatgggtttacatgaaacatcaggatggattattgtacattgaattcattccgcgtataatgtggtatttcttactctgtccatcttggtagctgtcacttcaaaagaagacagtttccctgagtaatcatcacctacatggccattagagtatctatcggtgataattccatgatacagagtatcttggcattataaattcagtatcccaggacctaaacctttatgctacattttcgaagattttttaaaaataatattgttaatcagtaaaaaaaaaaaatatttttgatctaaacataggttctgcatatctgttagattttaaaaatgactggtgttttgtcttcacatttttgtctaagcaaggaatataagatttcaaataaaattttgaaccaaaaacatttataatgccgttctggtttttctattactttttatactgtactttaaaagcattaggctgaaagagtttattttggtggtcaaaaaaaatatgcttccactcatgtaactattttaaatgttaagaagtaaaataatgaaagatatgttaattactttattcagtaaagttttttaagaatgtttatctcagccagtaggcaaatacttggtgtaaaacaagttggtcttaaattgttgcaactcattagctagtgaagatattcatgtaaatatattttaggattgtaattaattttgaaaatgtagaaagctctttattccatgtaagtatgcaggatgcctgcttttttatgcagttgtggaaagaatgtaaaatgttttaatatattctttgttaatctgagaacttgatactgaatcgttttctttatgtgggagaaggaaggagtaacataaaacatgtttttatcactcaaagtaagcaatggaggtaacaaatattgtgcattttaacagtaatatttgaagatttgtagaatattcacctttaaaactagttagtatgcatttataattttaccagaatatacaactaacaattcaacagtgatgttctttgcatttgtggggagatgtgtgatgttcttggttttctggtttggaatggaacgtttatagccttgcctgtaaaaatgtgccccagcacttaatgagtgaccgtttgaatccatatgtagtcccattggtgctaatgagagtagctgctgtgaaacaggaataaaatgtgtctgttcacggaggtgcggtgtggatgcacctacaaggccaactctctgatcagggtgagggagagatggaagaattaacagatctaaagttggcctttgttgtctcaaattgggtttgtacacacatgcatgcatgtgtgtatacaactgtaatctggaacttcaggaagtaaaattatttgaagtttcttagtaaaaagtaattaggtataattccaaatagatttctgtataaattgtatctaactggattacaagtcagtttgacaatttacgatgtctcagtgatgtttctgcaataattgtgaaatgcattattgatttaaataatgctgacacgtactctttaaaagtgttctttaacactgactactaaactttaagttttaaaaaataggttttcatttatggctttttgtggttttagcactttaagaagtttaattttttgtaatttttaatatgctctttcagtgtatctcagcgggtactccagcttgtggcattcccatgtgactggggagaagacaaaattggtgtttagattctggaggagaaaaaatgagttacaatgtcaggtgtttttaaaaattccttttagagacagtcttttgggaaccaaagtattttactgtaaatctttaaaataacagaattcagtgctctttcatttgttaatgctgtccagatttttcacacagttatactcagttaatactagttttcagaacattagtccaaggctatttcaagttttccattgaatatatgcttatggttaaaagaaaaacgaatggttttataattctgtgtattttgtcatatgccttagcagagtaagtcatttttccattttacttaggaataagctttttcgaactgaaaattcatggtaaaataggatttctatctaatgttaatccattgcttatttgtattcaattccattgtctacagtttgcttaaatgttgactaagaatgattggagtcaataaatttgtactgtattttgaaaaaagtcagt

SEQ ID NO: 432911 - DNA, 7506 bp, Homo sapiens
aaacagatgtgggagcagggacgagagttgtggagtttaagtaccatgctggacctgaggatatactgtgatggaaccgttcagtaggtacctgagaggctggagcctcaagagtctaaacagagatacagatttgggaatcatcgtccagtagtgattaaagtcacaaggtctaatagaaaaagcaaagaatactgccacgttttggggctctgtaacggatgctggagaaataaagataaactcaagccatggagggattactgcattacatcaaccctgcacacgccatttctctcctaagtgccctgaatgaggagcgtctcaaaggacagctgtgtgatgtgctgctgattgttggagaccaaaagttccgagctcataaaaacgtcttggctgccagcagcgaatactttcagagtttattcacaaataaggaaaatgagtcacaaactgtatttcagcttgacttctgtgagccagatgcttttgataatgttttaaactacatttattcttcctctctatttgttgagaagagcagccttgctgctgtgcaagaacttggctatagtcttgggatttcctttctgactaacatcgtttctaaaacacctcaagccccctttccaacgtgtcctaatagaaaaaaagtgtttgtagaagatgatgaaaacagttctcaaaagagaagtgtcattgtttgtcaaagtagaaacgaagcgcaaggaaaaactgttagtcaaaatcaacccgatgtaagccatacttcccggccctctcctagcattgcagtcaaggccaataccaataagccacatgtcccaaaaccaatagaaccacttcataatttgtcattaactgaaaagagttggccgaaagatagttctgtggtatatgcaaagtctcttgagcattctggatctttggatgatcctaatagaatcagtttggtgaaaagaaatgcagtgttgccttcaaagcctctgcaagacagagaagctatggatgataaaccaggtgtgagtggtcagcttccaaaaggaaaagctctagagctggctttgaagagaccacggccacctgttttgtctgtttgtagctcatcagagactccctatctattaaaagaaactaacaaaggaaatggtcaaggtgaagatagaaacttgttgtactattcaaagttaggcttagtgatcccatccagtggatctggttctggaaaccaaagcattgacaggagtggcccacttgttaagagtctcctcagacggtcattgtcgatggatagccaggttcctgtctattcaccttccatagatttgaaatcttcccagggatcatcttcggtgtccagtgatgcaccagggaatgtgttgtgtgctttatctcagaagtcatctttaaaagattgtagtgaaaaaacagccctagatgacaggcctcaagtgctacaaccgcatcgcctcaggtcctttagtgcttctcagtcaacagacagggagggagcttcccctgtgactgaggtgcgcataaagactgagcccagcagcccgctgtcggacccctcggacatcatccgcgtcactgtgggagatgcggcaacaacagcagctgcctcatcttcgtcggtcacaagagacctgtctctgaaaacagaagatgaccaaaaagacatgagcagactcccagcaaaaaggaggttccaagcggaccgaagattgccgtttaagaagttaaaggtgaatgagcacgggtctcctgtgtcagaagataattttgaggaaggctcaagccctactctccttgatgcagattttccagattctgatttgaataaagacgaatttggtgagttggaggggacgagaccaaacaaaaaatttaaatgcaaacattgccttaagatctttagatcaacagcaggtcttcaccgtcatgttaacatgtaccataacccagaaaagccctacgcttgtgacatctgtcacaagaggtttcacaccaacttcaaagtgtggacacactgtcagacccaacacggcatagtgaagaacccatcaccagcctctagttcacatgctgttttggatgaaaaattccaaagaaagctgattgacatagtgagagagagagaaattaagaaggccctgatcattaagttaaggcgcggcaagcctggttttcagggacagagtagctcccaagcacagcaagtcatcaagaggaacttgagatctcgagccaaaggagcttacatttgtacttactgcggaaaagcgtaccgctttctctctcaatttaagcagcatataaaaatgcatccaggagaaaaaccccttggagtaaataaagttgctaaaccaaaagagcatgctcctcttgcaagtccagtagaaaacaaggaggtttaccagtgccgcctctgtaatgctaagctctcttctctcctagagcaaggaagccacgagcggctgtgccggaacgcggccgtctgcccttactgcagcctcaggtttttctcgcccgagctgaagcaagaacacgagagcaagtgtgagtataagaagctgacctgcctcgagtgcatgcgcaccttcaagtcctctttcagcatctggcggcaccaggttgaagtccataatcagaacaacatggcacccaccgaaaacttttctttgcccgttttggaccacaatggtgatgtgactggttcttcaaggccccaatcccagcctgagcccaacaaagtaaaccacatcgtcaccacaaaagacgacaacgtgttcagtgattcttcagaacaagttaacttcgactcggaagattcctcttgtcttcccgaagaccttagtctttccaagcaactgaaaatccaagtcaaagaggagcctgtggaggaggctgaagaagaggcacccgaggccagcacagcccccaaagaagcgggtcctagcaaagaagccagcctgtggccctgcgagaagtgtgggaagatgttcacggtgcataagcagctggagcgtcaccaggagcttctgtgctctgtgaaaccatttatttgtcacgtgtgcaacaaagcttttcgcactaattttcgactctggagtcacttccaatcgcacatgtctcaggcttcagaggaatcggcacataaggaatctgaggtgtgccctgttcccacaaactctccctctccaccactgcccaagatccagcctctggagcctgacagccccacaggcctgtccgaaaacccaactccagccacagaaaaactgtttgtgccccaagaatcagacacccttttttaccatgccccacccctttcagcaatcacatttaaaagacagtttatgtgtaaactttgccacaggacattcaagactgcatttagtctttggagtcacgaacaaacacacaattgaaagaccaacactttttacctatgggaggcagtccccagatttcaacctgaattgtgaaatgtgtcataagaaacaaaatattttttaaacaagaataataaaggttggagattgttacgcttgaaattaagttggaggcaaattgataattacttagtaatgtccttaactttagaaatacagcttttaaaatattgtggttctggaccttacaagaacaagatggtttgatttcattaatgttgaaattggattagtcttgattgtgtgcatggttcctcattccatggtgtcagtataatcatttaattgaggtttttggttttttattgattagtggaatactgtcgaagtattccttcttttaattattttagacacttgagttctagttaaatcttaaccatgttcttaagtccaaaataggaagaagtggagtagtttgcagtattgatttatatcttagactactttagcaataaaagataaatctcaactttaataagttatcctgacacttgataaaaataaatatttggtattttgtggtcatgtaaaacttctttttgtatgaaaattgtgagaaatttaaatcagcaatagtaacacttagatttttataaactaacaaaaacttgctctcagtcaatataataaatgatagttaaactctaaggaagacctgggaaatgaaaacaatttatggaagtcccctacagtcagtttataagggcttcagtagtgatagacattgttataaaaacttgtaccatgttacatgtacactgcaccacagtctaaattcagaccagcatttgaaggactgcacatatttcatttcctctgatttatgctgtcacaaattgaaaatctgagtgtagttaggacaaaaaacaaagctaaccatatggcactaattttgattttaacattagtgtaacaaataaggtcgggacatatatttacatagatcccagacactcaagaattagcacagctgatgtaaaattctaaattaccatttacttccagatagagcagaggagaaacacctcactgcagtttcaacatgctttccaagaacaatatatacgacatatacattttcctgcctctctcttgtgacaatttctgttagaatttgttgggggtctgatggttaaaatcatgggcaaggccattctctacatcattgcttaatatttcaaaaataggtattagagcactatcagtggtccaaaattagttttagctacttattttgctccatgggttttgggcttttcaaagaatactatgtataatttgtaattgaaagcctttcagtaggatatccaaagttcaatgtgtttcaaaagggaaaacttttacttgtgggggtgggagttagatgtattaaaaaaacgaaactacaaaatccttttaagaaagtaataccaatttagactctagtttgtgttacgaggtattctttcaaattttttttaaaagccaactactgtcattaagaaataattttagatttgtgctctagcagaaaataactctgtacccatcaatcttattgccaacattccataccagtggtaggaaagatattctcattttttttattgaaccagacatttttataaaatactgattgactttgtacattatggatattatatatgaaattttgccttgtattctttcacttgaaaaaactccaaaattccacaatattttagtagttaacttcctattctttcttaaatttgatggagaagggaaaataaattgcagttattgattcttgccatctttgttttcttaaagaaatctatgcattttaaggataaaactaaagcatatgggtttacatgaaacatcaggatggattattgtacattgaattcattccgcgtataatgtggtatttcttactctgtccatcttggtagctgtcacttcaaaagaagacagtttccctgagtaatcatcacctacatggccattagagtatctatcggtgataattccatgatacagagtatcttggcattataaattcagtatcccaggacctaaacctttatgctacattttcgaagattttttaaaaataatattgttaatcagtaaaaaaaaaaaatatttttgatctaaacataggttctgcatatctgttagattttaaaaatgactggtgttttgtcttcacatttttgtctaagcaaggaatataagatttcaaataaaattttgaaccaaaaacatttataatgccgttctggtttttctattactttttatactgtactttaaaagcattaggctgaaagagtttattttggtggtcaaaaaaaatatgcttccactcatgtaactattttaaatgttaagaagtaaaataatgaaagatatgttaattactttattcagtaaagttttttaagaatgtttatctcagccagtaggcaaatacttggtgtaaaacaagttggtcttaaattgttgcaactcattagctagtgaagatattcatgtaaatatattttaggattgtaattaattttgaaaatgtagaaagctctttattccatgtaagtatgcaggatgcctgcttttttatgcagttgtggaaagaatgtaaaatgttttaatatattctttgttaatctgagaacttgatactgaatcgttttctttatgtgggagaaggaaggagtaacataaaacatgtttttatcactcaaagtaagcaatggaggtaacaaatattgtgcattttaacagtaatatttgaagatttgtagaatattcacctttaaaactagttagtatgcatttataattttaccagaatatacaactaacaattcaacagtgatgttctttgcatttgtggggagatgtgtgatgttcttggttttctggtttggaatggaacgtttatagccttgcctgtaaaaatgtgccccagcacttaatgagtgaccgtttgaatccatatgtagtcccattggtgctaatgagagtagctgctgtgaaacaggaataaaatgtgtctgttcacggaggtgcggtgtggatgcacctacaaggccaactctctgatcagggtgagggagagatggaagaattaacagatctaaagttggcctttgttgtctcaaattgggtttgtacacacatgcatgcatgtgtgtatacaactgtaatctggaacttcaggaagtaaaattatttgaagtttcttagtaaaaagtaattaggtataattccaaatagatttctgtataaattgtatctaactggattacaagtcagtttgacaatttacgatgtctcagtgatgtttctgcaataattgtgaaatgcattattgatttaaataatgctgacacgtactctttaaaagtgttctttaacactgactactaaactttaagttttaaaaaataggttttcatttatggctttttgtggttttagcactttaagaagtttaattttttgtaatttttaatatgctctttcagtgtatctcagcgggtactccagcttgtggcattcccatgtgactggggagaagacaaaattggtgtttagattctggaggagaaaaaatgagttacaatgtcaggtgtttttaaaaattccttttagagacagtcttttgggaaccaaagtattttactgtaaatctttaaaataacagaattcagtgctctttcatttgttaatgctgtccagatttttcacacagttatactcagttaatactagttttcagaacattagtccaaggctatttcaagttttccattgaatatatgcttatggttaaaagaaaaacgaatggttttataattctgtgtattttgtcatatgccttagcagagtaagtcatttttccattttacttaggaataagctttttcgaactgaaaattcatggtaaaataggatttctatctaatgttaatccattgcttatttgtattcaattccattgtctacagtttgcttaaatgttgactaagaatgattggagtcaataaatttgtactgtattttgaaaaaagtcagt

SEQ ID NO: 432912 - DNA, 755 bp, Homo sapiens
aaacagatgtgggagcagggacgagagttgtggagtttaagtaccatgctggacctgaggatatactgtgatggaaccgttcagtaggtacctgagaggctggagcctcaagagtctaaacagagatacagatttgggaatcatcgtccagtagtgattaaagtcacaaggtctaatagaaaaagcaaagaatactgccacgttttggggctctgtaacggatgctggagaaataaaggtgagccagtccaggtcttgagcctcaagtttgatgatttctctctttgccctgtacctagcttgccaggccatgtgctgggcatcaggggatacgtgcatgcaaacaagggttctttctttagggagtcccttgggggagacacatgtaaaagaagattaattgaagaagttgtggtgttattacggagagatgaagtattgtggtagtttagatgactgagctgctggctaggggcaaattacaaaagctttgtagagtcggtgacatttcaactggatctttcgaaagaagttagccaagtaaaggagagggaagagagagattttgggtggcagaggctggatatgcaagtttgtagagtagatggtaagtagtgtccaataagggtggagagatgaattgtaaccagagtatgaaaagtcttgtatgccagtctgtagtttggattttctttaggaatagaaaaatcagtacagtactccaaagcagggcagtgatgtaatacgctttactt

SEQ ID NO: 432913 - DNA, 7527 bp, Homo sapiens
aaacagatgtgggagcagggacgagagttgtggagtttaagtaccatgctggacctgaggatatactgtgatggaaccgttcagtaggtacctgagaggctggagcctcaagagtctaaacagagatacagatttgggaatcatcgtccagtagtgattaaagtcacaaggtctaatagaaaaagcaaagaatactgccacgttttggggctctgtaacggatgctggagaaataaagataaactcaagccatggagggattactgcattacatcaaccctgcacacgccatttctctcctaagtgccctgaatgaggagcgtctcaaaggacagctgtgtgatgtgctgctgattgttggagaccaaaagttccgagctcataaaaacgtcttggctgccagcagcgaatactttcagagtttattcacaaataaggaaaatgagtcacaaactgtatttcagcttgacttctgtgagccagatgcttttgataatgttttaaactacatttattcttcctctctatttgttgagaagagcagccttgctgctgtgcaagaacttggctatagtcttgggatttcctttctgactaacatcgtttctaaaacacctcaagccccctttccaacgtgtcctaatagaaaaaaagtgtttgtagaagatgatgaaaacagttctcaaaagagaagtgtcattgtttgtcaaagtagaaacgaagcgcaaggaaaaactgttagtcaaaatcaacccgatgtaagccatacttcccggccctctcctagcattgcagtcaaggccaataccaataagccacatgtcccaaaaccaatagaaccacttcataatttgtcattaactgaaaagagttggccgaaagatagttctgtggtatatgcaaagtctcttgagcattctggatctttggatgatcctaatagaatcagtttggtgaaaagaaatgcagtgttgccttcaaagcctctgcaagacagagaagctatggatgataaaccaggtgtgagtggtcagcttccaaaaggaaaagctctagagctggctttgaagagaccacggccacctgttttgtctgtttgtagctcatcagagactccctatctattaaaagaaactaacaaaggaaatggtcaaggtgaagatagaaacttgttgtactattcaaagttaggcttagtgatcccatccagtggatctggttctggaaaccaaagcattgacaggagtggcccacttgttaagagtctcctcagacggtcattgtcgatggatagccaggttcctgtctattcaccttccatagatttgaaatcttcccagggatcatcttcggtgtccagtgatgcaccagggaatgtgttgtgtgctttatctcagaagtcatctttaaaagattgtagtgaaaaaacagccctagatgacaggcctcaagtgctacaaccgcatcgcctcaggtcctttagtgcttctcagtcaacagacagggagggagcttcccctgtgactgaggtgcgcataaagactgagcccagcagcccgctgtcggacccctcggacatcatccgcgtcactgtgggagatgcggcaacaacagcagctgcctcatcttcgtcggtcacaagagacctgtctctgaaaacagaagatgaccaaaaagacatgagcagactcccagcaaaaaggaggttccaagcggaccgaagattgccgtttaagaagttaaaggtgaatgagcacgggtctcctgtgtcagaagataattttgaggaaggctcaagccctactctccttgatgcagattttccagattctgatttgaataaagacgaatttggtgagttggaggggacgagaccaaacaaaaaatttaaatgcaaacattgccttaagatctttagatcaacagcaggtcttcaccgtcatgttaacatgtaccataacccagaaaagccctacgcttgtgacatctgtcacaagaggtttcacaccaacttcaaagtgtggacacactgtcagacccaacacggcatagtgaagaacccatcaccagcctctagttcacatgctgttttggatgaaaaattccaaagaaagctgattgacatagtgagagagagagaaattaagaaggccctgatcattaagttaaggcgcggcaagcctggttttcagggacagagtagctcccaagcacagcaagtcatcaagaggaacttgagatctcgagccaaaggagcttacatttgtacttactgcggaaaagcgtaccgctttctctctcaatttaagcagcatataaaaatgcatccaggagaaaaaccccttggagtaaataaagttgctaaaccaaaagagcatgctcctcttgcaagtccagtagaaaacaaggaggtttaccagtgccgcctctgtaatgctaagctctcttctctcctagagcaaggaagccacgagcggctgtgccggaacgcggccgtctgcccttactgcagcctcaggtttttctcgcccgagctgaagcaagaacacgagagcaagtgtgagtataagaagctgacctgcctcgagtgcatgcgcaccttcaagtcctctttcagcatctggcggcaccaggttgaagtccataatcagaacaacatggcacccaccgaaaacttttctttgcccgttttggaccacaatggtgatgtgactggttcttcaaggccccaatcccagcctgagcccaacaaagtaaaccacatcgtcaccacaaaagacgacaacgtgttcagtgattcttcagaacaagttaacttcgactcggaagattcctcttgtcttcccgaagaccttagtctttccaagcaactgaaaatccaagtcaaagaggagcctgtggaggaggctgaagaagaggcacccgaggccagcacagcccccaaagaagcgggtcctagcaaagaagccagcctgtggccctgcgagaagtgtgggaagatgttcacggtgcataagcagctggagcgtcaccaggagcttctgtgctctgtgaaaccatttatttgtcacgtgtgcaacaaagcttttcgcactaattttcgactctggagtcacttccaatcgcacatgtctcaggcttcagaggaatcggcacataaggaatctgaggtgtgccctgttcccacaaactctccctctccaccacctctgccaccgccaccaccactgcccaagatccagcctctggagcctgacagccccacaggcctgtccgaaaacccaactccagccacagaaaaactgtttgtgccccaagaatcagacacccttttttaccatgccccacccctttcagcaatcacatttaaaagacagtttatgtgtaaactttgccacaggacattcaagactgcatttagtctttggagtcacgaacaaacacacaattgaaagaccaacactttttacctatgggaggcagtccccagatttcaacctgaattgtgaaatgtgtcataagaaacaaaatattttttaaacaagaataataaaggttggagattgttacgcttgaaattaagttggaggcaaattgataattacttagtaatgtccttaactttagaaatacagcttttaaaatattgtggttctggaccttacaagaacaagatggtttgatttcattaatgttgaaattggattagtcttgattgtgtgcatggttcctcattccatggtgtcagtataatcatttaattgaggtttttggttttttattgattagtggaatactgtcgaagtattccttcttttaattattttagacacttgagttctagttaaatcttaaccatgttcttaagtccaaaataggaagaagtggagtagtttgcagtattgatttatatcttagactactttagcaataaaagataaatctcaactttaataagttatcctgacacttgataaaaataaatatttggtattttgtggtcatgtaaaacttctttttgtatgaaaattgtgagaaatttaaatcagcaatagtaacacttagatttttataaactaacaaaaacttgctctcagtcaatataataaatgatagttaaactctaaggaagacctgggaaatgaaaacaatttatggaagtcccctacagtcagtttataagggcttcagtagtgatagacattgttataaaaacttgtaccatgttacatgtacactgcaccacagtctaaattcagaccagcatttgaaggactgcacatatttcatttcctctgatttatgctgtcacaaattgaaaatctgagtgtagttaggacaaaaaacaaagctaaccatatggcactaattttgattttaacattagtgtaacaaataaggtcgggacatatatttacatagatcccagacactcaagaattagcacagctgatgtaaaattctaaattaccatttacttccagatagagcagaggagaaacacctcactgcagtttcaacatgctttccaagaacaatatatacgacatatacattttcctgcctctctcttgtgacaatttctgttagaatttgttgggggtctgatggttaaaatcatgggcaaggccattctctacatcattgcttaatatttcaaaaataggtattagagcactatcagtggtccaaaattagttttagctacttattttgctccatgggttttgggcttttcaaagaatactatgtataatttgtaattgaaagcctttcagtaggatatccaaagttcaatgtgtttcaaaagggaaaacttttacttgtgggggtgggagttagatgtattaaaaaaacgaaactacaaaatccttttaagaaagtaataccaatttagactctagtttgtgttacgaggtattctttcaaattttttttaaaagccaactactgtcattaagaaataattttagatttgtgctctagcagaaaataactctgtacccatcaatcttattgccaacattccataccagtggtaggaaagatattctcattttttttattgaaccagacatttttataaaatactgattgactttgtacattatggatattatatatgaaattttgccttgtattctttcacttgaaaaaactccaaaattccacaatattttagtagttaacttcctattctttcttaaatttgatggagaagggaaaataaattgcagttattgattcttgccatctttgttttcttaaagaaatctatgcattttaaggataaaactaaagcatatgggtttacatgaaacatcaggatggattattgtacattgaattcattccgcgtataatgtggtatttcttactctgtccatcttggtagctgtcacttcaaaagaagacagtttccctgagtaatcatcacctacatggccattagagtatctatcggtgataattccatgatacagagtatcttggcattataaattcagtatcccaggacctaaacctttatgctacattttcgaagattttttaaaaataatattgttaatcagtaaaaaaaaaaaatatttttgatctaaacataggttctgcatatctgttagattttaaaaatgactggtgttttgtcttcacatttttgtctaagcaaggaatataagatttcaaataaaattttgaaccaaaaacatttataatgccgttctggtttttctattactttttatactgtactttaaaagcattaggctgaaagagtttattttggtggtcaaaaaaaatatgcttccactcatgtaactattttaaatgttaagaagtaaaataatgaaagatatgttaattactttattcagtaaagttttttaagaatgtttatctcagccagtaggcaaatacttggtgtaaaacaagttggtcttaaattgttgcaactcattagctagtgaagatattcatgtaaatatattttaggattgtaattaattttgaaaatgtagaaagctctttattccatgtaagtatgcaggatgcctgcttttttatgcagttgtggaaagaatgtaaaatgttttaatatattctttgttaatctgagaacttgatactgaatcgttttctttatgtgggagaaggaaggagtaacataaaacatgtttttatcactcaaagtaagcaatggaggtaacaaatattgtgcattttaacagtaatatttgaagatttgtagaatattcacctttaaaactagttagtatgcatttataattttaccagaatatacaactaacaattcaacagtgatgttctttgcatttgtggggagatgtgtgatgttcttggttttctggtttggaatggaacgtttatagccttgcctgtaaaaatgtgccccagcacttaatgagtgaccgtttgaatccatatgtagtcccattggtgctaatgagagtagctgctgtgaaacaggaataaaatgtgtctgttcacggaggtgcggtgtggatgcacctacaaggccaactctctgatcagggtgagggagagatggaagaattaacagatctaaagttggcctttgttgtctcaaattgggtttgtacacacatgcatgcatgtgtgtatacaactgtaatctggaacttcaggaagtaaaattatttgaagtttcttagtaaaaagtaattaggtataattccaaatagatttctgtataaattgtatctaactggattacaagtcagtttgacaatttacgatgtctcagtgatgtttctgcaataattgtgaaatgcattattgatttaaataatgctgacacgtactctttaaaagtgttctttaacactgactactaaactttaagttttaaaaaataggttttcatttatggctttttgtggttttagcactttaagaagtttaattttttgtaatttttaatatgctctttcagtgtatctcagcgggtactccagcttgtggcattcccatgtgactggggagaagacaaaattggtgtttagattctggaggagaaaaaatgagttacaatgtcaggtgtttttaaaaattccttttagagacagtcttttgggaaccaaagtattttactgtaaatctttaaaataacagaattcagtgctctttcatttgttaatgctgtccagatttttcacacagttatactcagttaatactagttttcagaacattagtccaaggctatttcaagttttccattgaatatatgcttatggttaaaagaaaaacgaatggttttataattctgtgtattttgtcatatgccttagcagagtaagtcatttttccattttacttaggaataagctttttcgaactgaaaattcatggtaaaataggatttctatctaatgttaatccattgcttatttgtattcaattccattgtctacagtttgcttaaatgttgactaagaatgattggagtcaataaatttgtactgtattttgaaaaaagtcagt

SEQ ID NO: 432914 - DNA, 5611 bp, Homo sapiens
gagagaaattaagaaggccctgatcattaaaacatgtaccataacccagaaaagccctacgcttgtgacatctgtcacaagaggtttcacaccaacttcaaagtgtggacacactgtcagacccaacacggcatagtgaagaacccatcaccagcctctagttcacatgctgttttggatgaaaaattccaaagaaagctgattgacatagtgagagagagagaaattaagaaggccctgatcattaagttaaggcgcggcaagcctggttttcagggacagagtagctcccaagcacagcaagtcatcaagaggaacttgagatctcgagccaaaggagcttacatttgtacttactgcggaaaagcgtaccgctttctctctcaatttaagcagcatataaaaatgcatccaggagaaaaaccccttggagtaaataaagttgctaaaccaaaagagcatgctcctcttgcaagtccagtagaaaacaaggaggtttaccagtgccgcctctgtaatgctaagctctcttctctcctagagcaaggaagccacgagcggctgtgccggaacgcggccgtctgcccttactgcagcctcaggtttttctcgcccgagctgaagcaagaacacgagagcaagtgtgagtataagaagctgacctgcctcgagtgcatgcgcaccttcaagtcctctttcagcatctggcggcaccaggttgaagtccataatcagaacaacatggcacccaccgaaaacttttctttgcccgttttggaccacaatggtgatgtgactggttcttcaaggccccaatcccagcctgagcccaacaaagtaaaccacatcgtcaccacaaaagacgacaacgtgttcagtgattcttcagaacaagttaacttcgactcggaagattcctcttgtcttcccgaagaccttagtctttccaagcaactgaaaatccaagtcaaagaggagcctgtggaggaggctgaagaagaggcacccgaggccagcacagcccccaaagaagcgggtcctagcaaagaagccagcctgtggccctgcgagaagtgtgggaagatgttcacggtgcataagcagctggagcgtcaccaggagcttctgtgctctgtgaaaccatttatttgtcacgtgtgcaacaaagcttttcgcactaattttcgactctggagtcacttccaatcgcacatgtctcaggcttcagaggaatcggcacataaggaatctgaggtgtgccctgttcccacaaactctccctctccaccacctctgccaccgccaccaccactgcccaagatccagcctctggagcctgacagccccacaggcctgtccgaaaacccaactccagccacagaaaaactgtttgtgccccaagaatcagacacccttttttaccatgccccacccctttcagcaatcacatttaaaagacagtttatgtgtaaactttgccacaggacattcaagactgcatttagtctttggagtcacgaacaaacacacaattgaaagaccaacactttttacctatgggaggcagtccccagatttcaacctgaattgtgaaatgtgtcataagaaacaaaatattttttaaacaagaataataaaggttggagattgttacgcttgaaattaagttggaggcaaattgataattacttagtaatgtccttaactttagaaatacagcttttaaaatattgtggttctggaccttacaagaacaagatggtttgatttcattaatgttgaaattggattagtcttgattgtgtgcatggttcctcattccatggtgtcagtataatcatttaattgaggtttttggttttttattgattagtggaatactgtcgaagtattccttcttttaattattttagacacttgagttctagttaaatcttaaccatgttcttaagtccaaaataggaagaagtggagtagtttgcagtattgatttatatcttagactactttagcaataaaagataaatctcaactttaataagttatcctgacacttgataaaaataaatatttggtattttgtggtcatgtaaaacttctttttgtatgaaaattgtgagaaatttaaatcagcaatagtaacacttagatttttataaactaacaaaaacttgctctcagtcaatataataaatgatagttaaactctaaggaagacctgggaaatgaaaacaatttatggaagtcccctacagtcagtttataagggcttcagtagtgatagacattgttataaaaacttgtaccatgttacatgtacactgcaccacagtctaaattcagaccagcatttgaaggactgcacatatttcatttcctctgatttatgctgtcacaaattgaaaatctgagtgtagttaggacaaaaaacaaagctaaccatatggcactaattttgattttaacattagtgtaacaaataaggtcgggacatatatttacatagatcccagacactcaagaattagcacagctgatgtaaaattctaaattaccatttacttccagatagagcagaggagaaacacctcactgcagtttcaacatgctttccaagaacaatatatacgacatatacattttcctgcctctctcttgtgacaatttctgttagaatttgttgggggtctgatggttaaaatcatgggcaaggccattctctacatcattgcttaatatttcaaaaataggtattagagcactatcagtggtccaaaattagttttagctacttattttgctccatgggttttgggcttttcaaagaatactatgtataatttgtaattgaaagcctttcagtaggatatccaaagttcaatgtgtttcaaaagggaaaacttttacttgtgggggtgggagttagatgtattaaaaaaacgaaactacaaaatccttttaagaaagtaataccaatttagactctagtttgtgttacgaggtattctttcaaattttttttaaaagccaactactgtcattaagaaataattttagatttgtgctctagcagaaaataactctgtacccatcaatcttattgccaacattccataccagtggtaggaaagatattctcattttttttattgaaccagacatttttataaaatactgattgactttgtacattatggatattatatatgaaattttgccttgtattctttcacttgaaaaaactccaaaattccacaatattttagtagttaacttcctattctttcttaaatttgatggagaagggaaaataaattgcagttattgattcttgccatctttgttttcttaaagaaatctatgcattttaaggataaaactaaagcatatgggtttacatgaaacatcaggatggattattgtacattgaattcattccgcgtataatgtggtatttcttactctgtccatcttggtagctgtcacttcaaaagaagacagtttccctgagtaatcatcacctacatggccattagagtatctatcggtgataattccatgatacagagtatcttggcattataaattcagtatcccaggacctaaacctttatgctacattttcgaagattttttaaaaataatattgttaatcagtaaaaaaaaaaaatatttttgatctaaacataggttctgcatatctgttagattttaaaaatgactggtgttttgtcttcacatttttgtctaagcaaggaatataagatttcaaataaaattttgaaccaaaaacatttataatgccgttctggtttttctattactttttatactgtactttaaaagcattaggctgaaagagtttattttggtggtcaaaaaaaatatgcttccactcatgtaactattttaaatgttaagaagtaaaataatgaaagatatgttaattactttattcagtaaagttttttaagaatgtttatctcagccagtaggcaaatacttggtgtaaaacaagttggtcttaaattgttgcaactcattagctagtgaagatattcatgtaaatatattttaggattgtaattaattttgaaaatgtagaaagctctttattccatgtaagtatgcaggatgcctgcttttttatgcagttgtggaaagaatgtaaaatgttttaatatattctttgttaatctgagaacttgatactgaatcgttttctttatgtgggagaaggaaggagtaacataaaacatgtttttatcactcaaagtaagcaatggaggtaacaaatattgtgcattttaacagtaatatttgaagatttgtagaatattcacctttaaaactagttagtatgcatttataattttaccagaatatacaactaacaattcaacagtgatgttctttgcatttgtggggagatgtgtgatgttcttggttttctggtttggaatggaacgtttatagccttgcctgtaaaaatgtgccccagcacttaatgagtgaccgtttgaatccatatgtagtcccattggtgctaatgagagtagctgctgtgaaacaggaataaaatgtgtctgttcacggaggtgcggtgtggatgcacctacaaggccaactctctgatcagggtgagggagagatggaagaattaacagatctaaagttggcctttgttgtctcaaattgggtttgtacacacatgcatgcatgtgtgtatacaactgtaatctggaacttcaggaagtaaaattatttgaagtttcttagtaaaaagtaattaggtataattccaaatagatttctgtataaattgtatctaactggattacaagtcagtttgacaatttacgatgtctcagtgatgtttctgcaataattgtgaaatgcattattgatttaaataatgctgacacgtactctttaaaagtgttctttaacactgactactaaactttaagttttaaaaaataggttttcatttatggctttttgtggttttagcactttaagaagtttaattttttgtaatttttaatatgctctttcagtgtatctcagcgggtactccagcttgtggcattcccatgtgactggggagaagacaaaattggtgtttagattctggaggagaaaaaatgagttacaatgtcaggtgtttttaaaaattccttttagagacagtcttttgggaaccaaagtattttactgtaaatctttaaaataacagaattcagtgctctttcatttgttaatgctgtccagatttttcacacagttatactcagttaatactagttttcagaacattagtccaaggctatttcaagttttccattgaatatatgcttatggttaaaagaaaaacgaatggttttataattctgtgtattttgtcatatgccttagcagagtaagtcatttttccattttacttaggaataagctttttcgaactgaaaattcatggtaaaataggatttctatctaatgttaatccattgcttatttgtattcaattccattgtctacagtttgcttaaatgttgactaagaatgattggagtcaataaatttgtactgtattttgaaaaaagtcagt

SEQ ID NO: 432915 - DNA, 203 bp, Homo sapiens
tcttttcaacatgttttcagagcctcccctcccggaagtagaattttttacggtgcacagaggacctctaccacgcctcagactgaggaaagccaaggagaaaaatggaccaatcagttcatatcaggtgttagtgctggcatccaaagaaagttctcttctcccccaccagatggaagcagcggaatctatcagcacgaacc

SEQ ID NO: 432916 - DNA, 3125 bp, Homo sapiens
gaggaaggacccgcgctctgcggcctcccggggaccccgcagcgccccccgcttccctcggcggcgccggaagccgccggctggtcccctccccgcggcgcctgtagccttatctctgcaccctgagggccccgggaggaggcgcgggcgcgccgggagggaccggcggcggcatgggccgggggccctgggatgcgggcccgtctcgccgcctgctgccgctgttgctgctgctcggcctggcccgcggcgccgcgggagcgccgggccccgacggtttagacgtctgtgccacttgccatgaacatgccacatgccagcaaagagaagggaagaagatctgtatttgcaactatggatttgtagggaacgggaggactcagtgtgttgataaaaatgagtgccagtttggagccactcttgtctgtgggaaccacacatcttgccacaacacccccgggggcttctattgcatttgcctggaaggatatcgagccacaaacaacaacaagacattcattcccaacgatggcaccttttgtacagacatagatgagtgtgaagtttctggcctgtgcaggcatggagggcgatgcgtgaacactcatgggagctttgaatgctactgtatggatggatacttgccaaggaatggacctgaacctttccacccgaccaccgatgccacatcatgcacagaaatagactgtggtacccctcctgaggttccagatggctatatcataggaaattatacgtctagtctgggcagccaggttcgttatgcttgcagagaaggattcttcagtgttccagaagatacagtttcaagctgcacaggcctgggcacatgggagtccccaaaattacattgccaagagatcaactgtggcaaccctccagaaatgcggcacgccatcttggtaggaaatcacagctccaggctgggcggtgtggctcgctatgtctgtcaagagggctttgagagccctggaggaaagatcacttctgtttgcacagagaaaggcacctggagagaaagtactttaacatgcacagaaattctgacaaagattaatgatgtatcactgtttaatgatacctgtgtgagatggcaaataaactcaagaagaataaaccccaagatctcatatgtgatatccataaaaggacaacggttggaccctatggaatcagttcgtgaggagacagtcaacttgaccacagacagcaggaccccagaagtgtgcctagccctgtacccaggcaccaactacaccgtgaacatctccacagcacctcccaggcgctcgatgccagccgtcatcggtttccagacagctgaagttgatctcttagaagatgatggaagtttcaatatttcaatatttaatgaaacttgtttgaaattgaacaggcgttctaggaaagttggatcagaacacatgtaccaatttaccgttctgggtcagaggtggtatctggctaacttttctcatgcaacatcgtttaacttcacaacgagggaacaagtgcctgtagtgtgtttggatctgtaccctacgactgattatacggtgaatgtgaccctgctgagatctcctaagcggcactcagtgcaaataacaatagcaactcccccagcagtaaaacagaccatcagtaacatttcaggatttaatgaaacctgcttgagatggagaagcatcaagacagctgatatggaggagatgtatttattccacatttggggccagagatggtatcagaaggaatttgcccaggaaatgacctttaatatcagtagcagcagccgagatcccgaggtgtgcttggacctacgtccgggtaccaactacaatgtcagtctccgggctctgtcttcggaacttcctgtggtcatctccctgacaacccagataacagagcctcccctcccggaagtagaattttttacggtgcacagaggacctctaccacgcctcagactgaggaaagccaaggagaaaaatggaccaatcagttcatatcaggtgttagtgcttcccctggccctccaaagcacattttcttgtgattctgaaggcgcttcctccttctttagcaacgcctctgatgctgatggatacgtggctgcagaactactggccaaagatgttccagatgatgccatggagatacctataggagacaggctgtactatggggaatattataatgcacccttgaaaagagggagtgattactgcattatattacgaatcacaagtgaatggaataaggtgagaagacactcctgtgcagtttgggctcaggtgaaagattcgtcactcatgctgctgcagatggcgggtgttggactgggttccctggctgttgtgatcattctcacattcctctccttctcagcggtgtgatggcagatggacactgagtggggaggatgcactgctgctgggcaggtgttctggcagcttctcaggtgcccgcacagaggctccgtgtgacttccgtccagggagcatgtgggcctgcaactttctccattcccagctgggccccattcctggatttaagatggtggctatccctgaggagtcaccataaggagaaaactcaggaattctgagtcttccctgctacaggaccagttctgtgcaatgaacttgagactcctgatgtacactgtgatattgaccgaaggctacatacagatctgtgaatcttggctgggacttcctctgagtgatgcctgagggtcagctcctctagacattgactgcaagagaatctctgcaacctcctatataaaagcatttctgttaattcattcagaatccattctttacaatatgcagtgagatgggcttaagtttgggctagagtttgactttatgaaggaggtcattgaaaaagagaacagtgacgtaggcaaatgtttcaagcactttagaaacagtacttttcctataattagttgatatactaatgagaaaatatactagcctggccatgccaataagtttcctgctgtgtctgttaggcagcattgctttgatgcaatttctattgtcctatatattcaaaagtaatgtctacattccagtaaaaatatcccgtattaa

SEQ ID NO: 432917 - DNA, 2778 bp, Homo sapiens
tcagaatcacagttgccagagaaacatcagcgggctttagctggggcagagcttagcaagtgttggggtatcagcagttagtcactgtttgcctggaaccacaggatgtgaatcctagttcctggattccaaggaatcctgcatccaggtgtttattgtgctttgcagagtcaacatcaagctcaggagctggttgcagacatagatgagtgtgaagtttctggcctgtgcaggcatggagggcgatgcgtgaacactcatgggagctttgaatgctactgtatggatggatacttgccaaggaatggacctgaacctttccacccgaccaccgatgccacatcatgcacagaaatagactgtggtacccctcctgaggttccagatggctatatcataggaaattatacgtctagtctgggcagccaggttcgttatgcttgcagagaaggattcttcagtgttccagaagatacagtttcaagctgcacaggcctgggcacatgggagtccccaaaattacattgccaagagatcaactgtggcaaccctccagaaatgcggcacgccatcttggtaggaaatcacagctccaggctgggcggtgtggctcgctatgtctgtcaagagggctttgagagccctggaggaaagatcacttctgtttgcacagagaaaggcacctggagagaaagtactttaacatgcacagaaattctgacaaagattaatgatgtatcactgtttaatgatacctgtgtgagatggcaaataaactcaagaagaataaaccccaagatctcatatgtgatatccataaaaggacaacggttggaccctatggaatcagttcgtgaggagacagtcaacttgaccacagacagcaggaccccagaagtgtgcctagccctgtacccaggcaccaactacaccgtgaacatctccacagcacctcccaggcgctcgatgccagccgtcatcggtttccagacagctgaagttgatctcttagaagatgatggaagtttcaatatttcaatatttaatgaaacttgtttgaaattgaacaggcgttctaggaaagttggatcagaacacatgtaccaatttaccgttctgggtcagaggtggtatctggctaacttttctcatgcaacatcgtttaacttcacaacgagggaacaagtgcctgtagtgtgtttggatctgtaccctacgactgattatacggtgaatgtgaccctgctgagatctcctaagcggcactcagtgcaaataacaatagcaactcccccagcagtaaaacagaccatcagtaacatttcaggatttaatgaaacctgcttgagatggagaagcatcaagacagctgatatggaggagatgtatttattccacatttggggccagagatggtatcagaaggaatttgcccaggaaatgacctttaatatcagtagcagcagccgagatcccgaggtgtgcttggacctacgtccgggtaccaactacaatgtcagtctccgggctctgtcttcggaacttcctgtggtcatctccctgacaacccagataacagagcctcccctcccggaagtagaattttttacggtgcacagaggacctctaccacgcctcagactgaggaaagccaaggagaaaaatggaccaatcagttcatatcaggtgttagtgcttcccctggccctccaaagcacattttcttgtgattctgaaggcgcttcctccttctttagcaacgcctctgatgctgatggatacgtggctgcagaactactggccaaagatgttccagatgatgccatggagatacctataggagacaggctgtactatggggaatattataatgcacccttgaaaagagggagtgattactgcattatattacgaatcacaagtgaatggaataaggtgagaagacactcctgtgcagtttgggctcaggtgaaagattcgtcactcatgctgctgcagatggcgggtgttggactgggttccctggctgttgtgatcattctcacattcctctccttctcagcggtgtgatggcagatggacactgagtggggaggatgcactgctgctgggcaggtgttctggcagcttctcaggtgcccgcacagaggctccgtgtgacttccgtccagggagcatgtgggcctgcaactttctccattcccagctgggccccattcctggatttaagatggtggctatccctgaggagtcaccataaggagaaaactcaggaattctgagtcttccctgctacaggaccagttctgtgcaatgaacttgagactcctgatgtacactgtgatattgaccgaaggctacatacagatctgtgaatcttggctgggacttcctctgagtgatgcctgagggtcagctcctctagacattgactgcaagagaatctctgcaacctcctatataaaagcatttctgttaattcattcagaatccattctttacaatatgcagtgagatgggcttaagtttgggctagagtttgactttatgaaggaggtcattgaaaaagagaacagtgacgtaggcaaatgtttcaagcactttagaaacagtacttttcctataattagttgatatactaatgagaaaatatactagcctggccatgccaataagtttcctgctgtgtctgttaggcagcattgctttgatgcaatttctattgtcctatatattcaaaagtaatgtctacattccagtaaaaatatcccgtattaa

SEQ ID NO: 432918 - DNA, 1039 bp, Homo sapiens
ggactatgagaatcgaacccatccctgagaatccaaaattctccgtgccacctatcacaccccatcccaaaaaaaaaaaaaaaaaaaaaaaaaaaaagcggccgctcgaattacggctgcgagaagacgacagaaggggctggttcttacttctcctggcccaggctgtgtggccccgtgtcctgcaggtattgggagatccacagctaagacaccgggacctcctggaagccatgattcgtcactcatgctgctgcagatggcgggtgttggactgggttccctggctgttgtgatcattctcacattcctctccttctcagcggtgtgatggcagatggacactgagtggggaggatgcactgctgctgggcaggtgttctggcagcttctcaggtgcccgcacagaggctccgtgtgacttccgtccagggagcatgtgggcctgcaactttctccattcccagctgggccccattcctggatttaagatggtggctatccctgaggagtcaccataaggagaaaactcaggaattctgagtcttccctgctacaggaccagttctgtgcaatgaacttgagactcctgatgtacactgtgatattgaccgaaggctacatacagatctgtgaatcttggctgggacttcctctgagtgatgcctgagggtcagctcctctagacattgactgcaagagaatctctgcaacctcctatataaaagcatttctgttaattcattcagaatccattctttacaatatgcagtgagatgggcttaagtttgggctagagtttgactttatgaaggaggtcattgaaaaagagaacagtgacgtaggcaaatgtttcaagcactttagaaacagtacttttcctataattagttgatatactaatgagaaaatatactagcctggccatgccaataagtttcctgctgtgtctgttaggcagcattgctttgatgcaatttctattgtcctatatattcaaaagtaatgtctacattccagtaaaaatatcccgtattaa

SEQ ID NO: 432919 - DNA, 825 bp, Homo sapiens
gcgctcgggttatggttgatattgctagggtggcgcttccaattaggtgcatgagtaggtggcctgaggtaatgttagcggttaggcgtacggccagggctattggttgaatgagtaggctgatggtttcgataataactagtatggggataaggggtgtaggtgttctggcagcttctcaggtgcccgcacagaggctccgtgtgacttccgtccagggagcatgtgggcctgcaactttctccattcccagctgggccccattcctggatttaagatggtggctatccctgaggagtcaccataaggagaaaactcaggaattctgagtcttccctgctacaggaccagttctgtgcaatgaacttgagactcctgatgtacactgtgatattgaccgaaggctacatacagatctgtgaatcttggctgggacttcctctgagtgatgcctgagggtcagctcctctagacattgactgcaagagaatctctgcaacctcctatataaaagcatttctgttaattcattcagaatccattctttacaatatgcagtgagatgggcttaagtttgggctagagtttgactttatgaaggaggtcattgaaaaagagaacagtgacgtaggcaaatgtttcaagcactttagaaacagtacttttcctataattagttgatatactaatgagaaaatatactagcctggccatgccaataagtttcctgctgtgtctgttaggcagcattgctttgatgcaatttctattgtcctatatattcaaaagtaatgtctacattccagtaaaaatatcccgtattaa

SEQ ID NO: 432920 - DNA, 141 bp, Homo sapiens
ttgtaaatgtccactaactacatgtgtctcatcttgcatttttctttttctgaaacatacaatttatgattcaggtttagacgtctgtgccacttgccatgaacatgccacatgccagcaaagagaagggaagaagatctg

SEQ ID NO: 432921 - DNA, 3279 bp, Homo sapiens
gaggaaggacccgcgctctgcggcctcccggggaccccgcagcgccccccgcttccctcggcggcgccggaagccgccggctggtcccctccccgcggcgcctgtagccttatctctgcaccctgagggccccgggaggaggcgcgggcgcgccgggagggaccggcggcggcatgggccgggggccctgggatgcgggcccgtctcgccgcctgctgccgctgttgctgctgctcggcctggcccgcggcgccgcgggagcgccgggccccgacggtttagacgtctgtgccacttgccatgaacatgccacatgccagcaaagagaagggaagaagatctgtatttgcaactatggatttgtagggaacgggaggactcagtgtgttgataaaaatgagtgccagtttggagccactcttgtctgtgggaaccacacatcttgccacaacacccccgggggcttctattgcatttgcctggaaggatatcgagccacaaacaacaacaagacattcattcccaacgatggcaccttttgtacagacatagatgagtgtgaagtttctggcctgtgcaggcatggagggcgatgcgtgaacactcatgggagctttgaatgctactgtatggatggatacttgccaaggaatggacctgaacctttccacccgaccaccgatgccacatcatgcacagaaatagactgtggtacccctcctgaggttccagatggctatatcataggaaattatacgtctagtctgggcagccaggttcgttatgcttgcagagaaggattcttcagtgttccagaagatacagtttcaagctgcacaggcctgggcacatgggagtccccaaaattacattgccaagagatcaactgtggcaaccctccagaaatgcggcacgccatcttggtaggaaatcacagctccaggctgggcggtgtggctcgctatgtctgtcaagagggctttgagagccctggaggaaagatcacttctgtttgcacagagaaaggcacctggagagaaagtactttaacatgcacagaaattctgacaaagattaatgatgtatcactgtttaatgatacctgtgtgagatggcaaataaactcaagaagaataaaccccaagatctcatatgtgatatccataaaaggacaacggttggaccctatggaatcagttcgtgaggagacagtcaacttgaccacagacagcaggaccccagaagtgtgcctagccctgtacccaggcaccaactacaccgtgaacatctccacagcacctcccaggcgctcgatgccagccgtcatcggtttccagacagctgaagttgatctcttagaagatgatggaagtttcaatatttcaatatttaatgaaacttgtttgaaattgaacaggcgttctaggaaagttggatcagaacacatgtaccaatttaccgttctgggtcagaggtggtatctggctaacttttctcatgcaacatcgtttaacttcacaacgagggaacaagtgcctgtagtgtgtttggatctgtaccctacgactgattatacggtgaatgtgaccctgctgagatctcctaagcggcactcagtgcaaataacaatagcaactcccccagcagtaaaacagaccatcagtaacatttcaggatttaatgaaacctgcttgagatggagaagcatcaagacagctgatatggaggagatgtatttattccacatttggggccagagatggtatcagaaggaatttgcccaggaaatgacctttaatatcagtagcagcagccgagatcccgaggtgtgcttggacctacgtccgggtaccaactacaatgtcagtctccgggctctgtcttcggaacttcctgtggtcatctccctgacaacccagataacagagcctcccctcccggaagtagaattttttacggtgcacagaggacctctaccacgcctcagactgaggaaagccaaggagaaaaatggaccaatcagttcatatcaggtgttagtgcttcccctggccctccaaagcacattttcttgtgattctgaaggcgcttcctccttctttagcaacgcctctgatgctgatggatacgtggctgcagaactactggccaaagatgttccagatgatgccatggagatacctataggagacaggctgtactatggggaatattataatgcacccttgaaaagagggagtgattactgcattatattacgaatcacaagtgaatggaataaggtgagaagacactcctgtgcagtttgggctcaggtgaaagattcgtcactcatgctgctgcagatggcgggtgttggactgggttccctggctgttgtgatcattctcacattcctctccttctcagcggtgtgatggcagatggacactgagtggggaggatgcactgctgctgggcaggtgttctggcagcttctcaggtgcccgcacagaggctccgtgtgacttccgtccagggagcatgtgggcctgcaactttctccattcccagctgggccccattcctggatttaagatggtggctatccctgaggagtcaccataaggagaaaactcaggaattctgagtcttccctgctacaggaccagttctgtgcaatgaacttgagactcctgatgtacactgtgatattgaccgaaggctacatacagatctgtgaatcttggctgggacttcctctgagtgatgcctgagggtcagctcctctagacattgactgcaagagaatctctgcaacctcctatataaaagcatttctgttaattcattcagaatccattctttacaatatgcagtgagatgggcttaagtttgggctagagtttgactttatgaaggaggtcattgaaaaagagaacagtgacgtaggcaaatgtttcaagcactttagaaacagtacttttcctataattagttgatatactaatgagaaaatatactagcctggccatgccaataagtttcctgctgtgtctgttaggcagcattgctttgatgcaatttctattgtcctatatattcaaaagtaatgtctacattccagtaaaaatatcccgtattaaaaaacacacaagagaatacatacaatcacaacacaaaaaagaagggggcgcccaaagatcccgcgcgggggccccatacggtccccccttctgtgaaaggggcccaaaaggggcattaaaaaggacgggcggtaaacagccggggggaacgcgc

SEQ ID NO: 432922 - DNA, 2124 bp, Homo sapiens
  misc_feature (2065)..(2065): n is a, c, g, or t
  misc_feature (2082)..(2082): n is a, c, g, or t
gaggaaggacccgcgctctgcggcctcccggggaccccgcagcgccccccgcttccctcggcggcgccggaagccgccggctggtcccctccccgcggcgcctgtagccttatctctgcaccctgagggccccgggaggaggcgcgggcgcgccgggagggaccggcggcggcatgggccgggggccctgggatgcgggcccgtctcgccgcctgctgccgctgttgctgctgctcggcctggcccgcggcgccgcgggagcgccgggccccgacggtttagacgtctgtgccacttgccatgaacatgccacatgccagcaaagagaagggaagaagatctgtatttgcaactatggatttgtagggaacgggaggactcagtgtgttgataaaaatgagtgccagtttggagccactcttgtctgtgggaaccacacatcttgccacaacacccccgggggcttctattgcatttgcctggaaggatatcgagccacaaacaacaacaagacattcattcccaacgatggcaccttttgtacagacatagatgagtgtgaagtttctggcctgtgcaggcatggagggcgatgcgtgaacactcatgggagctttgaatgctactgtatggatggatacttgccaaggaatggacctgaacctttccacccgaccaccgatgccacatcatgcacagaaatagactgtggtacccctcctgaggttccagatggctatatcataggaaattatacgtctagtctgggcagccaggttcgttatgcttgcagagaaggattcttcagtgttccagaagatacagtttcaagctgcacaggcctgggcacatgggagtccccaaaattacattgccaagagatcaactgtggcaaccctccagaaatgcggcacgccatcttggtaggaaatcacagctccaggctgggcggtgtggctcgctatgtctgtcaagagggctttgagagccctggaggaaagatcacttctgtttgcacagagaaaggcacctggagagaaagtactttaacatgcacagaaattctgacaaagattaatgatgtatcactgtttaatgatacctgtgtgagatggcaaataaactcaagaagaataaaccccaagatctcatatgtgatatccataaaaggacaacggttggaccctatggaatcagttcgtgaggagacagtcaacttgaccacagacagcaggaccccagaagtgtgcctagccctgtacccaggcaccaactacaccgtgaacatctccacagcacctcccaggcgctcgatgccagccgtcatcggtttccagacagctgaagttgatctcttagaagatgatggaagtttcaatatttcaatatttaatgaaacttgtttgaaattgaacaggcgttctaggaaagttggatcagaacacatgtaccaatttaccgttctgggtcagaggtggtatctggctaacttttctcatgcaacatcgtttaacttcacaacgagggaacaagtgcctgtagtgtgtttggatctgtaccctacgactgattatacggtgaatgtgaccctgctgagatctcctaagcggcactcagtgcaaataacaatagcaactcccccagcagtaaaacagaccatcagtaacatttcaggatttaatgaaacctgcttgagatggagaagcatcaagacagctgatatggaggagatgtatttattccacatttggggccagagatggtatcagaaggaatttgcccaggaaatgacctttaatatcagtagcagcagccgagatcccgaggtgtgcttggacctacgtccgggtaccaactacaatgtcagtctccgggctctgtcttcggaacttcctgtggtcatctccctgacaacccagataacagagcctcccctcccggaagtagaattttttacggtgcacagaggacctctaccacgcctcagactgaggaaagccaagaaggccatcacggacgctgccatgatggcggaggagctgaagaaggagcaggacaacagcgnccaccttgagcggatgnagaagaacctgggaacagacggtgaaggacctgcagcatcgt

SEQ ID NO: 432923 - DNA, 1296 bp, Homo sapiens
gtgctgcggcattcacgtgatctgcacgggcgcagatgtaggcaccggtccgagtgcctgccctctgtccccgcggctgggtctcgtctgctccggttcctgggctcctaattcttggtccagcttcttccaggtctgcgcgtctgttgttcccagcgctctgcgaagcctgaaaaggaggagcaacctgtccagaatccccgcaggacaggaaaaggaggggaaatctcgacatggaaaaactctacagtgaaaatgaaggaatggcttcaaaccaaggaaagatggaaaatgaagaacagccacaagacgagagaaagccagaagtaacttgtactctggaagacaagaagttagaaaacgagggaaagacagaaaacaagggcaaaacaggagatgaggaaatgttaaaggataaaggaaagccagagagtgagggagaggcaaaagaaggaaagtcagagagggagggagagtcagagatggagggaggatcagagagagagggaaaaccagagatagagggaaagccagagagtgaaggagagccagggagtgaaacaagggctgcaggaaagcgcccagctgaggatgatgtacccaggaaagccaaaagaaaaactaataaggggctggctcattacctcaaggagtataaagaggccatacatgatatgaatttcagcaatgaggacatgataagagaatttgacaatatggctaaggtgcaggatgagaagagaaaaagcaaacagaaattgggggcgtttttgtggatgcaaagaaatttacaggaccccttctaccctagaggtccaagggaattcaggggtggctgcagggccccacgaagggacattgaagacattccttatgtgtagtgtccctggcaggcatttaccaggccatgtgctttaacgttacggtaatactttactttaggcatccctcctgttgctagcagccttttgacctatctgcaatgcagtgttctcagtaggaaatgttcatctgttacatggaaaaaatgttgatggtgcattgtaaaattaaaaaacacaacttgcagaaccaaatatatggcatcagtacatttttgtaaaactacaaagatacttacctagtaatatagtatagaaaacaattctgaaagctgtgtccactaaaagattaacagtggttatctctgggtgattttttctgttcttttttgttcatctgtccatttttctcctaaaaacagatttctttagtcataaaaataataaaatataaagtattggaaaaaaaaaatat

SEQ ID NO: 432924 - DNA, 1604 bp, Homo sapiens
gtgctgcggcattcacgtgatctgcacgggcgcagatgtaggcaccggtccgagtgcctgccctctgtccccgcggctgggtctcgtctgctccggttcctgggctcctaattcttggtccagcttcttccaggtcagtgtgcgggccttccacgctgccagcggaacactggaatggcggaaggggaacggagaaaaacgttgaccgcgaggctggggaggagagttgcctctgaggaagaagggcacagagacccaaaattagtttggaaagcatcctgatttggtgcccgaggcctggaaagaaatggcggctggggtgcggcggaggtaggggaggaaaacgttggatgagaagggcctggactcaggaaagggaaccgcgtccgtgtgagcccgctgagcgcgcagaccctgcccctgtctcctgtctgtctgcaggtctgcgcgtctgttgttcccagcgctctgcgaagcctgaaaaggaggagcaacctgtccagaatccccgcaggacaggaaaaggaggggaaatctcgacatggaaaaactctacagtgaaaatgaaggaatggcttcaaaccaaggaaagatggaaaatgaagaacagccacaagacgagagaaagccagaagtaacttgtactctggaagacaagaagttagaaaacgagggaaagacagaaaacaagggcaaaacaggagatgaggaaatgttaaaggataaaggaaagccagagagtgagggagaggcaaaagaaggaaagtcagagagggagggagagtcagagatggagggaggatcagagagagagggaaaaccagagatagagggaaagccagagagtgaaggagagccagggagtgaaacaagggctgcaggaaagcgcccagctgaggatgatgtacccaggaaagccaaaagaaaaactaataaggggctggctcattacctcaaggagtataaagaggccatacatgatatgaatttcagcaatgaggacatgataagagaatttgacaatatggctaaggtgcaggatgagaagagaaaaagcaaacagaaattgggggcgtttttgtggatgcaaagaaatttacaggaccccttctaccctagaggtccaagggaattcaggggtggctgcagggccccacgaagggacattgaagacattccttatgtgtagtgtccctggcaggcatttaccaggccatgtgctttaacgttacggtaatactttactttaggcatccctcctgttgctagcagccttttgacctatctgcaatgcagtgttctcagtaggaaatgttcatctgttacatggaaaaaatgttgatggtgcattgtaaaattaaaaaacacaacttgcagaaccaaatatatggcatcagtacatttttgtaaaactacaaagatacttacctagtaatatagtatagaaaacaattctgaaagctgtgtccactaaaagattaacagtggttatctctgggtgattttttctgttcttttttgttcatctgtccatttttctcctaaaaacagatttctttagtcataaaaataataaaatataaagtattggaaaaaaaaaatat

SEQ ID NO: 432925 - DNA, 1355 bp, Homo sapiens
gtgctgcggcattcacgtgatctgcacgggcgcagatgtaggcaccggtccgagtgcctgccctctgtccccgcggctgggtctcgtctgctccggttcctgggctcctaattcttggtccagcttcttccaggtcagtgtgcgggccttccacgctgccagcggaacactggaatggcggaaggggaacgggtctgcgcgtctgttgttcccagcgctctgcgaagcctgaaaaggaggagcaacctgtccagaatccccgcaggacaggaaaaggaggggaaatctcgacatggaaaaactctacagtgaaaatgaaggaatggcttcaaaccaaggaaagatggaaaatgaagaacagccacaagacgagagaaagccagaagtaacttgtactctggaagacaagaagttagaaaacgagggaaagacagaaaacaagggcaaaacaggagatgaggaaatgttaaaggataaaggaaagccagagagtgagggagaggcaaaagaaggaaagtcagagagggagggagagtcagagatggagggaggatcagagagagagggaaaaccagagatagagggaaagccagagagtgaaggagagccagggagtgaaacaagggctgcaggaaagcgcccagctgaggatgatgtacccaggaaagccaaaagaaaaactaataaggggctggctcattacctcaaggagtataaagaggccatacatgatatgaatttcagcaatgaggacatgataagagaatttgacaatatggctaaggtgcaggatgagaagagaaaaagcaaacagaaattgggggcgtttttgtggatgcaaagaaatttacaggaccccttctaccctagaggtccaagggaattcaggggtggctgcagggccccacgaagggacattgaagacattccttatgtgtagtgtccctggcaggcatttaccaggccatgtgctttaacgttacggtaatactttactttaggcatccctcctgttgctagcagccttttgacctatctgcaatgcagtgttctcagtaggaaatgttcatctgttacatggaaaaaatgttgatggtgcattgtaaaattaaaaaacacaacttgcagaaccaaatatatggcatcagtacatttttgtaaaactacaaagatacttacctagtaatatagtatagaaaacaattctgaaagctgtgtccactaaaagattaacagtggttatctctgggtgattttttctgttcttttttgttcatctgtccatttttctcctaaaaacagatttctttagtcataaaaataataaaatataaagtattggaaaaaaaaaatat

SEQ ID NO: 432926 - DNA, 1223 bp, Homo sapiens
gtgctgcggcattcacgtgatctgcacgggcgcagatgtaggcaccggtccgagtgcctgccctctgtccccgcggctgggtctcgtctgctccggttcctgggctcctaattcttggtccagcttcttccaggacaggaaaaggaggggaaatctcgacatggaaaaactctacagtgaaaatgaaggaatggcttcaaaccaaggaaagatggaaaatgaagaacagccacaagacgagagaaagccagaagtaacttgtactctggaagacaagaagttagaaaacgagggaaagacagaaaacaagggcaaaacaggagatgaggaaatgttaaaggataaaggaaagccagagagtgagggagaggcaaaagaaggaaagtcagagagggagggagagtcagagatggagggaggatcagagagagagggaaaaccagagatagagggaaagccagagagtgaaggagagccagggagtgaaacaagggctgcaggaaagcgcccagctgaggatgatgtacccaggaaagccaaaagaaaaactaataaggggctggctcattacctcaaggagtataaagaggccatacatgatatgaatttcagcaatgaggacatgataagagaatttgacaatatggctaaggtgcaggatgagaagagaaaaagcaaacagaaattgggggcgtttttgtggatgcaaagaaatttacaggaccccttctaccctagaggtccaagggaattcaggggtggctgcagggccccacgaagggacattgaagacattccttatgtgtagtgtccctggcaggcatttaccaggccatgtgctttaacgttacggtaatactttactttaggcatccctcctgttgctagcagccttttgacctatctgcaatgcagtgttctcagtaggaaatgttcatctgttacatggaaaaaatgttgatggtgcattgtaaaattaaaaaacacaacttgcagaaccaaatatatggcatcagtacatttttgtaaaactacaaagatacttacctagtaatatagtatagaaaacaattctgaaagctgtgtccactaaaagattaacagtggttatctctgggtgattttttctgttcttttttgttcatctgtccatttttctcctaaaaacagatttctttagtcataaaaataataaaatataaagtattggaaaaaaaaaatat

SEQ ID NO: 432927 - DNA, 1192 bp, Homo sapiens
gtgctgcggcattcacgtgatctgcacgggcgcagatgtaggcaccggtccgagtgcctgccctctgtccccgcggctgggtctcgtctgctccggttcctgggctcctaattcttggtccagcttcttccaggtctgcgcgtctgttgttcccagcgctctgcgaagcctgaaaaggaggagcaacctgtccagaatccccgcaggacaggaaaaggaggggaaatctcgacatggaaaaactctacagtgaaaatgaaggaatggcttcaaaccaaggaaagatggaaaatgaagaacagccacaagacgagagaaagccagaagtaacttgtactctggaagacaagaagttagaaaacgagggaaagacagaaaacaagggcaaaacaggagatgaggaaatgttaaaggataaaggaaagccagagaagtgaaggagagccagggagtgaaacaagggctgcaggaaagcgcccagctgaggatgatgtacccaggaaagccaaaagaaaaactaataaggggctggctcattacctcaaggagtataaagaggccatacatgatatgaatttcagcaatgaggacatgataagagaatttgacaatatggctaaggtgcaggatgagaagagaaaaagcaaacagaaattgggggcgtttttgtggatgcaaagaaatttacaggaccccttctaccctagaggtccaagggaattcaggggtggctgcagggccccacgaagggacattgaagacattccttatgtgtagtgtccctggcaggcatttaccaggccatgtgctttaacgttacggtaatactttactttaggcatccctcctgttgctagcagccttttgacctatctgcaatgcagtgttctcagtaggaaatgttcatctgttacatggaaaaaatgttgatggtgcattgtaaaattaaaaaacacaacttgcagaaccaaatatatggcatcagtacatttttgtaaaactacaaagatacttacctagtaatatagtatagaaaacaattctgaaagctgtgtccactaaaagattaacagtggttatctctgggtgattttttctgttcttttttgttcatctgtccatttttctcctaaaaacagatttctttagtcataaaaataataaaatataaagtattggaaaaaaaaaatat

SEQ ID NO: 432928 - DNA, 1001 bp, Homo sapiens
gtgctgcggcattcacgtgatctgcacgggcgcagatgtaggcaccggtccgagtgcctgccctctgtccccgcggctgggtctcgtctgctccggttcctgggctcctaattcttggtccagcttcttccaggacaggaaaaggaggggaaatctcgacatggaaaaactctacagtgaaaatgaaggaatggcttcaaaccaaggaaagatggaaaatgaagaacagccacaagacgagagaaagccagaagtaacttgtactctggaagacaagaagttagaaaacgagggaaagacagaaaacaagggcaaaacaggagatgaggaaatgttaaaggataaaggaaagccagagagtgagggagaggcaaaagaaggaaagtcagagagggagggagagtcagagatggagggaggatcagagagagagggaaaaccagagatagagggaaagccagagagtgaaggagagccagggagtgaaacaagggctgcaggaaagcgcccagctgaggatgatgtacccaggaaagccaaaagaaaaactaataaggggctggctcattacctcaaggagtataaagaggccatacatgatatgaatttcagcaatgaggacatgataagagaatttgacaatatggctaaggtgcaggatgagaagagaaaaagcaaacagaaattgggggcgtttttgtggatgcaaagaaatttacaggaccccttctaccctagaggtccaagggaattcaggggtggctgcagggccccacgaagggacattgaagacattccttatgtgtagtgtccctggcaggcatttaccaggccatgtgctttaacgttacggtaatactttactttaggcatccctcctgttgctagcagccttttgacctatctgcaatgcagtgttctcagtaggaaatgttcatctgttacatggaaaaaatgttgatggtgcattgtaaaattaaaaaacacaacttgcagaacca

SEQ ID NO: 432929 - DNA, 1050 bp, Homo sapiens
  misc_feature (871)..(871): n is a, c, g, or t
gtgctgcggcattcacgtgatctgcacgggcgcagatgtaggcaccggtccgagtgcctgccctctgtccccgcggctgggtctcgtctgctccggttcctgggctcctaattcttggtccagcttcttccaggtcagtgtgcgggccttccacgctgccagcggaacactggaatggcggaaggggaacgggtctgcgcgtctgttgttcccagcgctctgcgaagcctgaaaaggaggagcaacctgtccagaatccccgcaggacaggaaaaggaggggaaatctcgacatggaaaaactctacagtgaaaatgaaggaatggcttcaaaccaaggaaagatggaaaatgaagaacagccacaagacgagagaaagccagaagtaacttgtactctggaagacaagaagttagaaaacgagggaaagacagaaaacaagggcaaaacaggagatgaggaaatgttaaaggataaaggaaagccagagagtgagggagaggcaaaagaaggaaagtcagagagggagggagagtcagagatggagggaggatcagagagagagggaaaaccagagatagagggaaagccagagagtgaaggagagccagggagtgaaacaagggctgcaggaaagcgcccagctgaggatgatgtacccaggaaagccaaaagaaaaactaataaggggctggctcattacctcaaggagtataaagaggccatacatgatatgaatttcagcaatgaggacatgataagagaatttgacaatatggctaaggtgcaggatgagaagagaaaaagcaaacagaaattgggggcgtttttgtggatgcaaagaaatttacaggaccttctacctaagtcnagcatccggtggtgcggccccgagactgagaattcttaggtatgtcctgcgcattaagcaggctacgacggatatattagatctcgtgtagccctgcttgcagcgtcccgaagtcggtcggaagtgggctgctaactggcaaaaaccgtttgggcgataggctgccttagagcctacag

SEQ ID NO: 432930 - DNA, 1074 bp, Homo sapiens
gtgctgcggcattcacgtgatctgcacgggcgcagatgtaggcaccggtccgagtgcctgccctctgtccccgcggctgggtctcgtctgctccggttcctgggctcctaattcttggtccagcttcttccaggtctgcgcgtctgttgttcccagcgctctgcgaagcctgaaaaggaggagcaacctgtccagaatccccgcaggacaggaaaaggaggggaaatctcgacatggaaaaactctacagtgaaaatgaaggaatggcttcaaaccaaggaaagatggaaaatgaagaacagccacaagacgagagaaagccagaagtaacttgtactctggaagacaagaagttagaaaacgagggaaagacagaaaacaagggcaaaacaggagatgaggaaatgttaaaggataaaggaaagccagagagtgagggagaggcaaaagaaggaaagtcagagagggagggagagtcagagatggagggaggatcagagagagagggaaaaccagagatagagggaaagccagagagtgaaggagagccagggagtgaaacaagggctgcaggaaagcgcccagctgaggatgatgtacccaggaaagccaaaagaaaaactaataaggggctggctcattacctcaaggagtataaagaggccatacatgatatgaatttcagcaatgaggacatgataagagaatttgacaatatggctaaggtgcaggatgagaagagaaaaagcaaacagaaattgggggcgtttttgtggatgcaaagaaatttacaggaccccttctaccctagaggtccaagggaattcaggggtggctgcagggccccacgaagggacattgaagacattccttatgtgtagtgtccctggcaggcatttaccaggccatgtgctttaacgttacggtaatactttactttaggcatccctcctgttgctagcagccttttgacctatctgcaatgcagtgttctcagtaggaaatgttcatctgttacatggaaaaaatgttgatggtgcattgtaaaattaaaaaacacaacttgcagaacca

SEQ ID NO: 432931 - DNA, 413 bp, Homo sapiens
  misc_feature (271)..(271): n is a, c, g, or t
  misc_feature (288)..(288): n is a, c, g, or t
  misc_feature (351)..(351): n is a, c, g, or t
  misc_feature (353)..(353): n is a, c, g, or t
  misc_feature (383)..(383): n is a, c, g, or t
  misc_feature (395)..(395): n is a, c, g, or t
  misc_feature (397)..(397): n is a, c, g, or t
  misc_feature (401)..(401): n is a, c, g, or t
  misc_feature (412)..(412): n is a, c, g, or t
gtgctgcggcattcacgtgatctgcacgggcgcagatgtaggcaccggtccgagtgcctgccctctgtccccgcggctgggtctcgtctgctccggttcctgggctcctaattcttggtccagcttcttccaggtctgcgcgtctgttgttcccagcgctctgcgaagcctgaaaaggaggagcaacctgtccagaatccccgcaggtccgtgaaagtacggggctgcatggacaggggcccacaagggttgagagtgtggagggcccggncagggccgaattggggnctttcccattcccccacccacatgaacacacaccttaccaggctgaacagtgcagagaaagtngnagagcctgtcaggcaatggctgctcacgtntgtggaggagtngngggntacgtggtggna

SEQ ID NO: 432932 - DNA, 1656 bp, Homo sapiens
gtgctgcggcattcacgtgatctgcacgggcgcagatgtaggcaccggtccgagtgcctgccctctgtccccgcggctgggtctcgtctgctccggttcctgggctcctaattcttggtccagcttcttccaggcacatcctcttctctgccctccgtccattttggagccggagatggtgggctggggccgccccagtagtgagacagtggaagtaaaccccatctgccgttcccgtgcgtagagaaaaacgttgaccgcgaggctggggaggagagttgcctctgaggaagaagggcacagagacccaaaattagtttggaaagcatcctgatttggtgcccgaggcctggaaagaaatggcggctggggtgcggcggaggtaggggaggaaaacgttggatgagaagggcctggactcaggaaagggaaccgcgtccgtgtgagcccgctgagcgcgcagaccctgcccctgtctcctgtctgtctgcaggtctgcgcgtctgttgttcccagcgctctgcgaagcctgaaaaggaggagcaacctgtccagaatccccgcaggacaggaaaaggaggggaaatctcgacatggaaaaactctacagtgaaaatgaaggaatggcttcaaaccaaggaaagatggaaaatgaagaacagccacaagacgagagaaagccagaagtaacttgtactctggaagacaagaagttagaaaacgagggaaagacagaaaacaagggcaaaacaggagatgaggaaatgttaaaggataaaggaaagccagagagtgagggagaggcaaaagaaggaaagtcagagagggagggagagtcagagatggagggaggatcagagagagagggaaaaccagagatagagggaaagccagagagtgaaggagagccagggagtgaaacaagggctgcaggaaagcgcccagctgaggatgatgtacccaggaaagccaaaagaaaaactaataaggggctggctcattacctcaaggagtataaagaggccatacatgatatgaatttcagcaatgaggacatgataagagaatttgacaatatggctaaggtgcaggatgagaagagaaaaagcaaacagaaattgggggcgtttttgtggatgcaaagaaatttacaggaccccttctaccctagaggtccaagggaattcaggggtggctgcagggccccacgaagggacattgaagacattccttatgtgtagtgtccctggcaggcatttaccaggccatgtgctttaacgttacggtaatactttactttaggcatccctcctgttgctagcagccttttgacctatctgcaatgcagtgttctcagtaggaaatgttcatctgttacatggaaaaaatgttgatggtgcattgtaaaattaaaaaacacaacttgcagaaccaaatatatggcatcagtacatttttgtaaaactacaaagatacttacctagtaatatagtatagaaaacaattctgaaagctgtgtccactaaaagattaacagtggttatctctgggtgattttttctgttcttttttgttcatctgtccatttttctcctaaaaacagatttctttagtcataaaaataataaaatataaagtattggaaaaaaaaaatat

SEQ ID NO: 432933 - DNA, 1177 bp, Homo sapiens
gtactatccagacctgcattccaccccatgcactcagtctcccatgtctcctctttgtctcctctttcctccacccccatcccccaggacaggaaaaggaggggaaatctcgacatggaaaaactctacagtgaaaatgaaggaatggcttcaaaccaaggaaagatggaaaatgaagaacagccacaagacgagagaaagccagaagtaacttgtactctggaagacaagaagttagaaaacgagggaaagacagaaaacaagggcaaaacaggagatgaggaaatgttaaaggataaaggaaagccagagagtgagggagaggcaaaagaaggaaagtcagagagggagggagagtcagagatggagggaggatcagagagagagggaaaaccagagatagagggaaagccagagagtgaaggagagccagggagtgaaacaagggctgcaggaaagcgcccagctgaggatgatgtacccaggaaagccaaaagaaaaactaataaggggctggctcattacctcaaggagtataaagaggccatacatgatatgaatttcagcaatgaggacatgataagagaatttgacaatatggctaaggtgcaggatgagaagagaaaaagcaaacagaaattgggggcgtttttgtggatgcaaagaaatttacaggaccccttctaccctagaggtccaagggaattcaggggtggctgcagggccccacgaagggacattgaagacattccttatgtgtagtgtccctggcaggcatttaccaggccatgtgctttaacgttacggtaatactttactttaggcatccctcctgttgctagcagccttttgacctatctgcaatgcagtgttctcagtaggaaatgttcatctgttacatggaaaaaatgttgatggtgcattgtaaaattaaaaaacacaacttgcagaaccaaatatatggcatcagtacatttttgtaaaactacaaagatacttacctagtaatatagtatagaaaacaattctgaaagctgtgtccactaaaagattaacagtggttatctctgggtgattttttctgttcttttttgttcatctgtccatttttctcctaaaaacagatttctttagtcataaaaataataaaatataaagtattggaaaaaaaaaatat

SEQ ID NO: 432934 - DNA, 1138 bp, Homo sapiens
gtgctgcggcattcacgtgatctgcacgggcgcagatgtaggcaccggtccgagtgcctgccctctgtccccgcggctgggtctcgtctgctccggttcctgggctcctaattcttggtccagcttcttccaggtctgcgcgtctgttgttcccagcgctctgcgaagcctgaaaaggaggagcaacctgtccagaatccccgcaggacaggaaaaggaggggaaatctcgacatggaaaaactctacagtgaaaatgaaggaatggcttcaaaccaaggaaagatggaaaatgaagaacagccacaagacgagagaaagccagaagtaacttgtactctggaagacaagaagttagaaaatagagggaaagccagagagtgaaggagagccagggagtgaaacaagggctgcaggaaagcgcccagctgaggatgatgtacccaggaaagccaaaagaaaaactaataaggggctggctcattacctcaaggagtataaagaggccatacatgatatgaatttcagcaatgaggacatgataagagaatttgacaatatggctaaggtgcaggatgagaagagaaaaagcaaacagaaattgggggcgtttttgtggatgcaaagaaatttacaggaccccttctaccctagaggtccaagggaattcaggggtggctgcagggccccacgaagggacattgaagacattccttatgtgtagtgtccctggcaggcatttaccaggccatgtgctttaacgttacggtaatactttactttaggcatccctcctgttgctagcagccttttgacctatctgcaatgcagtgttctcagtaggaaatgttcatctgttacatggaaaaaatgttgatggtgcattgtaaaattaaaaaacacaacttgcagaaccaaatatatggcatcagtacatttttgtaaaactacaaagatacttacctagtaatatagtatagaaaacaattctgaaagctgtgtccactaaaagattaacagtggttatctctgggtgattttttctgttcttttttgttcatctgtccatttttctcctaaaaacagatttctttagtcataaaaataataaaatataaagtattggaaaaaaaaaatat

SEQ ID NO: 432935 - DNA, 1242 bp, Homo sapiens
gtgctgcggcattcacgtgatctgcacgggcgcagatgtaggcaccggtccgagtgcctgccctctgtccccgcggctgggtctcgtctgctccggttcctgggctcctaattcttggtccagcttcttccaggtctgcgcgtctgttgttcccagcgctctgcgaagcctgaaaaggaggagcaacctgtccagaatccccgcaggacaggaaaaggaggggaaatctcgacatggaaaaactctacagtgaaaatgaaggaatggcttcaaaccaaggaaagatggaaaatgaagaacagccacaagacgagagaaagccagaagtaacttgtactctggaagacaagaagttagaaaacgagggaaagacagaaaacaagggcaaaacaggagatgaggaaatgttaaaggataaaggaaagccagagagtgagggagaggcaaaagaaggaaagtcagagagggagggagagtcagagatggagggaggatcagagagagagggaaaaccagagatagagggaaagccagagagtgaaggagagccagggagtgaaacaagggctgcaggaaagcgcccagctgaggatgatgtacccaggaaagccaaaagaaaaactaataaggggctggctcattacctcaaggagtataaagaggccatacatgatatgaatttcagcaatgaggacatgataagagaatttgacaatatggctaaggtgcaggatgagaagagacccttctaccctagaggtccaagggaattcaggggtggctgcagggccccacgaagggacattgaagacattccttatgtgtagtgtccctggcaggcatttaccaggccatgtgctttaacgttacggtaatactttactttaggcatccctcctgttgctagcagccttttgacctatctgcaatgcagtgttctcagtaggaaatgttcatctgttacatggaaaaaatgttgatggtgcattgtaaaattaaaaaacacaacttgcagaaccaaatatatggcatcagtacatttttgtaaaactacaaagatacttacctagtaatatagtatagaaaacaattctgaaagctgtgtccactaaaagattaacagtggttatctctgggtgattttttctgttcttttttgttcatctgtccatttttctcctaaaaacagatttctttagtcataaaaataataaaatataaagtattggaaaaaaaaaatat

SEQ ID NO: 432936 - DNA, 345 bp, Homo sapiens
gcttcttgttgcattagttctcctgtatgttccttcttccacaggaatgtatttgtgcatatgttctttgatcttctctgatagcatctcatttgatctggcctctgtccttcatcagcttttattttttttatttttattttctgcttttgttagataaggcttttaagatcatgaacctccagctttagcaactcatatatcagtctctcacatggccacaattctagacaaaaaccaaagacccagaggccagagcaaagtaggaccttctgaagattcactactggtgtatccttggaccttcacattttactttaggattaatttattgaattttactgt

SEQ ID NO: 432937 - DNA, 2008 bp, Homo sapiens
aaaatactagacaaagcagaaatgtacaatttctggtctgtgttttccaggaaattcatagagaagagaatagagtggatgatgtgacttgaagtttttgcagcttattttttcccccactgtcagggcagaggcccattttaatgaatgtttttgcatgatctgttcttatgttaaccacatattttttttcccaattccacacagcaggtgatttcccgtgtgacatattttcttcatagtccctaatatagtcatcctctacagagttggcgtgctgtgtgcactgtggattaggaacagagtggagctgtaaccagtctcttctctggccctttgcctttatgtcagcttgcacttttgcctcacttattcctagtccagctcccaactgcctgacttaatggaccagaacggagatttggatattaagatgcagagggggaggggaagggatggtagagatagacagctctcccctactaggttgggtcatttcccctaataactatagagagactgtgtttcaactctcttttcattgctgtttccagaagagtggagagtgtggtttcaggcaaggtattaatgatacaattccgtggtatacagctcctgtgacatttgaagtttcttttaaaggggtttttcttaatcaaagttttacatttggtagcataagtagttctttatgcttcacaggacattgtcttcagagtaatctctctgctaaaatggtacatgtgggtcacagattggtttatgccactgacttggttaagtttccaccccctccaatttgtgaaaaacagagcagtgacctagctgttgcatcatcatgactgccatgtaacctgtaattgctgctctccagtaattgtcttttcattttgatggtaggggccagactgaatgaataatgcattcttttttattcaatttatttcattcagtttattcttggcaatcaaacatcccataaactttgcttttattatcaattatgaatatgaattgtctggtttactaatgtagtcatttgttcatctttacttttagcagattagcaccataactaacttaaaactaagtttgttacctgctttttatactgtcacaaaggtttttgaaaaagctggggacactattttgtcttttagttttaaacttttttaaggcaaagcaagctccccaatccctgttctccaatatgtgtatgatgtgacttccatgtagatataaaaatgattgtgccctaaccaaacttcctcagattgtgcactgtttgtttaaaataatcacgtattttagtctgatgctgttgtattttttcattttatttaaaacactacttacttcttattctcttaacaaattttaaaaggtagtgatcttaaaaaaaaatcactggataactaggaaatatttttgttgttgttttgtttcttaaagagtacagaggccattgaagccttttgctcctcttaccgtgaaaatgaaatgttagccattgtatggctaggaaccaatgcacttggcagttaatggatctgctgttgctggagtgtgagcgtggacttgatgcagtgatgacaaatcattgcttagaattaatgttttcaaatgtgcaactctagtttttaaaacaaaatttggttctttacattcattatttcgtttttgtttccctttagtatttaatggtctttggagaaaaaataataaaacagagtgttatatatatattttttggtgcaagataagattttctgttttttgaaataagtctgtagcataaaggttaaactattttaagacaaaataaaatagagtgtatttaaaaaaaaggcacaagagaaaaaccagaaagaaaaaaatagggagcacaacaagaagatagaaaagacagaataaatcagaaaaaaaaagaggggggcgaacacggagagcaaaaagtgaagagacagaagaaaggggataaacaaagagggagaaaagggggaaacac

SEQ ID NO: 432938 - DNA, 1915 bp, Homo sapiens
tgtagctaagatggacatgatacctcaagtggctgttacctaaatggctgtaccataatggctgattacctaaatggctgttaaccacatattttttttcccaattccacacagcaggtgatttcccgtgtgacatattttcttcatagtccctaatatagtcatcctctacagagttggcgtgctgtgtgcactgtggattaggaacagagtggagctgtaaccagtctcttctctggccctttgcctttatgtcagcttgcacttttgcctcacttattcctagtccagctcccaactgcctgacttaatggaccagaacggagatttggatattaagatgcagagggggaggggaagggatggtagagatagacagctctcccctactaggttgggtcatttcccctaataactatagagagactgtgtttcaactctcttttcattgctgtttccagaagagtggagagtgtggtttcaggcaaggtattaatgatacaattccgtggtatacagctcctgtgacatttgaagtttcttttaaaggggtttttcttaatcaaagttttacatttggtagcataagtagttctttatgcttcacaggacattgtcttcagagtaatctctctgctaaaatggtacatgtgggtcacagattggtttatgccactgacttggttaagtttccaccccctccaatttgtgaaaaacagagcagtgacctagctgttgcatcatcatgactgccatgtaacctgtaattgctgctctccagtaattgtcttttcattttgatggtaggggccagactgaatgaataatgcattcttttttattcaatttatttcattcagtttattcttggcaatcaaacatcccataaactttgcttttattatcaattatgaatatgaattgtctggtttactaatgtagtcatttgttcatctttacttttagcagattagcaccataactaacttaaaactaagtttgttacctgctttttatactgtcacaaaggtttttgaaaaagctggggacactattttgtcttttagttttaaacttttttaaggcaaagcaagctccccaatccctgttctccaatatgtgtatgatgtgacttccatgtagatataaaaatgattgtgccctaaccaaacttcctcagattgtgcactgtttgtttaaaataatcacgtattttagtctgatgctgttgtattttttcattttatttaaaacactacttacttcttattctcttaacaaattttaaaaggtagtgatcttaaaaaaaaatcactggataactaggaaatatttttgttgttgttttgtttcttaaagagtacagaggccattgaagccttttgctcctcttaccgtgaaaatgaaatgttagccattgtatggctaggaaccaatgcacttggcagttaatggatctgctgttgctggagtgtgagcgtggacttgatgcagtgatgacaaatcattgcttagaattaatgttttcaaatgtgcaactctagtttttaaaacaaaatttggttctttacattcattatttcgtttttgtttccctttagtatttaatggtctttggagaaaaaataataaaacagagtgttatatatatattttttggtgcaagataagattttctgttttttgaaataagtctgtagcataaaggttaaactattttaagacaaaataaaatagagtgtatttaaaaaaaaggcacaagagaaaaaccagaaagaaaaaaatagggagcacaacaagaagatagaaaagacagaataaatcagaaaaaaaaagaggggggcgaacacggagagcaaaaagtgaagagacagaagaaaggggataaacaaagagggagaaaagggggaaacac

SEQ ID NO: 432939 - DNA, 502 bp, Homo sapiens
tgtaaagacaagtttattcctttacgcttcttgttgcattagttctcctgtatgttccttcttccacaggaatgtatttgtgcatatgttctttgatcttctctgatagcatctcatttgatctggcctctgtccttcatcagcttttattttttttatttttattttctgcttttgttagataaggcttttaagatcatgaacctccagctttagcaactcatatatcagtctctcacatggccacaattctagacaaaaaccaaagacccagaggccagagcaaagtaggaccttctgaagattcactactggtgtatccttggaccttcacattttactttaggattaatttattgaattttactgttacacatagtttttgacttgaattaaaatactagacaaagcagaaatgtacaatttctggtctgtgttttccaggaaattcatagagaagagaatagagtggatgatgtgacttgaagtttttgcagcttat

SEQ ID NO: 432940 - DNA, 1572 bp, Homo sapiens
cacggttgcccggcaacaacaagtcccgtcgggtggcagcggctggcggcaaaacctctcgagtgagcccctgcccgagtgccgcgggggagaggccgcgagcgggaccgagaagtgggctgggagcagaggtcgcggaggtggcgagcgaggccggggcccaggcggggaccggcaggggcccgggagtggcgggcacgccagggtcagggtgccgggcgagggagggggcccggggttggggaagggggcccggggagggaggtaaacagccctgcaggcctcggggcaccgttgctgggcggcgccggcggcatgtgcgagggcccgtcccgcatctcggggcccatccccccagacccgacgctctgtcctgacaactacaggcggccgacctcggctcaagggcgcctcgagggaaacgcgctgaagctggacttgctgacttccgaccgggccctggacaccaccgctccccgtggcccctgcatcggtcccggtgccggagagatcctggagcgcggccagcgcggcgtcggggacgtgctgttgcaactcgaggggatctccctaggtcctggggcctctctcaagaggaaggaccctaaggaccatgagaaggagaacctgaggcggatcagggagattcagaagcgcttcagagaacaggagcgcagccgggagcagggccagcccaggcccctgaaagctctgtggcgctcacccaagtacgacaaggtggagtcccgggtcaaggcccagctccaggagcctggccctgcctctgggacagagtctgcccacttcctgcgggcgcactcccgctgcggccctggcctcccaccaccccatgtatctagtccccagccaaccccaccaggtcccgaagctaaggagccaggcctgggggtggacttcattcgtcacaatgcacgagctgccaagagagccccccggaggcattcctgctcactgcaggtcctggcacaagtgctagagcagcagcggcaggcccaggagcactacaatgccacgcagaagggccatgtgccacattacttgttggagcgcagggacctgtggcggcgggaggccgaggcccgcaagcagagccagccggaccctgccatgcccccaggccacacgcgcatgcctgagaaccagcggctggaaacactgaccaagctgctccagagccagagccagctgctgcgtgagctggtactgctgcctgctggggcagactcactgagagcccagagccaccgtgctgagctggaccggaagctggtgcaggtagaggaggccatcaagatcttttctcggcccaaagtcttcgtgaagatggacgactgagcccctttgggggacagtggcaaggagctccatgctgaggatcgccacatggctgcaaaggacagggttggacccaatcccagagcagaggtctgaagacaggagcaggggggtggccagtgtccctagagcactcttcccagtcaccagtggctgcagaagggccaccctagccttttaactgctttgtcaaaattaaacattttgtacacagga

SEQ ID NO: 432941 - DNA, 2080 bp, Homo sapiens
cacggttgcccggcaacaacaagtcccgtcgggtggcagcggctggcggcaaaacctctcgagtgagcccctgcccgagtgccgcgggggagaggccgcgagcgggaccgagaagtgggctgggagcagaggtcgcggaggtggcgagcgaggccggggcccaggcggggaccggcaggggcccgggagtggcgggcacgccagggtcagggtgccgggcgagggagggggcccggggttggggaagggggcccggggagggaggtaaacagccctgcaggcctcggggcaccgttgctgggcggcgccggcggcatgtgcgagggcccgtcccgcatctcggggcccatccccccagacccgacgctctgtcctgacaactacaggcggccgacctcggctcaagggcgcctcgagggaaacgcgctgaagctggacttgctgacttccgaccgggccctggacaccaccgctccccgtggcccctgcatcggtcccggtgccggagagatcctggagcgcggccagcgcggcgtcggggacgtgctgttgcaactcgaggggatctccctaggtcctggggcctctctcaagaggaaggaccctaaggaccatgagaaggagaacctgaggcggatcagggagattcagaagcgcttcagagaacaggagcgcagccgggagcagggccagcccaggcccctgaaagctctgtggcgctcacccaagtacgacaaggtggagtcccgggtcaaggcccagctccaggagcctggccctgcctctgggacagagtctgcccacttcctgcgggcgcactcccgctgcggccctggcctcccaccaccccatgtatctagtccccagccaaccccaccaggtcccgaagctaaggagccaggcctgggggtggacttcattcgtcacaatgcacgagctgccaagagagccccccggaggcattcctgctcactgcaggtcctggcacaagtgctagagcagcagcggcaggcccaggagcactacaatgccacgcagaagggccatgtgccacattacttgttggagcgcagggacctgtggcggcgggaggccgaggcccgcaagcagagccagccggaccctgccatgcccccaggccacacgcgcatgcctgagaaccagcggctggaaacactgaccaagctgctccagagccagagccagctgctgcgtgagctggtactgctgcctgctggggcagactcactgagagcccagagccaccgtgctgagctggaccggaagctggtgcaggtagaggaggccatcaagatcttttctcggcccaaagtcttcgtgaagatggacgactgagcccctttgggggacagtggcaaggagctccatgctgaggatcgccacatggctgcaaaggacagggttggacccaatcccagagcagaggtctgaagacaggagcaggggggtggccagtgtccctagagcactcttcccagtcaccagtggctgcagaagggccaccctagccttttaactgctttgtcaaaattaaacattttgtacacaggaaaaaaaaaaaaaaaaaaaaaaaaaaaaccctcaaaccatttaaacccggaaaacccccccttataaaaggccctccgggcaccccttctacaaaatttccacacggtatcgtgggtctcccgtgtctgtgctcccccccccaattttcccacaccccccccttcataccgcgattgccgactcttctttggcggcccttaattccacggttgttgtgtgcgccaatgttccggcctgttcggggatccttgggtccaccccgccacagcagactcttgcgaaacggttccttccacggggcgaccattgtgctcttcgtgtggcgctggttcttctgggaagtgtccccccctcgtgcgtgtgttacgacacttgcggggcattctgcggcggcctataggacctcgcggtagggggccccgcatgtcttgttccggggaattccgggtcgtggacctccgatgacggctgtccccctggcgtccggacgttggttccgggttcgccg

SEQ ID NO: 432942 - DNA, 1321 bp, Homo sapiens
tgaggaggaggcgaagcagcttgctgaggagatgaacatcgccttctacaccagccggactgatgacatcttgctgcatcaagatgtggatctggtgtgcatcagcatcccccctccactcacccggcagatatccgtgaaggctctagctcaagggcgcctcgagggaaacgcgctgaagctggacttgctgacttccgaccgggccctggacaccaccgctccccgtggcccctgcatcggtcccggtgccggagagatcctggagcgcggccagcgcggcgtcggggacgtgctgttgcaactcgaggggatctccctaggtcctggggcctctctcaagaggaaggaccctaaggaccatgagaaggagaacctgaggcggatcagggagattcagaagcgcttcagagaacaggagcgcagccgggagcagggccagcccaggcccctgaaagctctgtggcgctcacccaagtacgacaaggtggagtcccgggtcaaggcccagctccaggagcctggccctgcctctgggacagagtctgcccacttcctgcgggcgcactcccgctgcggccctggcctcccaccaccccatgtatctagtccccagccaaccccaccaggtcccgaagctaaggagccaggcctgggggtggacttcattcgtcacaatgcacgagctgccaagagagccccccggaggcattcctgctcactgcaggtcctggcacaagtgctagagcagcagcggcaggcccaggagcactacaatgccacgcagaagggccatgtgccacattacttgttggagcgcagggacctgtggcggcgggaggccgaggcccgcaagcagagccagccggaccctgccatgcccccaggccacacgcgcatgcctgagaaccagcggctggaaacactgaccaagctgctccagagccagagccagctgctgcgtgagctggtactgctgcctgctggggcagactcactgagagcccagagccaccgtgctgagctggaccggaagctggtgcaggtagaggaggccatcaagatcttttctcggcccaaagtcttcgtgaagatggacgactgagcccctttgggggacagtggcaaggagctccatgctgaggatcgccacatggctgcaaaggacagggttggacccaatcccagagcagaggtctgaagacaggagcaggggggtggccagtgtccctagagcactcttcccagtcaccagtggctgcagaagggccaccctagccttttaactgctttgtcaaaattaaacattttgtacacagga

SEQ ID NO: 432943 - DNA, 1377 bp, Homo sapiens
cacggttgcccggcaacaacaagtcccgtcgggtggcagcggctggcggcaaaacctctcgagtgagcccctgcccgagtgccgcgggggagaggccgcgagcgggaccgagaagtgggctgggagcagaggtcgcggaggtggcgagcgaggccggggcccaggcggggaccggcaggggcccgggagtggcgggcacgccaggctcaagggcgcctcgagggaaacgcgctgaagctggacttgctgacttccgaccgggccctggacaccaccgctccccgtggcccctgcatcggtcccggtgccggagagatcctggagcgcggccagcgcggcgtcggggacgtgctgttgcaactcgaggggatctccctaggtcctggggcctctctcaagaggaaggaccctaaggaccatgagaaggagaacctgaggcggatcagggagattcagaagcgcttcagagaacaggagcgcagccgggagcagggccagcccaggcccctgaaagctctgtggcgctcacccaagtacgacaaggtggagtcccgggtcaaggcccagctccaggagcctggccctgcctctgggacagagtctgcccacttcctgcgggcgcactcccgctgcggccctggcctcccaccaccccatgtatctagtccccagccaaccccaccaggtcccgaagctaaggagccaggcctgggggtggacttcattcgtcacaatgcacgagctgccaagagagccccccggaggcattcctgctcactgcaggtcctggcacaagtgctagagcagcagcggcaggcccaggagcactacaatgccacgcagaagggccatgtgccacattacttgttggagcgcagggacctgtggcggcgggaggccgaggcccgcaagcagagccagccggaccctgccatgcccccaggccacacgcgcatgcctgagaaccagcggctggaaacactgaccaagctgctccagagccagagccagctgctgcgtgagctggtactgctgcctgctggggcagactcactgagagcccagagccaccgtgctgagctggaccggaagctggtgcaggtagaggaggccatcaagatcttttctcggcccaaagtcttcgtgaagatggacgactgagcccctttgggggacagtggcaaggagctccatgctgaggatcgccacatggctgcaaaggacagggttggacccaatcccagagcagaggtctgaagacaggagcaggggggtggccagtgtccctagagcactcttcccagtcaccagtggctgcagaagggccaccctagccttttaactgctttgtcaaaattaaacattttgtacacagga

SEQ ID NO: 432944 - DNA, 1399 bp, Homo sapiens
cacggttgcccggcaacaacaagtcccgtcgggtggcagcggctggcggcaaaacctctcgagtgagcccctgcccgagtgccgcgggggagaggccgcgagcgggaccgagaagtgggctgggagcagaggtcgcggaggtggcgagcgaggccggggcccaggcggggaccggcaggggcccgggagtggcgggcacgccagggtcagggtgccgggcgagggagggggcccggggttggggaagggggcccggggagggaggtaaacagccctgcaggcctcggggcaccgttgctgggcggcgccggcggcatgtgcgagggcccgtcccgcatctcggggcccatccccccagacccgacgctctgtcctgacaactacaggcggccgacctcggctcaagggcgcctcgagggaaacgcgctgaagctggacttgctgacttccgaccgggccctggacaccaccgctccccgtggcccctgcatcggtcccggtgccggagagatcctggagcgcggccagcgcggcgtcggggacgtgctgttgcaactcgaggggatctccctaggtcctggggcctctctcaagagagcctggccctgcctctgggacagagtctgcccacttcctgcgggcgcactcccgctgcggccctggcctcccaccaccccatgtatctagtccccagccaaccccaccaggtcccgaagctaaggagccaggcctgggggtggacttcattcgtcacaatgcacgagctgccaagagagccccccggaggcattcctgctcactgcaggtcctggcacaagtgctagagcagcagcggcaggcccaggagcactacaatgccacgcagaagggccatgtgccacattacttgttggagcgcagggacctgtggcggcgggaggccgaggcccgcaagcagagccagccggaccctgccatgcccccaggccacacgcgcatgcctgagaaccagcggctggaaacactgaccaagctgctccagagccagagccagctgctgcgtgagctggtactgctgcctgctggggcagactcactgagagcccagagccaccgtgctgagctggaccggaagctggtgcaggtagaggaggccatcaagatcttttctcggcccaaagtcttcgtgaagatggacgactgagcccctttgggggacagtggcaaggagctccatgctgaggatcgccacatggctgcaaaggacagggttggacccaatcccagagcagaggtctgaagacaggagcaggggggtggccagtgtccctagagcactcttcccagtcaccagtggctgcagaagggccaccctagccttttaactgctttgtcaaaattaaacattttgtacacagga

SEQ ID NO: 432945 - DNA, 1446 bp, Homo sapiens
cacggttgcccggcaacaacaagtcccgtcgggtggcagcggctggcggcaaaacctctcgagtgagcccctgcccgagtgccgcgggggagaggccgcgagcgggaccgagaagtgggctgggagcagaggtcgcggaggtggcgagcgaggccggggcccaggcggggaccggcaggggcccgggagtggcgggcacgccagggtcagggtgccgggcgagggagggggcccggggttggggaagggggcccggggagggaggtaaacagccctgcaggcctcggggcaccgttgctgggcggcgccggcggcatgtgcgagggcccgtcccgcatctcggggcccatccccccagacccgacgctctgtcctgacaactacaggcggccgacctcggctcaagggcgcctcgagggaaacgcgctgaagctggacttgctgacttccgaccgggccctggacaccaccgctccccgtggcccctgcatcggtcccggtgccggagagatcctggagcgcggccagcgcggcgtcggggacgtgctgttgcaactcgaggggatctccctaggtcctggggcctctctcaagaggaaggaccctaaggaccatgagaaggagaacctgaggcggatcagggagattcagaagcgcttcagagaacaggagcgcagccgggagcagggccagcccaggcccctgaaagctctgtggcgctcacccaagtacgacaaggtggagtcccgggtcaaggcccagctccaggagccaggcctgggggtggacttcattcgtcacaatgcacgagctgccaagagagccccccggaggcattcctgctcactgcaggtcctggcacaagtgctagagcagcagcggcaggcccaggagcactacaatgccacgcagaagggccatgtgccacattacttgttggagcgcagggacctgtggcggcgggaggccgaggcccgcaagcagagccagccggaccctgccatgcccccaggccacacgcgcatgcctgagaaccagcggctggaaacactgaccaagctgctccagagccagagccagctgctgcgtgagctggtactgctgcctgctggggcagactcactgagagcccagagccaccgtgctgagctggaccggaagctggtgcaggtagaggaggccatcaagatcttttctcggcccaaagtcttcgtgaagatggacgactgagcccctttgggggacagtggcaaggagctccatgctgaggatcgccacatggctgcaaaggacagggttggacccaatcccagagcagaggtctgaagacaggagcaggggggtggccagtgtccctagagcactcttcccagtcaccagtggctgcagaagggccaccctagccttttaactgctttgtcaaaattaaacattttgtacacagga

SEQ ID NO: 432946 - DNA, 1017 bp, Homo sapiens
cacggttgcccggcaacaacaagtcccgtcgggtggcagcggctggcggcaaaacctctcgagtgagcccctgcccgagtgccgcgggggagaggccgcgagcgggaccgagaagtgggctgggagcagaggtcgcggaggtggcgagcgaggccggggcccaggcggggaccggcaggggcccgggagtggcgggcacgccagggtcagggtgccgggcgagggagggggcccggggttggggaagggggcccggggagggaggtaaacagccctgcaggcctcggggcaccgttgctgggcggcgccggcggcatgtgcgagggcccgtcccgcatctcggggcccatccccccagacccgacgctctgtcctgacaactacaggcggccgacctcggctcaagggcgcctcgagggaaacgcgctgaagctggacttgctgacttccgaccgggcccaggagcactacaatgccacgcagaagggccatgtgccacattacttgttggagcgcagggacctgtggcggcgggaggccgaggcccgcaagcagagccagccggaccctgccatgcccccaggccacacgcgcatgcctgagaaccagcggctggaaacactgaccaagctgctccagagccagagccagctgctgcgtgagctggtactgctgcctgctggggcagactcactgagagcccagagccaccgtgctgagctggaccggaagctggtgcaggtagaggaggccatcaagatcttttctcggcccaaagtcttcgtgaagatggacgactgagcccctttgggggacagtggcaaggagctccatgctgaggatcgccacatggctgcaaaggacagggttggacccaatcccagagcagaggtctgaagacaggagcaggggggtggccagtgtccctagagcactcttcccagtcaccagtggctgcagaagggccaccctagccttttaactgctttgtcaaaattaaacattttgtacacagga

SEQ ID NO: 432947 - DNA, 1381 bp, Homo sapiens
cacggttgcccggcaacaacaagtcccgtcgggtggcagcggctggcggcaaaacctctcgagtgagcccctgcccgagtgccgcgggggagaggccgcgagcgggaccgagaagtgggctgggagcagaggtcgcggaggtggcgagcgaggccggggcccaggcggggaccggcaggggcccgggagtggcgggcacgccagggtcagggtgccgggcgagggagggggcccggggttggggaagggggcccggggagggaggtaaacagccctgcaggcctcggggcaccgttgctgggcggcgccggcggcatgtgcgagggcccgtcccgcatctcggggcccatccccccagacccgacgctctgtcctgacaactacaggcggccgacctcggctcaagggcgcctcgagggaaacgcgctgaagctggacttgctgacttccgaccgggccctggacaccaccgctccccgtggcccctgcatcggtcccggtgccggagagatcctggagcgcggccagcgcggcgtcggggacgtgctgttgcaactcgaggggatctccctaggtcctggggcctctctcaagaggaaggaccctaaggaccatgagaaggagaacctgaggcggatcagggagattcagaagcgcttcagagaacaggagcgcagccgggagcagggccagcccaggcccctgaaagctctgtggcgcaccaccccatgtatctagtccccagccaaccccaccaggtcccgaagctaaggagccaggcctgggggtggacttcattcgtcacaatgcacgagctgccaagagagccccccggaggcattcctgctcactgcaggtcctggcacaagtgctagagcagcagcggcaggcccaggagcactacaatgcccgcaagcagagccagccggaccctgccatgcccccaggccacacgcgcatgcctgagaaccagcggctggaaacactgaccaagctgctccagagccagagccagctgctgcgtgagctggtactgctgcctgctggggcagactcactgagagcccagagccaccgtgctgagctggaccggaagctggtgcaggtagaggaggccatcaagatcttttctcggcccaaagtcttcgtgaagatggacgactgagcccctttgggggacagtggcaaggagctccatgctgaggatcgccacatggctgcaaaggacagggttggacccaatcccagagcagaggtctgaagacaggagcaggggggtggccagtgtccctagagcactcttcccagtcaccagtggctgcagaagggccaccctagccttttaactgctttgtcaaaattaaacattttgtacacagga

SEQ ID NO: 432948 - DNA, 836 bp, Homo sapiens
  misc_feature (18)..(18): n is a, c, g, or t
  misc_feature (79)..(79): n is a, c, g, or t
  misc_feature (83)..(83): n is a, c, g, or t
  misc_feature (127)..(127): n is a, c, g, or t
  misc_feature (140)..(140): n is a, c, g, or t
actaccacgacacactgnacacagccactgggacagacctacaacacaaactcatactcacagagacgacacctccccncaanagaccactcgaacactccacaccacccaatagtaaaatagaccnaagaaaaaccccnccgggtcccgaagctaaggagccaggcctgggggtggacttcattcgtcacaatgcacgagctgccaagagagccccccggaggcattcctgctcactgcaggtcctggcacaagtgctagagcagcagcggcaggcccaggagcactacaatgccacgcagaagggccatgtgccacattacttgttggagcgcagggacctgtggcggcgggaggccgaggcccgcaagcagagccagccggaccctgccatgcccccaggccacacgcgcatgcctgagaaccagcggctggaaacactgaccaagctgctccagagccagagccagctgctgcgtgagctggtactgctgcctgctggggcagactcactgagagcccagagccaccgtgctgagctggaccggaagctggtgcaggtagaggaggccatcaagatcttttctcggcccaaagtcttcgtgaagatggacgactgagcccctttgggggacagtggcaaggagctccatgctgaggatcgccacatggctgcaaaggacagggttggacccaatcccagagcagaggtctgaagacaggagcaggggggtggccagtgtccctagagcactcttcccagtcaccagtggctgcagaagggccaccctagccttttaactgctttgtcaaaattaaacattttgtacacagga

SEQ ID NO: 432949 - DNA, 243 bp, Homo sapiens
gtcagggtgccgggcgagggagggggcccggggttggggaagggggcccggggagggaggtaaacagccctgcaggcctcggggcaccgttgctgggcggcgccggcggcatgtgcgagggcccgtcccgcatctcggggcccatccccccagacccgacgctctgtcctgacaactacaggcggccgacctcgggtgagtccgggggcttggcggtggtgcgaggctcaggggtcggccctg

SEQ ID NO: 432950 - DNA, 2468 bp, Homo sapiens
ccctcctccctgcactgcagccaaccggcttgtgcgcgtcccaggagcgcgctataaaacctgtgctgggcgtgatcggcaagcaccggaccaggggaaggcgagcagtgccaatctacagcgaagaaagtctcgtttggtaaaagcgagaggggaaagcctgagcatgcagagtgtgcagagcacgagcttttgtctccgaaagcagtgcctttgcctgaccttcctgcttctccatctcctgggacaggtcgctgcgactcagcgctgccctccccagtgcccgggccggtgccctgcgacgccgccgacctgcgcccccggggtgcgcgcggtgctggacggctgctcatgctgtctggtgtgtgcccgccagcgtggcgagagctgctcagatctggagccatgcgacgagagcagtggcctctactgtgatcgcagcgcggaccccagcaaccagactggcatctgcacggcggtagagggagataactgtgtgttcgatggggtcatctaccgcagtggagagaaatttcagccaagctgcaaattccagtgcacctgcagagatgggcagattggctgtgtgccccgctgtcagctggatgtgctactgcctgagcctaactgcccagctccaagaaaagttgaggtgcctggagagtgctgtgaaaagtggatctgtggcccagatgaggaggattcactgggaggccttacccttgcagcttacaggccagaagccaccctaggagtagaagtctctgactcaagtgtcaactgcattgaacagaccacagagtggacagcatgctccaagagctgtggtatggggttctccacccgggtcaccaataggaaccgtcaatgtgagatgctgaaacagactcggctctgcatggtgcggccctgtgaacaagagccagagcagccaacagataagaaaggaaaaaagtgtctccgcaccaagaagtcactcaaagccatccacctgcagttcaagaactgcaccagcctgcacacctacaagcccaggttctgtggggtctgcagtgatggccgctgctgcactccccacaataccaaaaccatccaggcagagtttcagtgctccccagggcaaatagtcaagaagccagtgatggtcattgggacctgcacctgtcacaccaactgtcctaagaacaatgaggccttcctccaggagctggagctgaagactaccagagggaaaatgtaacctgtcactcaagaagcacacctacagagcacctgtagctgctgcgccacccaccatcaaaggaatataagaaaagtaatgaagaatcacgatttcatccttgaatcctatgtattttcctaatgtgatcatatgaggacctttatatctgtcttttatttaacaaaaaatgtaattaactgtaaacttggaatcaaggtaagctcaggatatggcttaggaatgacttactttcctgtggttttattacaaatgcaaatttctataaatttaagaaaacaagtatataatttactttgtagactgtttcacattgcactcatcatattttgttgtgcactagtgcaattccaagaaaatatcactgtaatgagtcagtgaagtctagaatcatacttaacatttcattgtacaagtattacaaccatatattgaggttcattgggaagattctctattggctccctttttgggtaaaccagctctgaacttccaagctccaaatccaaggaaacatgcagctcttcaacatgacatccagagatgactattacttttctgtttagttttacactaggaaacgtgttgtatctacagtaatgaaatgtttactaagtggactggtgtcataaactttctccatttaagacacattgactcctttccaatagaaagaaactaaacagaaaactcccaatacaaagatgactggtccctcatagccctcagacatttatatattggaagctgctgaggcccccaagttttttaattaagcagaaacagcatattagcagggattctctcatctaactgatgagtaaactgaggcccaaagcacttgcttacatcctctgatagctgtttcaaatgtgcattttgtggaattttgagaaaaatagagcaaaatcaacatgactggtggtgagagaccacacattttatgagagtttggaattattgtagacatgcccaaaacttatccttgggccataattatgaaaactcatgatcaagatatatgtgtatacatacatgtatctggtttgtcaggctacaaggtaggctgcaaaattaaatctagacattcttttaatgccaccacacgtgttccgcttctctcttttaaagtatttataaaaatataaattgtacattttgtaaaatattatgtttgatttctctacttgtcatatcactaaataaacacgattttattgctgcgtga

SEQ ID NO: 432951 - DNA, 2546 bp, Homo sapiens
ccctcctccctgcactgcagccaaccggcttgtgcgcgtcccaggagcgcgctataaaacctgtgctgggcgtgatcggcaagcaccggaccaggggaaggcgagcagtgccaatctacagcgaagaaagtctcgtttggtaaaagcgagaggggaaagcctgagcatgcagagtgtgcagagcacgagcttttgtctccgaaagcagtgcctttgcctgaccttcctgcttctccatctcctgggacaggtcgctgcgactcagcgctgccctccccagtgcccgggccggtgccctgcgacgccgccgacctgcgcccccggggtgcgcgcggtgctggacggctgctcatgctgtctggtgtgtgcccgccagcgtggcgagagctgctcagatctggagccatgcgacgagagcagtggcctctactgtgatcgcagcgcggaccccagcaaccagactggcatctgcacggcggtagagggagataactgtgtgttcgatggggtcatctaccgcagtggagagaaatttcagccaagctgcaaattccagtgcacctgcagagatgggcagattggctgtgtgccccgctgtcagctggatgtgctactgcctgagcctaactgcccagctccaagaaaagttgaggtgcctggagagtgctgtgaaaagtggatctgtggcccagatgaggaggattcactgggaggccttacccttgcagcttacaggccagaagccaccctaggagtagaagtctctgactcaagtgtcaactgcattgaacagaccacagagtggacagcatgctccaagagctgtggtatggggttctccacccgggtcaccaataggaaccgtcaatgtgagatgctgaaacagactcggctctgcatggtgcggccctgtgaacaagagccagagcagccaacagataagaaaggaaaaaagtgtctccgcaccaagaagtcactcaaagccatccacctgcagttcaagaactgcaccagcctgcacacctacaagcccaggttctgtggggtctgcagtgatggccgctgctgcactccccacaataccaaaaccatccaggcagagtttcagtgctccccagggcaaatagtcaagaagccagtgatggtcattgggacctgcacctgtcacaccaactgtcctaagaacaatgaggccttcctccaggagctggagctgaagactaccagagggaaaatgtaacctgtcactcaagaagcacacctacagagcacctgtagctgctgcgccacccaccatcaaaggaatataagaaaagtaatgaagaatcacgatttcatccttgaatcctatgtattttcctaatgtgatcatatgaggacctttatatctgtcttttatttaacaaaaaatgtaattaactgtaaacttggaatcaaggtaagctcaggatatggcttaggaatgacttactttcctgtggttttattacaaatgcaaatttctataaatttaagaaaacaagtatataatttactttgtagactgtttcacattgcactcatcatattttgttgtgcactagtgcaattccaagaaaatatcactgtaatgagtcagtgaagtctagaatcatacttaacatttcattgtacaagtattacaaccatatattgaggttcattgggaagattctctattggctccctttttgggtaaaccagctctgaacttccaagctccaaatccaaggaaacatgcagctcttcaacatgacatccagagatgactattacttttctgtttagttttacactaggaaacgtgttgtatctacagtaatgaaatgtttactaagtggactggtgtcataaactttctccatttaagacacattgactcctttccaatagaaagaaactaaacagaaaactcccaatacaaagatgactggtccctcatagccctcagacatttatatattggaagctgctgaggcccccaagttttttaattaagcagaaacagcatattagcagggattctctcatctaactgatgagtaaactgaggcccaaagcacttgcttacatcctctgatagctgtttcaaatgtgcattttgtggaattttgagaaaaatagagcaaaatcaacatgactggtggtgagagaccacacattttatgagagtttggaattattgtagacatgcccaaaacttatccttgggccataattatgaaaactcatgatcaagatatatgtgtatacatacatgtatctggtttgtcaggctacaaggtaggctgcaaaattaaatctagacattcttttaatgccaccacacgtgttccgcttctctcttttaaagtatttataaaaatataaattgtacattttgtaaaatattatgtttgatttctctacttgtcatatcactaaataaacacgattttattgctgcgtgactctgtattactttggtgcataaaagttgaacattgttgtttactgaaaataaaattaaaatttatgaattaaatgag

SEQ ID NO: 432952 - DNA, 2811 bp, Homo sapiens
ccctcctccctgcactgcagccaaccggcttgtgcgcgtcccaggagcgcgctataaaacctgtgctgggcgtgatcggcaagcaccggaccaggggaaggcgagcagtgccaatctacagcgaagaaagtctcgtttggtaaaagcgagaggggaaagcctgagcatgcagagtgtgcagagcacgagcttttgtctccgaaagcagtgcctttgcctgaccttcctgcttctccatctcctgggacaggtcgctgcgactcagcgctgccctccccagtgcccgggccggtgccctgcgacgccgccgacctgcgcccccggggtgcgcgcggtgctggacggctgctcatgctgtctggtgtgtgcccgccagcgtggcgagagctgctcagatctggagccatgcgacgagagcagtggcctctactgtgatcgcagcgcggaccccagcaaccagactggcatctgcacggcggtagagggagataactgtgtgttcgatggggtcatctaccgcagtggagagaaatttcagccaagctgcaaattccagtgcacctgcagagatgggcagattggctgtgtgccccgctgtcagctggatgtgctactgcctgagcctaactgcccagctccaagaaaagttgaggtgcctggagagtgctgtgaaaagtggatctgtggcccagatgaggaggattcactgggaggccttacccttgcagcttacaggccagaagccaccctaggagtagaagtctctgactcaagtgtcaactgcattgaacagaccacagagtggacagcatgctccaagagctgtggtatggggttctccacccgggtcaccaataggaaccgtcaatgtgagatgctgaaacagactcggctctgcatggtgcggccctgtgaacaagagccagagcagccaacagataagaaaggaaaaaagtgtctccgcaccaagaagtcactcaaagccatccacctgcagttcaagaactgcaccagcctgcacacctacaagcccaggttctgtggggtctgcagtgatggccgctgctgcactccccacaataccaaaaccatccaggcagagtttcagtgctccccagggcaaatagtcaagaagccagtgatggtcattgggacctgcacctgtcacaccaactgtcctaagaacaatgaggccttcctccaggagctggagctgaagactaccagagggaaaatgtaacctgtcactcaagaagcacacctacagagcacctgtagctgctgcgccacccaccatcaaaggaatataagaaaagtaatgaagaatcacgatttcatccttgaatcctatgtattttcctaatgtgatcatatgaggacctttatatctgtcttttatttaacaaaaaatgtaattaactgtaaacttggaatcaaggtaagctcaggatatggcttaggaatgacttactttcctgtggttttattacaaatgcaaatttctataaatttaagaaaacaagtatataatttactttgtagactgtttcacattgcactcatcatattttgttgtgcactagtgcaattccaagaaaatatcactgtaatgagtcagtgaagtctagaatcatacttaacatttcattgtacaagtattacaaccatatattgaggttcattgggaagattctctattggctccctttttgggtaaaccagctctgaacttccaagctccaaatccaaggaaacatgcagctcttcaacatgacatccagagatgactattacttttctgtttagttttacactaggaaacgtgttgtatctacagtaatgaaatgtttactaagtggactggtgtcataaactttctccatttaagacacattgactcctttccaatagaaagaaactaaacagaaaactcccaatacaaagatgactggtccctcatagccctcagacatttatatattggaagctgctgaggcccccaagttttttaattaagcagaaacagcatattagcagggattctctcatctaactgatgagtaaactgaggcccaaagcacttgcttacatcctctgatagctgtttcaaatgtgcattttgtggaattttgagaaaaatagagcaaaatcaacatgactggtggtgagagaccacacattttatgagagtttggaattattgtagacatgcccaaaacttatccttgggccataattatgaaaactcatgatcaagatatatgtgtatacatacatgtatctggtttgtcaggctacaaggtaggctgcaaaattaaatctagacattcttttaatgccaccacacgtgttccgcttctctcttttaaagtatttataaaaatataaattgtacattttgtaaaatattatgtttgatttctctacttgtcatatcactaaataaacacgattttattgctgcgtgaaaaaaaaacaaaaaacaaaaaaaaaaaaaaaacacaaaaaaaaaaaaaaaaaaacaaaaaactaccgaccgaacacccgaacaattagcctggagtagctgataatcaaaaacggagcaagccggtcgagcaatgtctaactggaacgcaactagctacaacagacgtgccctacgacaactggagcaaaaaattacgttcgtaggcccatacctatcggagagaggaagtgtaaaaacatgagcaggagtggcgatagcagtgtggtgaagaacagacacaagcgtaggagttaatacacgagtacgagtaatatgaatattgagcacacttcgagtactac

SEQ ID NO: 432953 - DNA, 2121 bp, Homo sapiens
ccctcctccctgcactgcagccaaccggcttgtgcgcgtcccaggagcgcgctataaaacctgtgctgggcgtgatcggcaagcaccggaccaggggaaggcgagcagtgccaatctacagcgaagaaagtctcgtttggtaaaagcgagaggggaaagcctgagcatgcagagtgtgcagagcacgagcttttgtctccgaaagcagtgcctttgcctgaccttcctgcttctccatctcctgggacaggtcgctgcgactcagcgctgccctccccagtgcccgggccggtgccctgcgacgccgccgacctgcgcccccggggtgcgcgcggtgctggacggctgctcatgctgtctggtgtgtgcccgccagcgtggcgagagctgctcagatctggagccatgcgacgagagcagtggcctctactgtgatcgcagcgcggaccccagcaaccagactggcatctgcacggcggtagagggagataactgtgtgttcgatggggtcatctaccgcagtggagagaaatttcagccaagctgcaaattccagtgcacctgcagagatgggcagattggctgtgtgccccgctgtcagctggatgtgctactgcctgagcctaactgcccagctccaagaaaagttgaggtgcctggagagtgctgtgaaaagtggatctgtggcccagatgaggaggattcactgggaggccttacccttgcagcttacaggccagaagccaccctaggagtagaagtctctgactcaagtgtcaactgcattgaacagaccacagagtggacagcatgctccaagagctgtggtatggggttctccacccgggtcaccaataggaaccgtcaatgtgagatgctgaaacagactcggctctgcatggtgcggccctgtgaacaagagccagagcagccaacagataagaaaggaaaaaagtgtctccgcaccaagaagtcactcaaagccatccacctgcagttcaagaactgcaccagcctgcacacctacaagcccaggttctgtggggtctgcagtgatggccgctgctgcactccccacaataccaaaaccatccaggcagagtttcagtgctccccagggcaaatagtcaagaagccagtgatggtcattgggacctgcacctgtcacaccaactgtcctaagaacaatgaggccttcctccaggagctggagctgaagactaccagagggaaaatgtaacctgtcactcaagaagcacacctacagagcacctgtagctgctgcgccacccaccatcaaaggaatataagaaaagtaatgaagaatcacgatttcatccttgaatcctatgtattttcctaatgtgatcatatgaggacctttatatctgtcttttatttaacaaaaaatgtaattaactgtaaacttggaatcaaggtaagctcaggatatggcttaggaatgacttactttcctgtggttttattacaaatgcaaatttctataaatttaagaaaacaagtatataatttactttgtagactgtttcacattgcactcatcatattttgttgtgcactagtgcaattccaagaaaatatcactgtaatgagtcagtgaagtctagaatcatacttaacatttcattgtacaagtattacaaccatatattgaggttcattgggaagattctctattggctccctttttgggtaaaccagctctgaacttccaagctccaaatccaaggaaacatgcagctcttcaacatgacatccagagatgactattacttttctgtttagttttacactaggaaacgtgttgtatctacagtaatgaaatgtttactaagtggactggtgtcataaactttctccatttaagacacattgactcctttccaatagaaagaaactaaacagaaaactcccaatacaaagatgactggtccctcatagccctcagacatttatatattggaagctgctgaggcccccaagttttttaattaagcagaaacagcatattagcagggattctctcatctaactgatgagtaaactgaggcccaaagctatatctttatctctcagtgataacccgactcacaggtatat

SEQ ID NO: 432954 - DNA, 2247 bp, Homo sapiens
ccctcctccctgcactgcagccaaccggcttgtgcgcgtcccaggagcgcgctataaaacctgtgctgggcgtgatcggcaagcaccggaccaggggaaggcgagcagtgccaatctacagcgaagaaagtctcgtttggtaaaagcgagaggggaaagcctgagcatgcagagtgtgcagagcacgagcttttgtctccgaaagcagtgcctttgcctgaccttcctgcttctccatctcctgggacaggtcgctgcgactcagcgctgccctccccagtgcccgggccggtgccctgcgacgccgccgacctgcgcccccggggtgcgcgcggtgctggacggctgctcatgctgtctggtgtgtgccccgctgtcagctggatgtgctactgcctgagcctaactgcccagctccaagaaaagttgaggtgcctggagagtgctgtgaaaagtggatctgtggcccagatgaggaggattcactgggaggccttacccttgcagcttacaggccagaagccaccctaggagtagaagtctctgactcaagtgtcaactgcattgaacagaccacagagtggacagcatgctccaagagctgtggtatggggttctccacccgggtcaccaataggaaccgtcaatgtgagatgctgaaacagactcggctctgcatggtgcggccctgtgaacaagagccagagcagccaacagataagaaaggaaaaaagtgtctccgcaccaagaagtcactcaaagccatccacctgcagttcaagaactgcaccagcctgcacacctacaagcccaggttctgtggggtctgcagtgatggccgctgctgcactccccacaataccaaaaccatccaggcagagtttcagtgctccccagggcaaatagtcaagaagccagtgatggtcattgggacctgcacctgtcacaccaactgtcctaagaacaatgaggccttcctccaggagctggagctgaagactaccagagggaaaatgtaacctgtcactcaagaagcacacctacagagcacctgtagctgctgcgccacccaccatcaaaggaatataagaaaagtaatgaagaatcacgatttcatccttgaatcctatgtattttcctaatgtgatcatatgaggacctttatatctgtcttttatttaacaaaaaatgtaattaactgtaaacttggaatcaaggtaagctcaggatatggcttaggaatgacttactttcctgtggttttattacaaatgcaaatttctataaatttaagaaaacaagtatataatttactttgtagactgtttcacattgcactcatcatattttgttgtgcactagtgcaattccaagaaaatatcactgtaatgagtcagtgaagtctagaatcatacttaacatttcattgtacaagtattacaaccatatattgaggttcattgggaagattctctattggctccctttttgggtaaaccagctctgaacttccaagctccaaatccaaggaaacatgcagctcttcaacatgacatccagagatgactattacttttctgtttagttttacactaggaaacgtgttgtatctacagtaatgaaatgtttactaagtggactggtgtcataaactttctccatttaagacacattgactcctttccaatagaaagaaactaaacagaaaactcccaatacaaagatgactggtccctcatagccctcagacatttatatattggaagctgctgaggcccccaagttttttaattaagcagaaacagcatattagcagggattctctcatctaactgatgagtaaactgaggcccaaagcacttgcttacatcctctgatagctgtttcaaatgtgcattttgtggaattttgagaaaaatagagcaaaatcaacatgactggtggtgagagaccacacattttatgagagtttggaattattgtagacatgcccaaaacttatccttgggccataattatgaaaactcatgatcaagatatatgtgtatacatacatgtatctggtttgtcaggctacaaggtaggctgcaaaattaaatctagacattcttttaatgccaccacacgtgttccgcttctctcttttaaagtatttataaaaatataaattgtacattttgtaaaatattatgtttgatttctctacttgtcatatcactaaataaacacgattttattgctgcgtga

SEQ ID NO: 432955 - DNA, 1644 bp, Homo sapiens
ccctcctccctgcactgcagccaaccggcttgtgcgcgtcccaggagcgcgctataaaacctgtgctgggcgtgatcggcaagcaccggaccaggggaaggcgagcagtgccaatctacagcgaagaaagtctcgtttggtaaaagcgagaggggaaagccatccacctgcagttcaagaactgcaccagcctgcacacctacaagcccaggttctgtggggtctgcagtgatggccgctgctgcactccccacaataccaaaaccatccaggcagagtttcagtgctccccagggcaaatagtcaagaagccagtgatggtcattgggacctgcacctgtcacaccaactgtcctaagaacaatgaggccttcctccaggagctggagctgaagactaccagagggaaaatgtaacctgtcactcaagaagcacacctacagagcacctgtagctgctgcgccacccaccatcaaaggaatataagaaaagtaatgaagaatcacgatttcatccttgaatcctatgtattttcctaatgtgatcatatgaggacctttatatctgtcttttatttaacaaaaaatgtaattaactgtaaacttggaatcaaggtaagctcaggatatggcttaggaatgacttactttcctgtggttttattacaaatgcaaatttctataaatttaagaaaacaagtatataatttactttgtagactgtttcacattgcactcatcatattttgttgtgcactagtgcaattccaagaaaatatcactgtaatgagtcagtgaagtctagaatcatacttaacatttcattgtacaagtattacaaccatatattgaggttcattgggaagattctctattggctccctttttgggtaaaccagctctgaacttccaagctccaaatccaaggaaacatgcagctcttcaacatgacatccagagatgactattacttttctgtttagttttacactaggaaacgtgttgtatctacagtaatgaaatgtttactaagtggactggtgtcataaactttctccatttaagacacattgactcctttccaatagaaagaaactaaacagaaaactcccaatacaaagatgactggtccctcatagccctcagacatttatatattggaagctgctgaggcccccaagttttttaattaagcagaaacagcatattagcagggattctctcatctaactgatgagtaaactgaggcccaaagcacttgcttacatcctctgatagctgtttcaaatgtgcattttgtggaattttgagaaaaatagagcaaaatcaacatgactggtggtgagagaccacacattttatgagagtttggaattattgtagacatgcccaaaacttatccttgggccataattatgaaaactcatgatcaagatatatgtgtatacatacatgtatctggtttgtcaggctacaaggtaggctgcaaaattaaatctagacattcttttaatgccaccacacgtgttccgcttctctcttttaaagtatttataaaaatataaattgtacattttgtaaaatattatgtttgatttctctacttgtcatatcactaaataaacacgattttattgctgcgtga

SEQ ID NO: 432956 - DNA, 2091 bp, Homo sapiens
ccctcctccctgcactgcagccaaccggcttgtgcgcgtcccaggagcgcgctataaaacctgtgctgggcgtgatcggcaagcaccggaccaggggaaggcgagcagtgccaatctacagcgaagaaagtctcgtttggtaaaagcgagaggggaaagcctgagcatgcagagtgtgcagagcacgagcttttgtctccgaaagcagtgcctttgcctgaccttcctgcttctccatctcctgggacaggtcgctgcgactcagcgctgccctccccagtgcccgggccggtgccctgcgacgccgccgacctgcgcccccggggtgcgcgcggtgctggacggctgctcatgctgtctggtgtgtgcccgccagcgtggcgagagctgctcagatctggagccatgcgacgagagcagtggcctctactgtgatcgcagcgcggaccccagcaaccagactggcatctgcacggcggtagagggagataactgtgtgttcgatggggtcatctaccgcagtggagagaaatttcagccaagctgcaaattccagtgcacctgcagagatgggcagattggctgtgtgccccgctgtcagctggatgtgctactgcctgagcctaactgcccagctccaagaaaagttgaggtgcctggagagtgctgtgaaaagtggatctgtggcccagatgaggaggattcactgggaggccttacccttgcagcttacaggccagaagccaccctaggagtagaagtctctgactcaagtgtcaactgcattgaacagaccacagagtggacagcatgctccaagagctgtggtatggggttctccacccgggtcaccaataggaaccgtcaatgtgagatgctgaaacagactcggctctgcatggtgcggccctgtgaacaagagccagagcagccaacagataagaaaggaaaaaagtgtctccgcaccaagaagtcactcaaagccatccacctgcagttcaagaactgcaccagcctgcacacctacaagcccaggttctgtggggtctgcagtgatggccgctgctgcactccccacaataccaaaaccatccaggcagagtttcagtgctccccagggcaaatagtcaagaagccagtgatggtcattgggacctgcacctgtcacaccaactgtcctaagaacaatgaggccttcctccaggagctggagctgaagactaccagagggaaaatgtaacctgtcactcaagaagcacacctacagagcacctgtagctgctgcgccacccaccatcaaaggaatataagaaaagtaatgaagaatcacgatttcatccttgaatcctatgtattttcctaatgtgatcatatgaggacctttatatctgtcttttatttaacaaaaaatgtaattaactgtaaacttggaatcaaggtaagctcaggatatggcttaggaatgacttactttcctgtggttttattacaaatgcaaatttctataaatttaagaaaacaagtatataatttactttgtagactgtttcacattgcactcatcatattttgttgtgcactagtgcaattccaagaaaatatcactgtaatgagtcagtgaagtacttgcttacatcctctgatagctgtttcaaatgtgcattttgtggaattttgagaaaaatagagcaaaatcaacatgactggtggtgagagaccacacattttatgagagtttggaattattgtagacatgcccaaaacttatccttgggccataattatgaaaactcatgatcaagatatatgtgtatacatacatgtatctggtttgtcaggctacaaggtaggctgcaaaattaaatctagacattcttttaatgccaccacacgtgttccgcttctctcttttaaagtatttataaaaatataaattgtacattttgtaaaatattatgtttgatttctctacttgtcatatcactaaataaacacgattttattgctgcgtgactctgtattactttggtgcataaaagttgaacattgttgtttactgaaaataaaattaaaatttatgaattaaatgag

SEQ ID NO: 432957 - DNA, 2486 bp, Homo sapiens
atcgcgggtccccgcgcgtcctgcagcacttcccgcgccgcgcccccagcccagtgcgccggctctgtgccggggtgcccgggcggtcgggagaatgagccgcatctaccacgacggcgcgctccggaacaaggcggtgcagagcgtccggctgccaggggcctgggaccccgccgcccaccaggggggaaatggtgtcctgctggagggagaactgatcgatgtatctcggcacagcatcttggacactcatggcaggaaggagcgctactacgtgctgtatatccggcccagtcacatccatcgccgtaaattcgacgccaagggaaatgaaatcgagcccaacttcagcgccaccaggaaggtgaacacgggcttcctcatgtcgtcctacaaggtggaagccaagggggacactgacaggctcacgcccgaggcgctgaaggggctggtcaacaagccagagctgctcgcgctgacagagagcctcacccccgaccacacagtggcgttctggatgcccgagtcagagatggaggtgatggaactcgagctgggggccggggtacggctgaagactcggggcgatggtcccttcctggattcattggccaaacttgaggctggaacagtgaccaagtgtaatttcactggtgatggaaagacaggggcatcctggacagacaacatcatggcccaaaagtgttcgaagggggctgcagcggagatccgagagcagggggatggggcagaggacgaggagtggccagaagaaattcaacagcagattgttcgagagactttccatctagtcctcaagcgggatgacaacatctgtaacttcttggagggtggaagtttgattggtggctctgactacaaactgatctaccggcactatgctaccctctactttgtattttgtgtggattcctcagagagtgaacttggaatcttggacctcatccaggtttttgtggaaactctggataagtgtttcgaaaatgtgtgtgaattggatttgatcttccatatggataaggtgcactacatcctccaggaggtggtgatgggtgggatggtgttggaaacaaacatgaatgaaatcgtggctcagattgaggctcaaaacaggctggagaaatccgagggtggcctttcagcagcccctgcgcgggctgtgtctgctgtgaaaaacatcaacctgccagagattcctcggaacatcaacattggcgatctcaacatcaaagttcccaacctgtcccagtttgtctgaggatcaagtattggcctgaaatagagtccttaagacaagcaaagacaagcaaggcaagcacgtctggaaacagaacccattttgagccttagaagagtcaagcctcaggacctggaaactttgtgtctggggaagactgtttggcatggaatagggaagggattcctattgacactgctcgggtgcacccagttctcacatgtgcagtcatgccgttctctgatgcatacggccactgcagatgtgaggggccctgccttcctcagtagggagtcaacatgcccaagtcatttgcacctttacctctcacatggatgctcccaagggttagggactgcattgagcaggcccacctgcttcccagaacctcctcactagggctgagcaccttctctgagtagagtcttcatccttagcaccacagacttctgaggtcctgtgccctttacttgctggtgaggtgtcataggtagaaaagggctggcccttcagatctgggggtgtggtgagtggcaagtaagggcagaattttaggagaaccagagtcacccgctggctctactgagattgttacacccagaatccttttgtgtttttttgtggttttttttttttgaggtggagtcttgctctgtcacccaggctggagtgctgtggtgcaatctcggctcactgcaacctctgcttcccgggttcaagcatttctcctgtctcagcctccccagtagctgggattacaggcacccaccaccatgcccagctaattgttgtatgtttagtagagacagggtttcaccatgttggccaggctgggctcgaactcctggacctcaagtgatctacccgccttggcctcccaaagtgctggcattacaggtgtgagccaccgtgcccggccaccagaatcctttggtatagccaagccttttggttaccgcctcatgaagaatatgcttcccgcattgtcctagtcccagttgtattctcacaggtgttatgtgcaggacacaatccaaatcataaacctggctcatgcccaacacatttctgctaatagggagagggacccaccacacacccacacatgccagaggtccctcctcacagaggagagggcctgtgtctgtagaaggttaaagctgacaacatgtgaaacatcccagaattatgactcttcccaagtttaaaatacattctcctcatgaga

SEQ ID NO: 432958 - DNA, 699 bp, Homo sapiens
  misc_feature (587)..(587): n is a, c, g, or t
  misc_feature (630)..(630): n is a, c, g, or t
  misc_feature (696)..(696): n is a, c, g, or t
atcgcgggtccccgcgcgtcctgcagcacttcccgcgccgcgcccccagcccagtgcgccggctctgtgccggggtgcccgggcggtcgggagaatgagccgcatctaccacgacggcgcgctccggaacaaggcggtgcagagcgtccggctgccaggggcctgggaccccgccgcccaccaggggggaaatggtgtcctgctggagggagaactgatcgatgtatctcggcacagcatcttggacactcatggcaggaaggagcgctactacgtgctgtatatccggcccagtcacatccatcgccgtaaattcgacgccaagggaaatgaaatcgagcccaacttcagcgccaccaggaaggtgaacacgggcttcctcatgtcgtcctacaaggtggaagccaagggggacactgacaggctcacgcccgaggcgctgaaggggctggtcaacaagccagagctgctcgcgctgacagagagcctcacccccgaccacacagtggcgttctggatgcccgagtcagagatggaggtgatggaactcgagctggggcggtacgtgagatcggggtgtccttctngatcatgcaactgagtgaatgacattatcatgtgagagcaggnctgaagcacacagcaatgtcgaggtgcgggtcgaagagggtggcgagagagatggtgatgaggatngtg

SEQ ID NO: 432959 - DNA, 324 bp, Homo sapiens
tactttaaaattcaaatggaaccaaaaaagagcccccaagccttttggttaccgcctcatgaagaatatgcttcccgcattgtcctagtcccagttgtattctcacaggtgttatgtgcaggacacaatccaaatcataaacctggctcatgcccaacacatttctgctaatagggagagggacccaccacacacccacacatgccagaggtccctcctcacagaggagagggcctgtgtctgtagaaggttaaagctgacaacatgtgaaacatcccagaattatgactcttcccaagtttaaaatacattctcctcatgaga

SEQ ID NO: 432960 - DNA, 2607 bp, Homo sapiens
atcgtgtgtggcggaaggaggagctttctgggagtagccggtgctgagagaaccgtggctggcaaagatgattcaggcgattctggttttcaacaaccatgggaagccacggctagtccgcttctaccagcgtttcccagaagaaattcaacagcagattgttcgagagactttccatctagtcctcaagcgggatgacaacatctgtaacttcttggagggtggaagtttgattggtggctctgactacaaactgatctaccggcactatgctaccctctactttgtattttgtgtggattcctcagagagtgaacttggaatcttggacctcatccaggtttttgtggaaactctggataagtgtttcgaaaatgtgtgtgaattggatttgatcttccatatggataaggtgcactacatcctccaggaggtggtgatgggtgggatggtgttggaaacaaacatgaatgaaatcgtggctcagattgaggctcaaaacaggctggagaaatccgagggtggcctttcagcagcccctgcgcgggctgtgtctgctgtgaaaaacatcaacctgccagagattcctcggaacatcaacattggcgatctcaacatcaaagttcccaacctgtcccagtttgtctgaggatcaagtattggcctgaaatagagtccttaagacaagcaaagacaagcaaggcaagcacgtctggaaacagaacccattttgagccttagaagagtcaagcctcaggacctggaaactttgtgtctggggaagactgtttggcatggaatagggaagggattcctattgacactgctcgggtgcacccagttctcacatgtgcagtcatgccgttctctgatgcatacggccactgcagatgtgaggggccctgccttcctcagtagggagtcaacatgcccaagtcatttgcacctttacctctcacatggatgctcccaagggttagggactgcattgagcaggcccacctgcttcccagaacctcctcactagggctgagcaccttctctgagtagagtcttcatccttagcaccacagacttctgaggtcctgtgccctttacttgctggtgaggtgtcataggtagaaaagggctggcccttcagatctgggggtgtggtgagtggcaagtaagggcagaattttaggagaaccagagtcacccgctggctctactgagattgttacacccagaatccttttgtgtttttttgtggttttttttttttgaggtggagtcttgctctgtcacccaggctggagtgctgtggtgcaatctcggctcactgcaacctctgcttcccgggttcaagcatttctcctgtctcagcctccccagtagctgggattacaggcacccaccaccatgcccagctaattgttgtatgtttagtagagacagggtttcaccatgttggccaggctgggctcgaactcctggacctcaagtgatctacccgccttggcctcccaaagtgctggcattacaggtgtgagccaccgtgcccggccaccagaatcctttggtatagccaagccttttggttaccgcctcatgaagaatatgcttcccgcattgtcctagtcccagttgtattctcacaggtgttatgtgcaggacacaatccaaatcataaacctggctcatgcccaacacatttctgctaatagggagagggacccaccacacacccacacatgccagaggtccctcctcacagaggagagggcctgtgtctgtagaaggttaaagctgacaacatgtgaaacatcccagaattatgactcttcccaagtttaaaatacattctcctcatgagagcagaaggtttgttgctgtgttgtgaatgatgagctgcctccatagggaacccactgccacctgggccagcttctggagcatgagaacctgagccagggtcacccttgtggggcctggacatgacgcacgctggctgcgactaggagcagggctgcctcttctccctccccaaggtctgcttgtgggcacgctctgttccctcaggtgccattctcccagggcttaggcgcccataaatgttctttctgtggtggagtagggcctcctgcttccatactgtcgcatgggctagatctcaggtgtggtgttgagccaccttaagatgagggctgcttcgcagtaaagtttccagcctgggcccctcttgggccttctggctggggaccctcagcctcctgatgctgttgcagggcaggtctgagagggtgcccagcagcacccggtgtcagggccaccttgttttccatttttgaacagcgctccctgtggtttgtgcccactgctcaatacagcctccgatcctcactcttgaaagctccatgataagcacagagatgggcagtgtgggtcagaaggtgggccgcttcctgtggaagagggaagtgtaggtgaatagatatcaaaacccctgatgtcattcttttgaggggttggattttcttttttctggcagacatttcagtacattcacatttctctcacatttgctgaatgtgagatcagaataaaggagatcggcgtttatttcgt

SEQ ID NO: 432961 - DNA, 3006 bp, Homo sapiens
atcgtgtgtggcggaaggaggagctttctgggagtagccggtgctgagagaaccgtggctggcaaagatgattcaggcgattctggttttcaacaaccatgggaagccacggctagtccgcttctaccagcgtttcccagaagaaattcaacagcagattgttcgagagactttccatctagtcctcaagcgggatgacaacatctgtaacttcttggagggtggaagtttgattggtggctctgactacaaactgatctaccggcactatgctaccctctactttgtattttgtgtggattcctcagagagtgaacttggaatcttggacctcatccaggtttttgtggaaactctggataagtgtttcgaaaatgtgtgtgaattggatttgatcttccatatggataaggtgcactacatcctccaggaggtggtgatgggtgggatggtgttggaaacaaacatgaatgaaatcgtggctcagattgaggctcaaaacaggctggagaaatccgagggtggcctttcagcagcccctgcgcgggctgtgtctgctgtgaaaaacatcaacctgccagagattcctcggaacatcaacattggcgatctcaacatcaaagttcccaacctgtcccagtttgtctgaggatcaagtattggcctgaaatagagtccttaagacaagcaaagacaagcaaggcaagcacgtctggaaacagaacccattttgagccttagaagagtcaagcctcaggacctggaaactttgtgtctggggaagactgtttggcatggaatagggaagggattcctattgacactgctcgggtgcacccagttctcacatgtgcagtcatgccgttctctgatgcatacggccactgcagatgtgaggggccctgccttcctcagtagggagtcaacatgcccaagtcatttgcacctttacctctcacatggatgctcccaagggttagggactgcattgagcaggcccacctgcttcccagaacctcctcactagggctgagcaccttctctgagtagagtcttcatccttagcaccacagacttctgaggtcctgtgccctttacttgctggtgaggtgtcataggtagaaaagggctggcccttcagatctgggggtgtggtgagtggcaagtaagggcagaattttaggagaaccagagtcacccgctggctctactgagattgttacacccagaatccttttgtgtttttttgtggttttttttttttgaggtggagtcttgctctgtcacccaggctggagtgctgtggtgcaatctcggctcactgcaacctctgcttcccgggttcaagcatttctcctgtctcagcctccccagtagctgggattacaggcacccaccaccatgcccagctaattgttgtatgtttagtagagacagggtttcaccatgttggccaggctgggctcgaactcctggacctcaagtgatctacccgccttggcctcccaaagtgctggcattacaggtgtgagccaccgtgcccggccaccagaatcctttggtatagccaagccttttggttaccgcctcatgaagaatatgcttcccgcattgtcctagtcccagttgtattctcacaggtgttatgtgcaggacacaatccaaatcataaacctggctcatgcccaacacatttctgctaatagggagagggacccaccacacacccacacatgccagaggtccctcctcacagaggagagggcctgtgtctgtagaaggttaaagctgacaacatgtgaaacatcccagaattatgactcttcccaagtttaaaatacattctcctcatgagagcagaaggtttgttgctgtgttgtgaatgatgagctgcctccatagggaacccactgccacctgggccagcttctggagcatgagaacctgagccagggtcacccttgtggggcctggacatgacgcacgctggctgcgactaggagcagggctgcctcttctccctccccaaggtctgcttgtgggcacgctctgttccctcaggtgccattctcccagggcttaggcgcccataaatgttctttctgtggtggagtagggcctcctgcttccatactgtcgcatgggctagatctcaggtgtggtgttgagccaccttaagatgagggctgcttcgcagtaaagtttccagcctgggcccctcttgggccttctggctggggaccctcagcctcctgatgctgttgcagggcaggtctgagagggtgcccagcagcacccggtgtcagggccaccttgttttccatttttgaacagcgctccctgtggtttgtgcccactgctcaatacagcctccgatcctcactcttgaaagctccatgataagcacagagatgggcagtgtgggtcagaaggtgggccgcttcctgtggaagagggaagtgtaggtgaatagatatcaaaacccctgatgtcattcttttgaggggttggattttcttttttctggcagacatttcagtacattcacatttctctcacatttgctgaatgtgagatcagaataaaggagatcggcgtttatttcgtaccttctgtaagttggcatgagcaagatcattcaactgtccttacaacaggcattcttatccccattttgcagatgacgaaagtagacccagctccagtaaccttcccttagattacacggggctgagatctgagactgttcacttgactccactgtccttttctttcctcgctgcttaagatggcttctcccaatgttatcatcttcttttttatagataaggaaactgagcctcagagagtctgacttctcacaaaccgtggtctaaataggcttgattttctaaggtggccagtgatcatgtcatagagtataagagccaaagagtcgtctgtgtccctccatttaactgatgttgaagccgaagcccaaggtggtaaatgttatgttgagggtca

SEQ ID NO: 432962 - DNA, 2613 bp, Homo sapiens
aatataggctaggtacgaggcctggtgttgaatcggccgaggagcggtgctgagagaaccgtggctggcaaagatgattcaggcgattctggttttcaacaaccatgggaagccacggctagtccgcttctaccagcgtttcccagaagaaattcaacagcagattgttcgagagactttccatctagtcctcaagcgggatgacaacatctgtaacttcttggagggtggaagtttgattggtggctctgactacaaactgatctaccggcactatgctaccctctactttgtattttgtgtggattcctcagagagtgaacttggaatcttggacctcatccaggtttttgtggaaactctggataagtgtttcgaaaatgtgtgtgaattggatttgatcttccatatggataaggtgcactacatcctccaggaggtggtgatgggtgggatggtgttggaaacaaacatgaatgaaatcgtggctcagattgaggctcaaaacaggctggagaaatccgagggtggcctttcagcagcccctgcgcgggctgtgtctgctgtgaaaaacatcaacctgccagagattcctcggaacatcaacattggcgatctcaacatcaaagttcccaacctgtcccagtttgtctgaggatcaagtattggcctgaaatagagtccttaagacaagcaaagacaagcaaggcaagcacgtctggaaacagaacccattttgagccttagaagagtcaagcctcaggacctggaaactttgtgtctggggaagactgtttggcatggaatagggaagggattcctattgacactgctcgggtgcacccagttctcacatgtgcagtcatgccgttctctgatgcatacggccactgcagatgtgaggggccctgccttcctcagtagggagtcaacatgcccaagtcatttgcacctttacctctcacatggatgctcccaagggttagggactgcattgagcaggcccacctgcttcccagaacctcctcactagggctgagcaccttctctgagtagagtcttcatccttagcaccacagacttctgaggtcctgtgccctttacttgctggtgaggtgtcataggtagaaaagggctggcccttcagatctgggggtgtggtgagtggcaagtaagggcagaattttaggagaaccagagtcacccgctggctctactgagattgttacacccagaatccttttgtgtttttttgtggttttttttttttgaggtggagtcttgctctgtcacccaggctggagtgctgtggtgcaatctcggctcactgcaacctctgcttcccgggttcaagcatttctcctgtctcagcctccccagtagctgggattacaggcacccaccaccatgcccagctaattgttgtatgtttagtagagacagggtttcaccatgttggccaggctgggctcgaactcctggacctcaagtgatctacccgccttggcctcccaaagtgctggcattacaggtgtgagccaccgtgcccggccaccagaatcctttggtatagccaagccttttggttaccgcctcatgaagaatatgcttcccgcattgtcctagtcccagttgtattctcacaggtgttatgtgcaggacacaatccaaatcataaacctggctcatgcccaacacatttctgctaatagggagagggacccaccacacacccacacatgccagaggtccctcctcacagaggagagggcctgtgtctgtagaaggttaaagctgacaacatgtgaaacatcccagaattatgactcttcccaagtttaaaatacattctcctcatgagagcagaaggtttgttgctgtgttgtgaatgatgagctgcctccatagggaacccactgccacctgggccagcttctggagcatgagaacctgagccagggtcacccttgtggggcctggacatgacgcacgctggctgcgactaggagcagggctgcctcttctccctccccaaggtctgcttgtgggcacgctctgttccctcaggtgccattctcccagggcttaggcgcccataaatgttctttctgtggtggagtagggcctcctgcttccatactgtcgcatgggctagatctcaggtgtggtgttgagccaccttaagatgagggctgcttcgcagtaaagtttccagcctgggcccctcttgggccttctggctggggaccctcagcctcctgatgctgttgcagggcaggtctgagagggtgcccagcagcacccggtgtcagggccaccttgttttccatttttgaacagcgctccctgtggtttgtgcccactgctcaatacagcctccgatcctcactcttgaaagctccatgataagcacagagatgggcagtgtgggtcagaaggtgggccgcttcctgtggaagagggaagtgtaggtgaatagatatcaaaacccctgatgtcattcttttgaggggttggattttcttttttctggcagacatttcagtacattcacatttctctcacatttgctgaatgtgagatcagaataaaggagatcggcgtttatttcgt

SEQ ID NO: 432963 - DNA, 1856 bp, Homo sapiens
atcgtgtgtggcggaaggaggagctttctgggagtagccggtgctgagagaaccgtggctggcaaagatgattcaggcgattctggttttcaacaaccatgggaagccacggctagtccgcttctaccagcgtttcccagaagaaattcaacagcagattgttcgagagactttccatctagtcctcaagcgggatgacaacatctgtaacttcttggagggtggaagtttgattggtggctctgactacaaactgatctaccggcactatgctaccctctactttgtattttgtgtggattcctcagagagtgaacttggaatcttggacctcatccaggtttttgtggaaactctggataagtgtttcgaaaatgtgtgtgaattggatttgatcttccatatggataaggtgcactacatcctccaggaggtggtgatgggtgggatggtgttggaaacaaacatgaatgaaatcgtggctcagattgaggctcaaaacaggctggagaaatccgagggtggcctttcagcagcccctgcgcgggctgtgtctgctgtgaaaaacatcaacctgccagagattcctcggaacatcaacattggcgatctcaacatcaaagttcccaacctgtcccagtttgtctgaggatcaagtattggcctgaaatagagtccttaagacaagcaaagacaagcaaggcaagcacgtctggaaacagaacccattttgagccttagaagagtcaagcctcaggacctggaaactttgtgtctggggaagactgtttggcatggaatagggaagggattcctattgacactgctcgggtgcacccagttctcacatgtgcagtcatgccgttctctgatgcatacggccactgcagatgtgaggggccctgccttcctcagtagggagtcaacatgcccaagtcatttgcacctttacctctcacatggatgctcccaagggttagggactgcattgagcaggcccacctgcttcccagaacctcctcactagggctgagcaccttctctgagtagagtcttcatccttagcaccacagacttctgaggtcctgtgccctttacttgctggtgaggtgtcataggtagaaaagggctggcccttcagatctgggggtgtggtgagtggcaagtaagggcagaattttaggagaaccagagtcacccgctggctctactgagattgttacacccagaatccttttgtgtttttttgtggttttttttttttgaggtggagtcttgctctgtcacccaggctggagtgctgtggtgcaatctcggctcactgcaacctctgcttcccgggttcaagcatttctcctgtctcagcctccccagtagctgggattacaggcacccaccaccatgcccagctaattgttgtatgtttagtagagacagggtttcaccatgttggccaggctgggctcgaactcctggacctcaagtgatctacccgccttggcctcccaaagtgctggcattacaggtgtgagccaccgtgcccggccaccagaatcctttggtatagccaagccttttggttaccgcctcatgaagaatatgcttcccgcattgtcctagtcccagttgtattctcacaggtgttatgtgcaggacacaatccaaatcataaacctggctcatgcccaacacatttctgctaatagggagagggacccaccacacacccacacatgccagaggtccctcctcacagaggagagggcctgtgtctgtagaaggttaaagctgacaacatgtgaaacatcccagaattatgactcttcccaagtttaaaatacattctcctcatgaga

SEQ ID NO: 432964 - DNA, 2870 bp, Homo sapiens
atcgtgtgtggcggaaggaggagctttctgggagtagccggtgctgagagaaccgtggctggcaaagatgattcaggcgattctggttttcaacaaccatgggaagccacggctagtccgcttctaccagcgtttcccagaagaaattcaacagcagattgttcgagagactttccatctagtcctcaagcgggatgacaacatctgtaacttcttggagggtggaagtttgattggtggctctgactacaaactgatctaccggcactatgctaccctctactttgtattttgtgtggattcctcagagagtgaacttggaatcttggacctcatccaggtttttgtggaaactctggataagtgtttcgaaaatgtgtgtgaattggatttgatcttccatatggataaggtgcactacatcctccaggaggtggtgatgggtgggatggtgttggaaacaaacatgaatgaaatcgtggctcagattgaggctcaaaacaggctggagaaatccgagggtggcctttcagcagcccctgcgcgggctgtgtctgctgtgaaaaacatcaacctgccagagattcctcggaacatcaacattggcgatctcaacatcaaagttcccaacctgtcccagtttgtctgaggatcaagtattggcctgaaatagagtccttaagacaagcaaagacaagcaaggcaagcacgtctggaaacagaacccattttgagccttagaagagtcaagcctcaggacctggaaactttgtgtctggggaagactgtttggcatggaatagggaagggattcctattgacactgctcgggtgcacccagttctcacatgtgcagtcatgccgttctctgatgcatacggccactgcagatgtgaggggccctgccttcctcagtagggagtcaacatgcccaagtcatttgcacctttacctctcacatggatgctcccaagggttagggactgcattgagcaggcccacctgcttcccagaacctcctcactagggctgagcaccttctctgagtagagtcttcatccttagcaccacagacttctgaggtcctgtgccctttacttgctggtgaggtgtcataggtagaaaagggctggcccttcagatctgggggtgtggtgagtggcaagtaagggcagaattttaggagaaccagagtcacccgctggctctactgagattgttacacccagaatccttttgtgtttttttgtggttttttttttttgaggtggagtcttgctctgtcacccaggctggagtgctgtggtgcaatctcggctcactgcaacctctgcttcccgggttcaagcatttctcctgtctcagcctccccagtagctgggattacaggcacccaccaccgtgcccggccaccagaatcctttggtatagccaagccttttggttaccgcctcatgaagaatatgcttcccgcattgtcctagtcccagttgtattctcacaggtgttatgtgcaggacacaatccaaatcataaacctggctcatgcccaacacatttctgctaatagggagagggacccaccacacacccacacatgccagaggtccctcctcacagaggagagggcctgtgtctgtagaaggttaaagctgacaacatgtgaaacatcccagaattatgactcttcccaagtttaaaatacattctcctcatgagagcagaaggtttgttgctgtgttgtgaatgatgagctgcctccatagggaacccactgccacctgggccagcttctggagcatgagaacctgagccagggtcacccttgtggggcctggacatgacgcacgctggctgcgactaggagcagggctgcctcttctccctccccaaggtctgcttgtgggcacgctctgttccctcaggtgccattctcccagggcttaggcgcccataaatgttctttctgtggtggagtagggcctcctgcttccatactgtcgcatgggctagatctcaggtgtggtgttgagccaccttaagatgagggctgcttcgcagtaaagtttccagcctgggcccctcttgggccttctggctggggaccctcagcctcctgatgctgttgcagggcaggtctgagagggtgcccagcagcacccggtgtcagggccaccttgttttccatttttgaacagcgctccctgtggtttgtgcccactgctcaatacagcctccgatcctcactcttgaaagctccatgataagcacagagatgggcagtgtgggtcagaaggtgggccgcttcctgtggaagagggaagtgtaggtgaatagatatcaaaacccctgatgtcattcttttgaggggttggattttcttttttctggcagacatttcagtacattcacatttctctcacatttgctgaatgtgagatcagaataaaggagatcggcgtttatttcgtaccttctgtaagttggcatgagcaagatcattcaactgtccttacaacaggcattcttatccccattttgcagatgacgaaagtagacccagctccagtaaccttcccttagattacacggggctgagatctgagactgttcacttgactccactgtccttttctttcctcgctgcttaagatggcttctcccaatgttatcatcttcttttttatagataaggaaactgagcctcagagagtctgacttctcacaaaccgtggtctaaataggcttgattttctaaggtggccagtgatcatgtcatagagtataagagccaaagagtcgtctgtgtccctccatttaactgatgttgaagccgaagcccaaggtggtaaatgttatgttgagggtca

SEQ ID NO: 432965 - DNA, 1317 bp, Homo sapiens
atcgtgtgtggcggaaggaggagctttctgggagtagccggtgctgagagaaccgtggctggcaaagatgattcaggcgattctggttttcaacaaccatgggaagccacggctagtccgcttctaccagcgtttcccagaagaaattcaacagcagattgttcgagagactttccatctagtcctcaagcgggatgacaacatctgtaacttcttggagggtggaagtttgattggtggctctgactacaaactgatctaccggcactatgctaccctctactttgtattttgtgtggattcctcagagagtgaacttggaatcttggacctcatccaggtttttgtggaaactctggataagtgtttcgaaaatgtgtgtgaattggatttgatcttccatatggataaggtgcactacatcctccaggaggtggtgatgggtgggatggtgttggaaacaaacatgaatgaaatcgtggctcagattgaggctcaaaacaggctggagaaatccgagggtggcctttcagcagcccctgcgcgggctgtgtctgctgtgaaaaacatcaacctgccagagattcctcggaacatcaacattggcgatctcaacatcaaagttcccaacctgtcccagtttgtctgaggatcaagtattggcctgaaatagagtccttaagacaagcaaagacaagcaaggcaagcacgtctggaaacagaacccattttgagccttagaagagtcaagcctcaggacctggaaactttgtgtctggggaagactgtttggcatggaatagggaagggattcctattgacactgctcgggtgcacccagttctcacatgtgcagtcatgccgttctctgatgcatacggccactgcagatgtgaggggccctgccttcctcagtagggagtcaacatgcccaagtcatttgcacctttacctctcacatggatgctcccaagggttagggactgcattgagcaggcccacctgcttcccagaacctcctcactagggctgagcaccttctctgagtagagtcttcatccttagcaccacagacttctgaggtcctgtgccctttacttgctggtgaggtgtcataggtagaaaagggctggcccttcagatctgggggtgtggtgagtggcaagtaagggcagaattttaggagaaccagagtcacccgctggctctactgagattgttacacccagaatccttttgtgtttttttgtggtttttttttttccgagattgtgccattgcactccagcctgggcaacaagagcaaaactctgtctc

SEQ ID NO: 432966 - DNA, 1522 bp, Homo sapiens
atcgtgtgtggcggaaggaggagctttctgggagtagccggtgctgagagaaccgtggctggcaaagatgattcaggcgattctggttttcaacaaccatgggaagccacggctagtccgcttctaccagcgtttcccagaagaaattcaacagcagattgttcgagagactttccatctagtcctcaagcgggatgacaacatctgtaacttcttggagggtggaagtttgattggtggctctgactacaaactgatctaccggcactatgctaccctctactttgtattttgtgtggattcctcagagagtgaacttggaatcttggacctcatccaggtttttgtggaaactctggataagtgtttcgaaaatgtgtgtgaattggatttgatcttccatatggataaggtgcactacatcctccaggaggtggtgatgggtgggatggtgttggaaacaaacatgaatgaaatcgtggctcagattgaggctcaaaacaggctggagaaatccgagggtggcctttcagcagcccctgcgcgggctgtgtctgctgtgaaaaacatcaacctgccagagattcctcggaacatcaacattggcgatctcaacatcaaagttcccaacctgtcccagtttgtctgaggatcaagtattggcctgaaatagagtccttaagacaagcaaagacaagcaaggcaagcacgtctggaaacagaacccattttgagccttagaagagtcaagcctcaggacctggaaactttgtgtctggggaagactgtttggcatggaatagggaagggattcctattgacactgctcgggtgcacccagttctcacatgtgcagtcatgccgttctctgatgcatacggccactgcagatgtgaggggccctgccttcctcagtagggagtcaacatgcccaagtcatttgcacctttacctctcacatggatgctcccaagggttagggactgcattgagcaggcccacctgcttcccagaacctcctcactagggctgagcaccttctctgagtagagtcttcatccttagcaccacagacttctgaggtcctgtgccctttacttgctggtgaggtgtcataggtagaaaagggctggcccttcagatctgggggtgtggtgagtggcaagtaagggcagaattttaggagaaccagagtcacccgctggctctactgagattgttacacccagaatcccaagccttttggttaccgcctcatgaagaatatgcttcccgcattgtcctagtcccagttgtattctcacaggtgttatgtgcaggacacaatccaaatcataaacctggctcatgcccaacacatttctgctaatagggagagggacccaccacacacccacacatgccagaggtccctcctcacagaggagagggcctgtgtctgtagaaggttaaagctgacaacatgtgaaacatcccagaattatgactcttcccaagtttaaaatacattctcctcatgaga

SEQ ID NO: 432967 - DNA, 2952 bp, Homo sapiens
atcgtgtgtggcggaaggaggagctttctgggagtagccggtgctgagagaaccgtggctggcaaagatgattcaggcgattctggttttcaacaaccatgggaagccacggctagtccgcttctaccagcgtttcccagaagaaattcaacagcagattgttcgagagactttccatctagtcctcaagcgggatgacaacatctgtaacttcttggagggtggaagtttgattggtggctctgactacaaactgatctaccggcactatgctaccctctactttgtattttgtgtggattcctcagagagtgaacttggaatcttggacctcatccaggtttttgtggaaactctggataagtgtttcgaaaatgtgtgtgaattggatttgatcttccatatggataaggtgcactacatcctccaggaggtggtgatgggtgggatggtgttggaaacaaacatgaatgaaatcgtggctcagattgaggctcaaaacaggctggagaaatccgagggtggcctttcagcagcccctgcgcgggctgtgtctgctgtgatcaaagttcccaacctgtcccagtttgtctgaggatcaagtattggcctgaaatagagtccttaagacaagcaaagacaagcaaggcaagcacgtctggaaacagaacccattttgagccttagaagagtcaagcctcaggacctggaaactttgtgtctggggaagactgtttggcatggaatagggaagggattcctattgacactgctcgggtgcacccagttctcacatgtgcagtcatgccgttctctgatgcatacggccactgcagatgtgaggggccctgccttcctcagtagggagtcaacatgcccaagtcatttgcacctttacctctcacatggatgctcccaagggttagggactgcattgagcaggcccacctgcttcccagaacctcctcactagggctgagcaccttctctgagtagagtcttcatccttagcaccacagacttctgaggtcctgtgccctttacttgctggtgaggtgtcataggtagaaaagggctggcccttcagatctgggggtgtggtgagtggcaagtaagggcagaattttaggagaaccagagtcacccgctggctctactgagattgttacacccagaatccttttgtgtttttttgtggttttttttttttgaggtggagtcttgctctgtcacccaggctggagtgctgtggtgcaatctcggctcactgcaacctctgcttcccgggttcaagcatttctcctgtctcagcctccccagtagctgggattacaggcacccaccaccatgcccagctaattgttgtatgtttagtagagacagggtttcaccatgttggccaggctgggctcgaactcctggacctcaagtgatctacccgccttggcctcccaaagtgctggcattacaggtgtgagccaccgtgcccggccaccagaatcctttggtatagccaagccttttggttaccgcctcatgaagaatatgcttcccgcattgtcctagtcccagttgtattctcacaggtgttatgtgcaggacacaatccaaatcataaacctggctcatgcccaacacatttctgctaatagggagagggacccaccacacacccacacatgccagaggtccctcctcacagaggagagggcctgtgtctgtagaaggttaaagctgacaacatgtgaaacatcccagaattatgactcttcccaagtttaaaatacattctcctcatgagagcagaaggtttgttgctgtgttgtgaatgatgagctgcctccatagggaacccactgccacctgggccagcttctggagcatgagaacctgagccagggtcacccttgtggggcctggacatgacgcacgctggctgcgactaggagcagggctgcctcttctccctccccaaggtctgcttgtgggcacgctctgttccctcaggtgccattctcccagggcttaggcgcccataaatgttctttctgtggtggagtagggcctcctgcttccatactgtcgcatgggctagatctcaggtgtggtgttgagccaccttaagatgagggctgcttcgcagtaaagtttccagcctgggcccctcttgggccttctggctggggaccctcagcctcctgatgctgttgcagggcaggtctgagagggtgcccagcagcacccggtgtcagggccaccttgttttccatttttgaacagcgctccctgtggtttgtgcccactgctcaatacagcctccgatcctcactcttgaaagctccatgataagcacagagatgggcagtgtgggtcagaaggtgggccgcttcctgtggaagagggaagtgtaggtgaatagatatcaaaacccctgatgtcattcttttgaggggttggattttcttttttctggcagacatttcagtacattcacatttctctcacatttgctgaatgtgagatcagaataaaggagatcggcgtttatttcgtaccttctgtaagttggcatgagcaagatcattcaactgtccttacaacaggcattcttatccccattttgcagatgacgaaagtagacccagctccagtaaccttcccttagattacacggggctgagatctgagactgttcacttgactccactgtccttttctttcctcgctgcttaagatggcttctcccaatgttatcatcttcttttttatagataaggaaactgagcctcagagagtctgacttctcacaaaccgtggtctaaataggcttgattttctaaggtggccagtgatcatgtcatagagtataagagccaaagagtcgtctgtgtccctccatttaactgatgttgaagccgaagcccaaggtggtaaatgttatgttgagggtca

SEQ ID NO: 432968 - DNA, 2801 bp, Homo sapiens
taaatgtttcccatcttctgcagtttgattggtggctctgactacaaactgatctaccggcactatgctaccctctactttgtattttgtgtggattcctcagagagtgaacttggaatcttggacctcatccaggtttttgtggaaactctggataagtgtttcgaaaatgtgtgtgaattggatttgatcttccatatggataaggtgcactacatcctccaggaggtggtgatgggtgggatggtgttggaaacaaacatgaatgaaatcgtggctcagattgaggctcaaaacaggctggagaaatccgagggtggcctttcagcagcccctgcgcgggctgtgtctgctgtgaaaaacatcaacctgccagagattcctcggaacatcaacattggcgatctcaacatcaaagttcccaacctgtcccagtttgtctgaggatcaagtattggcctgaaatagagtccttaagacaagcaaagacaagcaaggcaagcacgtctggaaacagaacccattttgagccttagaagagtcaagcctcaggacctggaaactttgtgtctggggaagactgtttggcatggaatagggaagggattcctattgacactgctcgggtgcacccagttctcacatgtgcagtcatgccgttctctgatgcatacggccactgcagatgtgaggggccctgccttcctcagtagggagtcaacatgcccaagtcatttgcacctttacctctcacatggatgctcccaagggttagggactgcattgagcaggcccacctgcttcccagaacctcctcactagggctgagcaccttctctgagtagagtcttcatccttagcaccacagacttctgaggtcctgtgccctttacttgctggtgaggtgtcataggtagaaaagggctggcccttcagatctgggggtgtggtgagtggcaagtaagggcagaattttaggagaaccagagtcacccgctggctctactgagattgttacacccagaatccttttgtgtttttttgtggttttttttttttgaggtggagtcttgctctgtcacccaggctggagtgctgtggtgcaatctcggctcactgcaacctctgcttcccgggttcaagcatttctcctgtctcagcctccccagtagctgggattacaggcacccaccaccatgcccagctaattgttgtatgtttagtagagacagggtttcaccatgttggccaggctgggctcgaactcctggacctcaagtgatctacccgccttggcctcccaaagtgctggcattacaggtgtgagccaccgtgcccggccaccagaatcctttggtatagccaagccttttggttaccgcctcatgaagaatatgcttcccgcattgtcctagtcccagttgtattctcacaggtgttatgtgcaggacacaatccaaatcataaacctggctcatgcccaacacatttctgctaatagggagagggacccaccacacacccacacatgccagaggtccctcctcacagaggagagggcctgtgtctgtagaaggttaaagctgacaacatgtgaaacatcccagaattatgactcttcccaagtttaaaatacattctcctcatgagagcagaaggtttgttgctgtgttgtgaatgatgagctgcctccatagggaacccactgccacctgggccagcttctggagcatgagaacctgagccagggtcacccttgtggggcctggacatgacgcacgctggctgcgactaggagcagggctgcctcttctccctccccaaggtctgcttgtgggcacgctctgttccctcaggtgccattctcccagggcttaggcgcccataaatgttctttctgtggtggagtagggcctcctgcttccatactgtcgcatgggctagatctcaggtgtggtgttgagccaccttaagatgagggctgcttcgcagtaaagtttccagcctgggcccctcttgggccttctggctggggaccctcagcctcctgatgctgttgcagggcaggtctgagagggtgcccagcagcacccggtgtcagggccaccttgttttccatttttgaacagcgctccctgtggtttgtgcccactgctcaatacagcctccgatcctcactcttgaaagctccatgataagcacagagatgggcagtgtgggtcagaaggtgggccgcttcctgtggaagagggaagtgtaggtgaatagatatcaaaacccctgatgtcattcttttgaggggttggattttcttttttctggcagacatttcagtacattcacatttctctcacatttgctgaatgtgagatcagaataaaggagatcggcgtttatttcgtaccttctgtaagttggcatgagcaagatcattcaactgtccttacaacaggcattcttatccccattttgcagatgacgaaagtagacccagctccagtaaccttcccttagattacacggggctgagatctgagactgttcacttgactccactgtccttttctttcctcgctgcttaagatggcttctcccaatgttatcatcttcttttttatagataaggaaactgagcctcagagagtctgacttctcacaaaccgtggtctaaataggcttgattttctaaggtggccagtgatcatgtcatagagtataagagccaaagagtcgtctgtgtccctccatttaactgatgttgaagccgaagcccaaggtggtaaatgttatgttgagggtca

SEQ ID NO: 432969 - DNA, 3146 bp, Homo sapiens
agcctctttctttctgttcctgtggttttgaataccatttacatgactcacgtctcagattttctttccctaccagcctccctgtgttggtttgtgactttatctgtcagtgttctctcaggtatttacttagatttctgcaggcatcctcaaggtcagcgcatcagccaacttctgttgtttaacagaacccttctttgtgccctgactctatctccagttctttaggtacatgagttcagtgttgattcttgactgcttgctcccacacccatgcttggcagcctccaactttcttaagtcccatctatctccaatcagagaaatgttagccatctttcatggtcaacttcatattcagtggacaaggtctgaactgactagcaggactaacacgggcagctgttcgctcatccattgctcacttacacttgagtcattttgcttaccaaagaacccagtgtgtcctgggcaccaggctaggtgctttacacacatttatctcatccagtcctcactgcaatcctggaaggaggctgaagcactttaaaggtgcactacatcctccaggaggtggtgatgggtgggatggtgttggaaacaaacatgaatgaaatcgtggctcagattgaggctcaaaacaggctggagaaatccgagggtggcctttcagcagcccctgcgcgggctgtgtctgctgtgaaaaacatcaacctgccagagattcctcggaacatcaacattggcgatctcaacatcaaagttcccaacctgtcccagtttgtctgaggatcaagtattggcctgaaatagagtccttaagacaagcaaagacaagcaaggcaagcacgtctggaaacagaacccattttgagccttagaagagtcaagcctcaggacctggaaactttgtgtctggggaagactgtttggcatggaatagggaagggattcctattgacactgctcgggtgcacccagttctcacatgtgcagtcatgccgttctctgatgcatacggccactgcagatgtgaggggccctgccttcctcagtagggagtcaacatgcccaagtcatttgcacctttacctctcacatggatgctcccaagggttagggactgcattgagcaggcccacctgcttcccagaacctcctcactagggctgagcaccttctctgagtagagtcttcatccttagcaccacagacttctgaggtcctgtgccctttacttgctggtgaggtgtcataggtagaaaagggctggcccttcagatctgggggtgtggtgagtggcaagtaagggcagaattttaggagaaccagagtcacccgctggctctactgagattgttacacccagaatccttttgtgtttttttgtggttttttttttttgaggtggagtcttgctctgtcacccaggctggagtgctgtggtgcaatctcggctcactgcaacctctgcttcccgggttcaagcatttctcctgtctcagcctccccagtagctgggattacaggcacccaccaccatgcccagctaattgttgtatgtttagtagagacagggtttcaccatgttggccaggctgggctcgaactcctggacctcaagtgatctacccgccttggcctcccaaagtgctggcattacaggtgtgagccaccgtgcccggccaccagaatcctttggtatagccaagccttttggttaccgcctcatgaagaatatgcttcccgcattgtcctagtcccagttgtattctcacaggtgttatgtgcaggacacaatccaaatcataaacctggctcatgcccaacacatttctgctaatagggagagggacccaccacacacccacacatgccagaggtccctcctcacagaggagagggcctgtgtctgtagaaggttaaagctgacaacatgtgaaacatcccagaattatgactcttcccaagtttaaaatacattctcctcatgagagcagaaggtttgttgctgtgttgtgaatgatgagctgcctccatagggaacccactgccacctgggccagcttctggagcatgagaacctgagccagggtcacccttgtggggcctggacatgacgcacgctggctgcgactaggagcagggctgcctcttctccctccccaaggtctgcttgtgggcacgctctgttccctcaggtgccattctcccagggcttaggcgcccataaatgttctttctgtggtggagtagggcctcctgcttccatactgtcgcatgggctagatctcaggtgtggtgttgagccaccttaagatgagggctgcttcgcagtaaagtttccagcctgggcccctcttgggccttctggctggggaccctcagcctcctgatgctgttgcagggcaggtctgagagggtgcccagcagcacccggtgtcagggccaccttgttttccatttttgaacagcgctccctgtggtttgtgcccactgctcaatacagcctccgatcctcactcttgaaagctccatgataagcacagagatgggcagtgtgggtcagaaggtgggccgcttcctgtggaagagggaagtgtaggtgaatagatatcaaaacccctgatgtcattcttttgaggggttggattttcttttttctggcagacatttcagtacattcacatttctctcacatttgctgaatgtgagatcagaataaaggagatcggcgtttatttcgtaccttctgtaagttggcatgagcaagatcattcaactgtccttacaacaggcattcttatccccattttgcagatgacgaaagtagacccagctccagtaaccttcccttagattacacggggctgagatctgagactgttcacttgactccactgtccttttctttcctcgctgcttaagatggcttctcccaatgttatcatcttcttttttatagataaggaaactgagcctcagagagtctgacttctcacaaaccgtggtctaaataggcttgattttctaaggtggccagtgatcatgtcatagagtataagagccaaagagtcgtctgtgtccctccatttaactgatgttgaagccgaagcccaaggtggtaaatgttatgttgagggtca

SEQ ID NO: 432970 - DNA, 2647 bp, Homo sapiens
atcgcgggtccccgcgcgtcctgcagcacttcccgcgccgcgcccccagcccagtgcgccggctctgtgccggggtgcccgggcggtcgggagaatgagccgcatctaccacgacggcgcgctccggaacaaggcggtgcagagcgtccggctgccaggggcctgggaccccgccgcccaccaggggggaaatggtgtcctgctggagggagaactgatcgatgtatctcggcacagcatcttggacactcatggcaggaaggagcgctactacgtgctgtatatccggcccagtcacatccatcgccgtaaattcgacgccaagggaaatgaaatcgagcccaacttcagcgccaccaggaaggtgaacacgggcttcctcatgtcgtcctacaaggtggaagccaagggggacactgacaggctcacgcccgaggcgctgaaggggctggtcaacaagccagagctgctcgcgctgacagagagcctcacccccgaccacacagtggcgttctggatgcccgagtcagagatggaggtgatggaactcgagctgggggccggggtacggctgaagactcggggcgatggtcccttcctggattcattggccaaacttgaggctggaacagtgaccaagtgtaatttcactggtgatggaaagacaggggcatcctggacagacaacatcatggcccaaaagtgttcgaagggggctgcagcggagatccgagagcagggggatggggcagaggacgaggagtgggatgactgagggacgtggctgcctctgggggcaccagcaccttctgtagcattgtggaacatttcttccatgaacttctactctggagctggagagaacagtctgccaagtcttacctggttcttccccatagccaccttggaatactctttgaacaagctctgctaaaaccaaacccatgaccactgtgttggtggtggggcctcatgctgtggctcagggagggcccctccctgcatgtgagtctagccttcctagacattacatgatgaccctttaaaaaaaaattagagatggaggtctcactatgttgcccaggctgatctcaaactcctggactcaagcgatccacccacctccacctcccaaggtgttgggattacaggcgtgagccaccgcacccagcctcatgttgaccctggccctggatagcagctttgtttgtagaggcaggtggtgggagagaccctaggacagcctgagagtaactggacctggtattggtgcggagtggggaatatcccttgtctaaatgcagagcagctgagagaagttagcggggctcttcctccgttctcattgtttcctgctttccttccccacccaccccttcctcagcactctgtgttgtagcctgtactatcctgcttcaagcctccgtgtcccttgtaccttccccctaccttgagttgccagttctttactccctcaaatgttcccatgccacctctggggtttctgttatctgacatccctggctgctttcctggtagatgccattcccagagaggccaacagcgttcccaggcgtggctggctggtccgcatctctcagactcactctgccaggctacagttttgagaataccttttttgttgttgttttgtacctggagaactttttatgaatgagtaaatcttcagaaaggaattcctccacccttactgggttattgtcaggtgtaaacggcctttcagctgagcaatgttcctatgagaaggaagccatttctcttggctcatgaacactgccttttgggtagtatacccacacccagatctgtgaagagacctggaattgaagtctccatgtcgtcaggacttggtggcatgtggatcttgcttgacttgggaaaagagagggtggtggtgaactaataattatggagtccccctaatgtgtcgaacacaatgctagatgatttccatgataataattactcatacttgtgctaagcacttgcgatatcgtacttctcacaacagtccatgaggtactgattattatccccattttctcatgagactaaagctcagagctctaggatagtatacagtggcaagaggaatttacatccaagcactcagatttcaaagcccacattcttaactaccggactattcatattacagagcaggaaaagggtctcagacaggttaagcaacctgcccagagtcacacagctaatgagtagcagaatcaggattcaaacccagagctgtcaaaagcaaaccttatgttccttccactgtcccctgcttccttgcccttcagaaaggtcttggaaacaggggccagaggatgtggtagccacttcactggtgttctgtgtctgaatgggactttctcacaggcaggccatgctgggacctcagccatgggggtggccagggaggtggttgagcagaaggatagctggggacactgactgggggtagagtcacccagtgtctttagacatcctgctgtctaaagcactgtgtccaaagggtatggcacacttatatggacaggtcaccattccaaacaaggaggcccagtgtgtcaataggagaggtcctaaagcaacaaaaagggcggggtgtcttggatgggcttca

SEQ ID NO: 432971 - DNA, 2011 bp, Homo sapiens
caacctttgcctcccgggttcaagcaattctcctgcctcagccttctctgagtagagtcttcatccttagcaccacagacttctgaggtcctgtgccctttacttgctggtgaggtgtcataggtagaaaagggctggcccttcagatctgggggtgtggtgagtggcaagtaagggcagaattttaggagaaccagagtcacccgctggctctactgagattgttacacccagaatccttttgtgtttttttgtggttttttttttttgaggtggagtcttgctctgtcacccaggctggagtgctgtggtgcaatctcggctcactgcaacctctgcttcccgggttcaagcatttctcctgtctcagcctccccagtagctgggattacaggcacccaccaccatgcccagctaattgttgtatgtttagtagagacagggtttcaccatgttggccaggctgggctcgaactcctggacctcaagtgatctacccgccttggcctcccaaagtgctggcattacaggtgtgagccaccgtgcccggccaccagaatcctttggtatagccaagccttttggttaccgcctcatgaagaatatgcttcccgcattgtcctagtcccagttgtattctcacaggtgttatgtgcaggacacaatccaaatcataaacctggctcatgcccaacacatttctgctaatagggagagggacccaccacacacccacacatgccagaggtccctcctcacagaggagagggcctgtgtctgtagaaggttaaagctgacaacatgtgaaacatcccagaattatgactcttcccaagtttaaaatacattctcctcatgagagcagaaggtttgttgctgtgttgtgaatgatgagctgcctccatagggaacccactgccacctgggccagcttctggagcatgagaacctgagccagggtcacccttgtggggcctggacatgacgcacgctggctgcgactaggagcagggctgcctcttctccctccccaaggtctgcttgtgggcacgctctgttccctcaggtgccattctcccagggcttaggcgcccataaatgttctttctgtggtggagtagggcctcctgcttccatactgtcgcatgggctagatctcaggtgtggtgttgagccaccttaagatgagggctgcttcgcagtaaagtttccagcctgggcccctcttgggccttctggctggggaccctcagcctcctgatgctgttgcagggcaggtctgagagggtgcccagcagcacccggtgtcagggccaccttgttttccatttttgaacagcgctccctgtggtttgtgcccactgctcaatacagcctccgatcctcactcttgaaagctccatgataagcacagagatgggcagtgtgggtcagaaggtgggccgcttcctgtggaagagggaagtgtaggtgaatagatatcaaaacccctgatgtcattcttttgaggggttggattttcttttttctggcagacatttcagtacattcacatttctctcacatttgctgaatgtgagatcagaataaaggagatcggcgtttatttcgtaccttctgtaagttggcatgagcaagatcattcaactgtccttacaacaggcattcttatccccattttgcagatgacgaaagtagacccagctccagtaaccttcccttagattacacggggctgagatctgagactgttcacttgactccactgtccttttctttcctcgctgcttaagatggcttctcccaatgttatcatcttcttttttatagataaggaaactgagcctcagagagtctgacttctcacaaaccgtggtctaaataggcttgattttctaaggtggccagtgatcatgtcatagagtataagagccaaagagtcgtctgtgtccctccatttaactgatgttgaagccgaagcccaaggtggtaaatgttatgttgagggtca

SEQ ID NO: 432972 - DNA, 2599 bp, Homo sapiens
atcgcgggtccccgcgcgtcctgcagcacttcccgcgccgcgcccccagcccagtgcgccggctctgtgccggggtgcccgggcggtcgggagaatgagccgcatctaccacgacggcgcgctccggaacaaggcggtgcagagcgtccggctgccaggggcctgggaccccgccgcccaccaggggggaaatggtgtcctgctggagggagaactgatcgatgtatctcggcacagcatcttggacactcatggcaggaaggagcgctactacgtgctgtatatccggcccagtcacatccatcgccgtaaattcgacgccaagggaaatgaaatcgagcccaacttcagcgccaccaggaaggtgaacacgggcttcctcatgtcgtcctacaaggtggaagccaagggggacactgacaggctcacgcccgaggcgctgaaggggctggtcaacaagccagagctgctcgcgctgacagagagcctcacccccgaccacacagtggcgttctggatgcccgagtcagagatggaggtgatggaactcgagctgggggccggggtacggctgaagactcggggcgatggtcccttcctggattcattggccaaacttgaggctggaacagtgaccaagtgtaatttcactggtgatggaaagacaggggcatcctggacagacaacatcatggcccaaaagtgttcgaagggggctgcagcggagatccgagagcagggggatggggcagaggacgaggagtgggatgactgagggacgtggctgcctctgggggcaccagcaccttctgtagcattgtggaacatttcttccatgaacttctactctggagctggagagaacagtctgccaagtcttacctggttcttccccatagccaccttggaatactctttgaacaagctctgctaaaaccaaacccatgaccactgtgttggtggtggggcctcatgctgtggctcagggagggcccctccctgcatgtgagtctagccttcctagacattacatgatgaccctttaaaaaaaaattagagatggaggtctcactatgttgcccaggctgatctcaaactcctggactcaagcgatccacccacctccacctcccaaggtgttgggattacaggcgtgagccaccgcacccagcctcatgttgaccctggccctggatagcagctttgtttgtagaggcaggtggtgggagagaccctaggacagcctgagagtaactggacctggtattggtgcggagtggggaatatcccttgtctaaatgcagagcagctgagagaagttagcggggctcttcctccgttctcattgtttcctgctttccttccccacccaccccttcctcagcactctgtgttgtagcctgtactatcctgcttcaagcctccgtgtcccttgtaccttccccctaccttgagttgccagttctttactccctcaaatgttcccatgccacctctggggtttctgttatctgacatccctggctgctttctggctggtccgcatctctcagactcactctgccaggctacagttttgagaataccttttttgttgttgttttgtacctggagaactttttatgaatgagtaaatcttcagaaaggaattcctccacccttactgggttattgtcaggtgtaaacggcctttcagctgagcaatgttcctatgagaaggaagccatttctcttggctcatgaacactgccttttgggtagtatacccacacccagatctgtgaagagacctggaattgaagtctccatgtcgtcaggacttggtggcatgtggatcttgcttgacttgggaaaagagagggtggtggtgaactaataattatggagtccccctaatgtgtcgaacacaatgctagatgatttccatgataataattactcatacttgtgctaagcacttgcgatatcgtacttctcacaacagtccatgaggtactgattattatccccattttctcatgagactaaagctcagagctctaggatagtatacagtggcaagaggaatttacatccaagcactcagatttcaaagcccacattcttaactaccggactattcatattacagagcaggaaaagggtctcagacaggttaagcaacctgcccagagtcacacagctaatgagtagcagaatcaggattcaaacccagagctgtcaaaagcaaaccttatgttccttccactgtcccctgcttccttgcccttcagaaaggtcttggaaacaggggccagaggatgtggtagccacttcactggtgttctgtgtctgaatgggactttctcacaggcaggccatgctgggacctcagccatgggggtggccagggaggtggttgagcagaaggatagctggggacactgactgggggtagagtcacccagtgtctttagacatcctgctgtctaaagcactgtgtccaaagggtatggcacacttatatggacaggtcaccattccaaacaaggaggcccagtgtgtcaataggagaggtcctaaagcaacaaaaagggcggggtgtcttggatgggcttca

SEQ ID NO: 432973 - DNA, 2221 bp, Homo sapiens
caccacacctagcggttcaaaatgaacatctgaagcaacgaaggtcacagaaaaatgcactatttatctaggtaatggagatgatgtcttttgccagagaaagcaggcgcacgcagatgagagtgtctggattcctttttgtcttcataaagcgaatcttggactgaaaaacagtccaagagctgttggagctgccgggccagctctaatgaggcgcccaggcaagcactcatgggccccacaggtaccacgcaattgaacccttgtttgtctgataacttgcagtgacgtttatgacatgtgctgtctccacatctctttaccccttggatttctctaggatgactgagggacgtggctgcctctgggggcaccagcaccttctgtagcattgtggaacatttcttccatgaacttctactctggagctggagagaacagtctgccaagtcttacctggttcttccccatagccaccttggaatactctttgaacaagctctgctaaaaccaaacccatgaccactgtgttggtggtggggcctcatgctgtggctcagggagggcccctccctgcatgtgagtctagccttcctagacattacatgatgaccctttaaaaaaaaattagagatggaggtctcactatgttgcccaggctgatctcaaactcctggactcaagcgatccacccacctccacctcccaaggtgttgggattacaggcgtgagccaccgcacccagcctcatgttgaccctggccctggatagcagctttgtttgtagaggcaggtggtgggagagaccctaggacagcctgagagtaactggacctggtattggtgcggagtggggaatatcccttgtctaaatgcagagcagctgagagaagttagcggggctcttcctccgttctcattgtttcctgctttccttccccacccaccccttcctcagcactctgtgttgtagcctgtactatcctgcttcaagcctccgtgtcccttgtaccttccccctaccttgagttgccagttctttactccctcaaatgttcccatgccacctctggggtttctgttatctgacatccctggctgctttcctggtagatgccattcccagagaggccaacagcgttcccaggcgtggctggctggtccgcatctctcagactcactctgccaggctacagttttgagaataccttttttgttgttgttttgtacctggagaactttttatgaatgagtaaatcttcagaaaggaattcctccacccttactgggttattgtcaggtgtaaacggcctttcagctgagcaatgttcctatgagaaggaagccatttctcttggctcatgaacactgccttttgggtagtatacccacacccagatctgtgaagagacctggaattgaagtctccatgtcgtcaggacttggtggcatgtggatcttgcttgacttgggaaaagagagggtggtggtgaactaataattatggagtccccctaatgtgtcgaacacaatgctagatgatttccatgataataattactcatacttgtgctaagcacttgcgatatcgtacttctcacaacagtccatgaggtactgattattatccccattttctcatgagactaaagctcagagctctaggatagtatacagtggcaagaggaatttacatccaagcactcagatttcaaagcccacattcttaactaccggactattcatattacagagcaggaaaagggtctcagacaggttaagcaacctgcccagagtcacacagctaatgagtagcagaatcaggattcaaacccagagctgtcaaaagcaaaccttatgttccttccactgtcccctgcttccttgcccttcagaaaggtcttggaaacaggggccagaggatgtggtagccacttcactggtgttctgtgtctgaatgggactttctcacaggcaggccatgctgggacctcagccatgggggtggccagggaggtggttgagcagaaggatagctggggacactgactgggggtagagtcacccagtgtctttagacatcctgctgtctaaagcactgtgtccaaagggtatggcacacttatatggacaggtcaccattccaaacaaggaggcccagtgtgtcaataggagaggtcctaaagcaacaaaaagggcggggtgtcttggatgggcttca

SEQ ID NO: 432974 - DNA, 1124 bp, Homo sapiens
atcgcgggtccccgcgcgtcctgcagcacttcccgcgccgcgcccccagcccagtgcgccggctctgtgccggggtgcccgggcggtcgggagaatgagccgcatctaccacgacggcgcgctccggaacaaggcggtgcagagcgtccggctgccaggggcctgggaccccgccgcccaccaggggggaaatggtgtcctgctggagggagaactgatcgatgtatctcggcacagcatcttggacactcatggcaggaaggagcgctactacgtgctgtatatccggcccagtcacatccatcgccgtaaattcgacgccaagggaaatgaaatcgagcccaacttcagcgccaccaggaaggtgaacacgggcttcctcatgtcgtcctacaaggtggaagccaagggggacactgacaggctcacgcccgaggcgctgaaggggctggtcaacaagccagagctgctcgcgctgacagagagcctcacccccgaccacacagtggcgttctggatgcccgagtcagagatggaggtgatggaactcgagctgggggccggggtacggctgaagactcggggcgatggtcccttcctggattcattggccaaacttgaggctggaacagtgaccaagtgtaatttcactggtgatggaaagacaggggcatcctggacagacaacatcatggcccaaaagtgttcgaagggggctgcagcggagatccgagagcagggggatggggcagaggacgaggagtgggtaggtacctggtgttggtgcagttgtatctcctggcaggagcatggtacatactggttgaggttgtgggtaggatgagaagacgacaggatgaatcttaccccccagctttagtggaattctgtgaaacacctgggaatgtgttagcatcaggagaattcctctaaggtatgaagaatgacaacctgggacctttcttgtaggtggctctgaacctaactattccccaaagattcccaagtggtaggaaggagggggtgcagagggatattaatcatggtcattaagtctcaaaacatttctacttcaagtgaatacattaaccatgctgaggcagttgaacaactgaatgcgtagt

SEQ ID NO: 432975 - DNA, 333 bp, Homo sapiens
  misc_feature (322)..(322): n is a, c, g, or t
  misc_feature (333)..(333): n is a, c, g, or t
aatataggctaggtacgaggcctggtgttgaatcggccgaggagcggtgctgagagaaccgtggctggcaaagatgattcaggcgattctggttttcaacaaccatgggaagccacggctagtccgcttctaccagcgtttcccagaagaaattcaacagcagattgttcgagagactttccatctagtcctcaagcgggatgacaacatctgtaacttcttggagggtggaaggtttgatttggtggctctctactacaaactaatctaacccgcactatactacccccttactttttatatttgtgtggagactcaaaanagtgaacatcn

SEQ ID NO: 432976 - DNA, 848 bp, Homo sapiens
atcgatttgcatctgtatccgctgctccatctgcagtatacggacatgctccacttcacccacactgggtcattaaaagaacaaacaaaaataagaacttgatcgatttgggattttaaatggaaatgcactaaaaattccttaattccaccattcaccgtctaccatagaggaacagcccatctgcacggagagacagctacgtaattcactgcagcattataatactgaaaaattaaaatgaacgaaatgttccataaccgacgaacggccgaatgaccggcgtctccactccgcggaacgttctgcgagcgctaaggggatggcgggagtgcatgatttggagcgggcggtgagaaaagcaagctcccgccgcctctccgttttggcaacccggctgacggtcgtttcggcttctggggccagccgtcggtctgggcgagggacatagatccggattcgcatcctgactggccaaccaacgctggccgaggtgaccactctcctcggcatccgcacctgccctccaaggcgtcagagaggccggacccttgggtgctagggctcgtgagcgccggggccaagtttccgagtgccgctctcagcagcgcaccaaccggaagtgatcgtgtgtggcggaaggaggagctttctgggagtagccggtgctgagagaaccgtggctggcaaagatgattcaggcgattctggttttcaacaaccatgggaagccacggctagtccgcttctaccagcgtttcgtgagtgcggcccggcttcaccacgccccttcagggcgcccactatgtcttccctcctctttggcctctcggcgcccgggggcaccg

SEQ ID NO: 432977 - DNA, 2103 bp, Homo sapiens
gaggctggcgggtcggcgcgggcccagccgtgcgtgctcacgtgacgggtccgcgaggcccagctcgcgcagtcgttcgggtgagcgaagatggcggccgagagggaacctcctccgctgggggacgggaagcccaccgactttgaggatctggaggacggagaggacctgttcaccagcactgtctccaccctagagtcaagtccatcatctccagaaccagctagtcttcctgcagaagatattagtgcaaactccaatggcccaaaacccacagaagttgtattagatgatgacagagaagatctttttgcagaagccacagaagaagtttctttggacagccctgaaagggaacctatcctatcctcggaaccttctcctgcagtcacacctgtcactcctactacactcattgctcctagaattgaatcaaagagtatgtctgctcccgtgatctttgatagatccagggaagagattgaagaagaagcaaatggagacatttttgacatagaaattggtgtatcagatccagaaaaagttggtgatggcatgaatgcctatatggcatatagagtaacaacaaagacatctctttccatgttcagtaagagtgaattttcagtgaaaagaagattcagcgactttcttggtttgcacagcaaattagcaagcaaatatttacatgttggttatattgtgccaccagctccagaaaagagtatagtagggatgaccaaggtcaaagtgggtaaagaagactcatcatccactgagtttgtagaaaaacggagagcagctcttgaaaggtatcttcaaagaacagtaaaacatccaactttactacaggatcctgatttaaggcagttcttggaaagttcagagctgcctagagcagttaatacacaggctctgagtggagcaggaatattgaggatggtgaacaaggctgccgacgctgtcaacaaaatgacaatcaagatgaatgaatcggatgcatggtttgaagaaaagcagcagcaatttgagaatctggatcagcaacttaggaaacttcatgtcagtgttgaagccttggtctgtcatagaaaagaactttcagccaacacagctgcctttgctaaaagtgctgccatgttaggtaattctgaggatcatactgctttatctagagctttgtctcagcttgcagaggttgaggagaagatagaccagttacatcaagaacaagcttttgctgacttttatatgttttcagaactacttagtgactacattcgtcttattgctgcagtgaaaggtgtgtttgaccatcgaatgaagtgctggcagaaatgggaagatgctcaaattactttgctcaaaaaacgtgaagctgaagcaaaaatgatggttgctaacaaaccagataaaatacagcaagctaaaaatgaaataagagagtgggaggcgaaagtgcaacaaggggaaagagattttgaacagatatctaaaacgattcgaaaagaagtgggaagatttgagaaagaacgagtgaaggattttaaaaccgttatcatcaagtacttagaatcactagttcaaacacaacaacagctgataaaatactgggaagcattcctacctgaagccaaagccattgcctagcaataagattgttgccgttaagaagaccttggatgttgttccagttatgctggattccacagtgaaatcatttaaaaccatctaaataaaccactatatattttatgaattacatgtggttttatataacacacacacacacacacacacacacacactctgacattttattacaagctgcatgtcctgaccctctttgaattaagtggactgtggcatgacattctgcaatactttgctgaattgaacactattgtgtcttaaatacttgcactaaatagtgcactgcaagaccagaaaattttacaatattttttctttacaatatgttctgtagtatgtttaccctctttatgaagtgaattaccaatgctttgaataatgttcacttatacattcctgtacagaaattacgattttgtgattacagtaataaaatgatattccttgtga

SEQ ID NO: 432978 - DNA, 821 bp, Homo sapiens
  misc_feature (751)..(751): n is a, c, g, or t
  misc_feature (758)..(758): n is a, c, g, or t
  misc_feature (818)..(818): n is a, c, g, or t
gaggctggcgggtcggcgcgggcccagccgtgcgtgctcacgtgacgggtccgcgaggcccagctcgcgcagtcgttcgggtgagcgaagatggcggccgagagggaacctcctccgctgggggacgggaagcccaccgactttgaggatctggaggacggagaggacctgttcaccagcactgtctccaccctagagtcaagtccatcatctccagaaccagctagtcttcctgcagaagatattagtgcaaactccaatggcccaaaacccacagaagttgtattagatgatgacagagaagatctttttgcagaagccacagaagaagtttctttggacagccctgaaagggaacctatcctatcctcggaaccttctcctgcagtcacacctgtcactcctactacactcattgctcctagaattgaatcaaagagtatgtctgctcccgtgatctttgatagatccagggaagagattgaagaagaagcaaatggagacatttttgacatagaaattggtgtatcagatccagaaaaagttggtgatggcatgaatgcctatatggcatatagagtaacaacaaagacatctctttccatgttcagtaagagtgaattttcagtgaaaagaagattcagcgactttcttggtttgcacagcaaattagcaagcaaatatttacatgttggttatattgtgccaccagctccagaaaagagtatagtagggggattgtacccaaaanggggggnttccaaaaaaaagggttttgggggggggggtttttaaaaaaaagggggaaaaaagggggnaaa

SEQ ID NO: 432979 - DNA, 310 bp, Homo sapiens
atatcgtcgacccacgcgtccgcttaattcaaagagggtcaggacatgcagcttgtaataaaatggactgtggcatgacattctgcaatactttgctgaattgaacactattgtgtcttaaatacttgcactaaatagtgcactgcaagaccagaaaattttacaatattttttctttacaatatgttctgtagtatgtttaccctctttatgaagtgaattaccaatgctttgaataatgttcacttatacattcctgtacagaaattacgattttgtgattacagtaataaaatgatattccttgtga

SEQ ID NO: 432980 - DNA, 588 bp, Homo sapiens
tttgtcattcaattccagctgcctagagcagttaatacacaggctctgagtggagcaggaatattgaggatggtgaacaaggctgccgacgctgtcaacaaaatgacaatcaagatgaatgaatcggatgcatggtttgaagaaaagcagcagcaatttgagaatctggatcagcaacttaggatgcttcttgacgtcaagaagcatcctgagttaacttaaacaaagtacttgcaacagtgcctggcatgtagtcagcactattttatttatttatatttggagatggactttcaacatgtaggccaggctggtctcaaacttctgacctcaggtgattcatctgccttggcctcccaaaatgctgggattacaggcatgagccactacacctggacaattttcggctttcttgtactggaagtgggtcacttccagggctgtgcctccttttttatataattaggagacgagtctagctgggtcgcccaggttagagttgagtagtgccatcattggctcactgaagtcttgacctcccaggctcaattgattctcacacctccagctcacctccagctcctgagt

SEQ ID NO: 432981 - DNA, 2294 bp, Homo sapiens
gaggctggcgggtcggcgcgggcccagccgtgcgtgctcacgtgacgggtccgcgaggcccagctcgcgcagtcgttcgggtgagcgaagatggcggccgagagggaacctcctccgctgggggacgggaagcccaccgactttgaggatctggaggacggagaggacctgttcaccagcactgtctccaccctagagtcaagtccatcatctccagaaccagctagtcttcctgcagaagatattagtgcaaactccaatggcccaaaacccacagaagttgtattagatgatgacagagaagatctttttgcagaagccacagaagaagtttctttggacagccctgaaagggaacctatcctatcctcggaaccttctcctgcagtcacacctgtcactcctactacactcattgctcctagaattgaatcaaagagtatgtctgctcccgtgatctttgatagatccagggaagagattgaagaagaagcaaatggagacatttttgacatagaaattggtgtatcagatccagaaaaagttggtgatggcatgaatgcctatatggcatatagagtaacaacaaagacatctctttccatgttcagtaagagtgaattttcagtgaaaagaagattcagcgactttcttggtttgcacagcaaattagcaagcaaatatttacatgttggttatattgtgccaccagctccagaaaagagtatagtagggatgaccaaggtcaaagtgggtaaagaagactcatcatccactgagtttgtagaaaaacggagagcagctcttgaaaggtatcttcaaagaacagtaaaacatccaactttactacaggatcctgatttaaggcagttcttggaaagttcagagctgcctagagcagttaatacacaggctctgagtggagcaggaatattgaggatggtgaacaaggctgccgacgctgtcaacaaaatgacaatcaagatgaatgaatcggatgcatggtttgaagaaaagcagcagcaatttgagaatctggatcagcaacttaggaaacttcatgtcagtgttgaagccttggtctgtcatagaaaagaactttcagccaacacagctgcctttgctaaaagtgctgccatgttaggtaattctgaggatcatactgctttatctagagctttgtctcagcttgcagaggttgaggagaagatagaccagttacatcaagaacaagcttttgctgacttttatatgttttcagaactacttagtgactacattcgtcttattgctgcagtgaaaggtgtgtttgaccatcgaatgaagtgctggcagaaatgggaagatgctcaaattactttgctcaaaaaacgtgaagctgaagcaaaaatgatggttgctaacaaaccagataaaatacagcaagctaaaaatgaaataagagagtgggaggcgaaagtgcaacaaggggaaagagattttgaacagatatctaaaacgattcgaaaagaagtgggaagatttgagaaagaacgagtgaaggattttaaaaccgttatcatcaagtacttagaatcactagttcaaacacaacaacagctgataaaatactgggaagcattcctacctgaagccaaagccattgcctagcaataagattgttgccgttaagaagaccttggatgttgttccagttatgctggattccacagtgaaatcatttaaaaccatctaaataaaccactatatattttatgaattacatgtggttttatataacacacacacacacacacacacacacacactctgacattttattacaagctgcatgtcctgaccctctttgaattaagtggactgtggcatgacattctgcaatactttgctgaattgaacactattgtgtcttaaatacttgcactaaatagtgcactgcaagaccagaaaattttacaatattttttctttacaatatgttctgtagtatgtttaccctctttatgaagtgaattaccaatgctttgaataatgttcacttatacattcctgtacagaaattacgattttgtgattacagtaataaaatgatattccttgtgaaatattagtaacaaattatttgggtatttaaacattaggaatcttttcaaagcatttttaataggaagaaatttttcttctagatgtatataggtgatgccatgattccttaattattttaattgacaaagctgaactcattaaatgactaaatgaagcttaagttttcttatgaaaccatcataaatcaa

SEQ ID NO: 432982 - DNA, 1758 bp, Homo sapiens
gaggctggcgggtcggcgcgggcccagccgtgcgtgctcacgtgacgggtccgcgaggcccagctcgcgcagtcgttcgggtgagcgaagatggcggccgagagggaacctcctccgctgggggacgggaagcccaccgactttgaggatctggaggacggagaggacctgttcaccagcactgtctccaccctagagtcaagtccatcatctccagaaccagctagtcttcctgcagaagatattagtgcaaactccaatggcccaaaacccacagaagttgtattagatgatgacagagaagatctttttgcagaagccacagaagaagtttctttggacagccctgaaagggaacctatcctatcctcggaaccttctcctgcagtcacacctgtcactcctactacactcattgctcctagaattgaatcaaagagtatgtctgctcccgtgatctttgatagatccagggaagagattgaagaagaagcaaatggagacatttttgacatagaaattggtgtatcagatccagaaaaagttggtgatggcatgaatgcctatatggcatatagagtaacaacaaagacatctctttccatgttcagtaagagtgaattttcagtgaaaagaagattcagcgactttcttggtttgcacagcaaattagcaagcaaatatttacatgttggttatattgtgccaccagctccagaaaagagtatagtagggatgaccaaggtcaaagtgggtaaagaagactcatcatccactgagtttgtagaaaaacggagagcagctcttgaaaggtatcttcaaagaacagtaaaacatccaactttactacaggatcctgatttaaggcagttcttggaaagttcagagctgcctagagcagttaatacacaggctctgagtggagcaggaatattgaggatggtgaacaaggctgccgacgctgtcaacaaaatgacaatcaagatgaatgaatcggatgcatggtttgaagaaaagcagcagcaatttgagaatctggatcagcaacttaggaaacttcatgtcagtgttgaagccttggtctgtcatagaaaagaactttcagccaacacagctgcctttgctaaaagtgctgccatgttaggtaattctgaggatcatactgctttatctagagctttgtctcagcttgcagaggttgaggagaagatagaccagttacatcaagaacaagcttttgctgacttttatatgttttcagaactacttagtgactacattcgtcttattgctgcagtgaaaggtgtgtttgaccatcgaatgaagtgctggcagaaatgggaagatgctcaaattactttgctcaaaaaacgtgaagctgaagcaaaaatgatggttgctaacaaaccagataaaatacagcaagctaaaaatgaaataagagagtgggaggcgaaagtgcaacaaggggaaagagattttgaacagatatctaaaacgattcgaaaagaagtgggaagatttgagaaagaacgagtgaaggattttaaaaccgttatcatcaagtacttagaatcactagttcaaacacaacaacagctgataaaatactgggaagcattcctacctgaagccaaagccattgcctagcaataagattgttgccgttaagaagaccttggatgttgttccagttatgctggattccacagtgaaatcatttaaaaccatctaaataaaccactatatattttatga

SEQ ID NO: 432983 - DNA, 1985 bp, Homo sapiens
gaggctggcgggtcggcgcgggcccagccgtgcgtgctcacgtgacgggtccgcgaggcccagctcgcgcagtcgttcgggtgagcgaagatggcggccgagagggaacctcctccgctgggggacgggaagcccaccgactttgaggatctggaggacggagaggacctgttcaccagcactgtctccaccctagagtcaagtccatcatctccagaaccagctagtcttcctgcagaagatattagtgcaaactccaatggcccaaaacccacagaagttgtattagatgatgacagagaagatctttttgcagaagccacagaagaagtttctttggacagccctgaaagggaacctatcctatcctcggaaccttctcctgcagtcacacctgtcactcctactacactcattgctcctagaattgaatcaaagagtatgtctgctcccgtgatctttgatagatccagggaagagattgaagaagaagcaaatggagacatttttgacatagaaattggtgtatcagatccagaaaaagttggtgatggcatgaatgcctatatggcatatagagtaacaacaaagacatctctttccatgttcagtaagagtgaattttcagtgaaaagaagattcagcgactttcttggtttgcacagcaaattagcaagcaaatatttacatgttggttatattgtgccaccagctccagaaaagagtatagtagggatgaccaaggtcaaagtgggtaaagaagactcatcatccactgagtttgtagaaaaacggagagcagctcttgaaaggtatcttcaaagaacagtaaaacatccaactttactacaggatcctgatttaaggcagttcttggaaagttcagagctgcctagagcagttaatacacaggctctgagtggagcaggaatattgaggatggtgaacaaggctgccgacgctgtcaacaaaatgacaatcaagatgaatgaatcggatgcatggtttgaagaaaagcagcagcaatttgagaatctggatcagcaacttaggaaacttcatgtcagtgttgaagccttggtctgtcatagaaaagaactttcagccaacacagctgcctttgctaaaagtgctgccatgttaggtaattctgaggatcatactgctttatctagagctttgtctcagcttgcagaggttgaggagaagatagaccagttacatcaagaacaagcttttgctgacttttatatgttttcagaactacttagtgactacattcgtcttattgctgcagtgaaaggtgtgtttgaccatcgaatgaagtgctggcagaaatgggaagatgctcaaattactttgctcaaaaaacgtgaagctgaagcaaaaatgatggttgctaacaaaccagataaaatacagcaagctaaaaatgaaataagagagtgggaggcgaaagtgcaacaaggggaaagagattttgaacagatatctaaaacgattcgaaaagaagtgggaagatttgagaaagaacgagtgaaggattttaaaaccgttatcatcaagtacttagaatcactagttcaaacacaacaacaggtaagccatttttgtttataacttaaacttctagaatttgtttttggtatactttcttattttaaaaagatgattaatgaactgggcatttaaactcaagaataagaaatggaagacagaaagccagtgatggtaaaggataaaagggtaaactaatcggaaactatctcacgtgttttttttttttttttgcctctgcttaacactaaggcagagatagacttttcccagttttaggccatcagaaacctcatgggcaactttcccctttcactgtctttctagtttgttttccttgttggtcagacctgtttgagtaaattctcatagtaagttcttctcttccataacaaatagaacttaagctaaacactttttcagaatta

SEQ ID NO: 432984 - DNA, 1357 bp, Homo sapiens
  misc_feature (1307)..(1307): n is a, c, g, or t
  misc_feature (1313)..(1314): n is a, c, g, or t
gaggctggcgggtcggcgcgggcccagccgtgcgtgctcacgtgacgggtccgcgaggcccagctcgcgcagtcgttcgggtgagcgaagatggcggccgagagggaacctcctccgctgggggacgggaagcccaccgactttgaggatctggaggacggagaggacctgttcaccagcactgtctccaccctagagtcaagtccatcatctccagaaccagctagtcttcctgcagaagatattagtgcaaactccaatggcccaaaacccacagaagttgtattagatgatgacagagaagatctttttgcagaagccacagaagaagtttctttggacagccctgaaagggaacctatcctatcctcggaaccttctcctgcagtcacacctgtcactcctactacactcattgctcctagaattgaatcaaagagtatgtctgctcccgtgatctttgatagatccagggaagagattgaagaagaagcaaatggagacatttttgacatagaaattggtgtatcagatccagaaaaagttggtgatggcatgaatgcctatatggcatatagagtaacaacaaagacatctctttccatgttcagtaagagtgaattttcagtgaaaagaagattcagcgactttcttggtttgcacagcaaattagcaagcaaatatttacatgttggttatattgtgccaccagctccagaaaagagtatagtagggatgaccaaggtcaaagtgggtaaagaagactcatcatccactgagtttgtagaaaaacggagagcagctcttgaaaggtatcttcaaagaacagtaaaacatccaactttactacaggatcctgatttaaggcagttcttggaaagttcagagctgcctagagcagttaatacacaggctctgagtggagcaggaatattgaggatggtgaacaaggctgccgacgctgtcaacaaaatgacaatcaagatgaatgaatcggatgcatggtttgaagaaaagcagcagcaatttgagaatctggatcagcaacttaggaaacttcatgtcagtgttgaagccttggtctgtcatagaaaagaactttcagccaacacagctgcctttgctaaaagtgctgccatgttaggtaattctgaggatcatactgctttatctagagctttgtctcagcttgcagaggttgaggagaagatagaccagttacatcaagaacaagcttttgctgacttttatatgttttcagaactacttagtgactacattcgtcttattgctgcagtgaaaggtgngtttgnncatcgaatgaagtgttggcttccagaatggtaatcgaattcct

SEQ ID NO: 432985 - DNA, 1939 bp, Homo sapiens
gaggctggcgggtcggcgcgggcccagccgtgcgtgctcacgtgacgggtccgcgaggcccagctcgcgcagtcgttcgggtgagcgaagatggcggccgagagggaacctcctccgctgggggacgggaagcccaccgactttgaggatctggaggacggagaggacctgttcaccagcactgtctccaccctagagtcaagtccatcatctccagaaccagctagtcttcctgcagaagatattagtgcaaactccaatggcccaaaacccacagaagttgtattagatgatgacagagaagatctttttgcagattgaagaagaagcaaatggagacatttttgacatagaaattggtgtatcagatccagaaaaagttggtgatggcatgaatgcctatatggcatatagagtaacaacaaagacatctctttccatgttcagtaagagtgaattttcagtgaaaagaagattcagcgactttcttggtttgcacagcaaattagcaagcaaatatttacatgttggttatattgtgccaccagctccagaaaagagtatagtagggatgaccaaggtcaaagtgggtaaagaagactcatcatccactgagtttgtagaaaaacggagagcagctcttgaaaggtatcttcaaagaacagtaaaacatccaactttactacaggatcctgatttaaggcagttcttggaaagttcagagctgcctagagcagttaatacacaggctctgagtggagcaggaatattgaggatggtgaacaaggctgccgacgctgtcaacaaaatgacaatcaagatgaatgaatcggatgcatggtttgaagaaaagcagcagcaatttgagaatctggatcagcaacttaggaaacttcatgtcagtgttgaagccttggtctgtcatagaaaagaactttcagccaacacagctgcctttgctaaaagtgctgccatgttaggtaattctgaggatcatactgctttatctagagctttgtctcagcttgcagaggttgaggagaagatagaccagttacatcaagaacaagcttttgctgacttttatatgttttcagaactacttagtgactacattcgtcttattgctgcagtgaaaggtgtgtttgaccatcgaatgaagtgctggcagaaatgggaagatgctcaaattactttgctcaaaaaacgtgaagctgaagcaaaaatgatggttgctaacaaaccagataaaatacagcaagctaaaaatgaaataagagagtgggaggcgaaagtgcaacaaggggaaagagattttgaacagatatctaaaacgattcgaaaagaagtgggaagatttgagaaagaacgagtgaaggattttaaaaccgttatcatcaagtacttagaatcactagttcaaacacaacaacagctgataaaatactgggaagcattcctacctgaagccaaagccattgcctagcaataagattgttgccgttaagaagaccttggatgttgttccagttatgctggattccacagtgaaatcatttaaaaccatctaaataaaccactatatattttatgaattacatgtggttttatataacacacacacacacacacacacacacacactctgacattttattacaagctgcatgtcctgaccctctttgaattaagtggactgtggcatgacattctgcaatactttgctgaattgaacactattgtgtcttaaatacttgcactaaatagtgcactgcaagaccagaaaattttacaatattttttctttacaatatgttctgtagtatgtttaccctctttatgaagtgaattaccaatgctttgaataatgttcacttatacattcctgtacagaaattacgattttgtgattacagtaataaaatgatattccttgtga

SEQ ID NO: 432986 - DNA, 1146 bp, Homo sapiens
gaggctggcgggtcggcgcgggcccagccgtgcgtgctcacgtgacgggtccgcgaggcccagctcgcgcagtcgttcgggtgagcgaagatggcggccgagagggaacctcctccgctgggggacgggaagcccaccgactttgaggatctggaggacggagaggacctgttcaccagcactgtctccaccctagagtcaagtccatcatctccagaaccagctagtcttcctgcagaagatattagtgcaaactccaatggcccaaaacccacagaagttgtattagatgatgacagagaagatctttttgcagaagccacagaagaagtttctttggacagccctgaaagggaacctatcctatcctcggaaccttctcctgcagtcacacctgtcactcctactacactcattgctcctagaattgaatcaaagagtatgtctgctcccgtgatctttgatagatccagggaagagattgaagaagaagcaaatggagacatttttgacatagaaattggtgtatcagatccagaaaaagttggtgatggcatgaatgcctatatggcatatagagtaacaacaaagacatctctttccatgttcagtaagagtgaattttcagtgaaaagaagattcagcgactttcttggtttgcacagcaaattagcaagcaaatatttacatgttggttatattgtgccaccagctccagaaaagagtatagtagggatgaccaaggtcaaagtgggtaaagaagactcatcatccactgagtttgtagaaaaacggagagcagctcttgaaaggtatcttcaaagaacagtaaaacatccaactttactacaggatcctgatttaaggcagttcttggaaagttcagagctgcctagagcagttaatacacaggctctgagtggagcaggaatattgaggatggtgaacaaggctgccgacgctgtcaacaaaatgacaatcaagatgaatgaatcggatgcagtaagagctgatttttcggcttgaataatgagatgaattaatgagcccaacaattgcattttaaagctgtacaagtggaaaataggatattaatttgcttattgagtttagttctcagccacatcagttggccaccatggttat

SEQ ID NO: 432987 - DNA, 1168 bp, Homo sapiens
gaggctggcgggtcggcgcgggcccagccgtgcgtgctcacgtgacgggtccgcgaggcccagctcgcgcagtcgttcgggtgagcgaagatggcggccgagagggaacctcctccgctgggggacgggaagcccaccgactttgaggatctggaggacggagaggacctgttcaccagcactgtctccaccctagagtcaagtccatcatctccagaaccagctagtcttcctgcagaagatattagtgcaaactccaatggcccaaaacccacagaagttgtattagatgatgacagagaagatctttttgcagaagccacagaagaagtttctttggacagccctgaaagggaacctatcctatcctcggaaccttctcctgcagtcacacctgtcactcctactacactcattgctcctagaattgaatcaaagagtatgtctgctcccgtgatctttgatagatccagggaagagattgaagaagaagcaaatggagacatttttgacatagaaattggtgtatcagatccagaaaaagttggtgatggcatgaatgcctatatggcatatagagtaacaacaaagacatctctttccatgttcagtaagagtgaattttcagtgaaaagaagattcagcgactttcttggtttgcacagcaaattagcaagcaaatatttacatgttggttatattgtgccaccagctccagaaaagagtatagtagggatgaccaaggtcaaagtgggtaaagaagactcatcatccactgagtttgtagaaaaacggagagcagctcttgaaaggtaattctagacagctatattttattactctcatgtttgtaccttaatataaatgtaattccattatatggcaaaactgtgttttaatgattaaattttttccaaagtaccacttggtggcttttaagactgctttaaacttttttaagaaaattacttctttcaacaaagtactgtataattgttctgtataatttttagtaatcctcatcaatagtctaacaaaataacacttgtttttctattatatgctacaagcaggagcatataatagaaaacatataaagacatgagttagctggggatagaattgtatcataggtagtcaccaagagttactaagaaactgctaaact

SEQ ID NO: 432988 - DNA, 1125 bp, Homo sapiens
  misc_feature (8)..(8): n is a, c, g, or t
tgcacacnccgagaacccagaccatggtttgaagaaaagcagcagcaatttgagaatctggatcagcaacttaggaaacttcatgtcagtgttgaagccttggtctgtcatagaaaagaactttcagccaacacagctgcctttgctaaaagtgctgccatgttaggtaattctgaggatcatactgctttatctagagctttgtctcagcttgcagaggttgaggagaagatagaccagttacatcaagaacaagcttttgctgacttttatatgttttcagaactacttagtgactacattcgtcttattgctgcagtgaaaggtgtgtttgaccatcgaatgaagtgctggcagaaatgggaagatgctcaaattactttgctcaaaaaacgtgaagctgaagcaaaaatgatggttgctaacaaaccagataaaatacagcaagctaaaaatgaaataagagagtgggaggcgaaagtgcaacaaggggaaagagattttgaacagatatctaaaacgattcgaaaagaagtgggaagatttgagaaagaacgagtgaaggattttaaaaccgttatcatcaagtacttagaatcactagttcaaacacaacaacagctgataaaatactgggaagcattcctacctgaagccaaagccattgcctagcaataagattgttgccgttaagaagaccttggatgttgttccagttatgctggattccacagtgaaatcatttaaaaccatctaaataaaccactatatattttatgaattacatgtggttttatataacacacacacacacacacacacacacacactctgacattttattacaagctgcatgtcctgaccctctttgaattaagtggactgtggcatgacattctgcaatactttgctgaattgaacactattgtgtcttaaatacttgcactaaatagtgcactgcaagaccagaaaattttacaatattttttctttacaatatgttctgtagtatgtttaccctctttatgaagtgaattaccaatgctttgaataatgttcacttatacattcctgtacagaaattacgattttgtgattacagtaataaaatgatattccttgtga

SEQ ID NO: 432989 - DNA, 960 bp, Homo sapiens
tgacttttatatgttttcagaactacttagtgactacattcgtcttattgctgcagtgaaaggtgtgtttgaccatcgaatcaagaacaagcttttgctgacttttatatgttttcagaactacttagtgactacattcgtcttattgctgcagtgaaaggtgtgtttgaccatcgaatgaagtgctggcagaaatgggaagatgctcaaattactttgctcaaaaaacgtgaagctgaagcaaaaatgatggttgctaacaaaccagataaaatacagcaagctaaaaatgaaataagagagtgggaggcgaaagtgcaacaaggggaaagagattttgaacagatatctaaaacgattcgaaaagaagtgggaagatttgagaaagaacgagtgaaggattttaaaaccgttatcatcaagtacttagaatcactagttcaaacacaacaacagctgataaaatactgggaagcattcctacctgaagccaaagccattgcctagcaataagattgttgccgttaagaagaccttggatgttgttccagttatgctggattccacagtgaaatcatttaaaaccatctaaataaaccactatatattttatgaattacatgtggttttatataacacacacacacacacacacacacacacactctgacattttattacaagctgcatgtcctgaccctctttgaattaagtggactgtggcatgacattctgcaatactttgctgaattgaacactattgtgtcttaaatacttgcactaaatagtgcactgcaagaccagaaaattttacaatattttttctttacaatatgttctgtagtatgtttaccctctttatgaagtgaattaccaatgctttgaataatgttcacttatacattcctgtacagaaattacgattttgtgattacagtaataaaatgatattccttgtga

SEQ ID NO: 432990 - DNA, 2569 bp, Homo sapiens
cccgcctcgcgcctcccgcctcccgcctcccgcctccctccagctgcgagtgcggcctcggctggcggcggcaccaggccacagttgtaagggatcttgtggctgtcaggatggcagaggagcaggagttcacccagctctgcaagttgcctgcacagccctcacacccacactgcgtgaacaacacctaccgcagcgcacagcactcccaggctctgctccgagggctgctggctctccgggacagcggaatcctcttcgatgttgtgctggtggtggagggcagacacatcgaggcccatcgcatcctgctggctgcgtcctgcgattacttcagaggaatgtttgctgggggattgaaggagatggaacaggaagaggtcctgatccacggtgtgtcctacaatgctatgtgccaaatcctacatttcatatacacctccgagctggagctcagcctgagcaatgtacaagagacactggtggctgcctgccagcttcagatcccagaaattatccatttctgctgtgatttcctcatgtcctgggtggacgaagagaacattctcgatgtctaccggctggcagagctgtttgacttgagccgcctgactgagcaactggacacctatatcctcaaaaactttgtggccttctctcggactgacaagtaccgccagcttccattggagaaggtctactccctcctcagcagcaatcgcctggaggtctcctgcgagaccgaggtatatgagggggcccttctctaccattatagcctggagcaggtgcaggctgaccagatctcgctgcacgagcccccaaagctccttgagacagtgcggtttccgctgatggaagctgaggtcctgcagcggctgcatgacaagctggaccccagccctttgagggacacagtggccagcgccctcatgtaccaccggaacgagagcctacagcccagcctgcagagcccgcaaacggagctgcggtcggacttccagtgcgttgtgggcttcgggggcattcactccacgccgtccactgtcctcagcgaccaggccaagtatctaaaccccttactgggagagtggaagcacttcactgcctccctggccccccgcatgtccaaccagggcatcgcggtgctcaacaacttcgtatacttgattggaggggacaacaatgtccaaggatttcgagcagagtcccgatgctggaggtatgacccacggcacaaccgctggttccagatccagtccctgcagcaggagcacgccgacctgtccgtgtgtgttgtaggcaggtacatctacgctgtggcgggccgtgactaccacaatgacctgaatgctgtggagcgctacgaccctgccaccaactcctgggcatacgtggccccactcaagagggaggtgtatgcccacgcaggcgcgacgctggaggggaagatgtatatcacctgcggccgcagaggggaggattacctgaaagagacacactgctacgatccaggcagcaacacttggcacacactggctgatgggcctgtgcggcgcgcctggcacggcatggcaaccctcctcaacaagctgtatgtgatcgggggcagcaacaacgatgccggatacaggagggacgtgcaccaggtggcctgctacagctgcacgtctggacagtggtcatctgtctgcccactccctgctgggcacggtgagcctggcattgctgtgctggacaacaggatctatgtgttaggtggccgctcacacaaccgcggcagccgcacaggctacgtgcacatttacgatgtggagaaggactgctgggaggaagggccccagctggacaactccatctcaggcctggcggcctgtgtgctcaccctgccccgctccctgctccttgagccgccccgcgggacccctgaccgcagccaggccgacccggactttgcctctgaggtgatgagtgtgtctgactgggaggagtttgacaactccagtgaggactaggctccctgtgcctggcatcagagggaagggaggctggggctgcagggcagtgaaacccacgcagcctaggccagagcactttactccaggcagggcccctgcccctgttggccacagcttatgggccctgccctctttcttcacaccagccccttggccagcctgccgcaggcatctcagggccatgcagatcccaggctgtggattacgtcactgcaggaactgcttctgaaaggctttggccttcctcagtgagccctggaggggttggccttctctcctccctgcctagatcagtccttctccaaaaggacctgggagctggcagcctgggcaggggggctgaggcacgtggtagccctctttctgtgaatggggtggggctgtgggggcagctggggttggaggatgagagctcctgaggggcagaggagcagagatgcatcagctcgcctgggactggctctgtgataaaaagacccctcccgctgggttttcagaccccatgttgttggtcaatgaaataaagcatcttacagaaggtgttaactgtt

SEQ ID NO: 432991 - DNA, 1770 bp, Homo sapiens
cccgcctcgcgcctcccgcctcccgcctcccgcctccctccagctgcgagtgcggcctcggctggcggcggcaccaggccacagttgtaagggatcttgtggctgtcaggatggcagaggagcaggagttcacccagctctgcaagttgcctgcacagccctcacacccacactgcgtgaacaacacctaccgcagcgcacagcactcccaggctctgctccgagggctgctggctctccgggacagcggaatcctcttcgatgttgtgctggtggtggagggcagacacatcgaggcccatcgcatcctgctggctgcgtcctgcgattacttcagaggaatgtttgctgggggattgaaggagatggaacaggaagaggtcctgatccacggtgtgtcctacaatgctatgtgccaaatcctacatttcatatacacctccgagctggagctcagcctgagcaatgtacaagagacactggtggctgcctgccagcttcagatcccagaaattatccatttctgctgtgatttcctcatgtcctgggtggacgaagagaacattctcgatgtctaccggctggcagagctgtttgacttgagccgcctgactgagcaactggacacctatatcctcaaaaactttgtggccttctctcggactgacaagtaccgccagcttccattggagaaggtctactccctcctcagcagcaatcgcctggaggtctcctgcgagaccgaggtatatgagggggcccttctctaccattatagcctggagcaggtgcaggctgaccagatctcgctgcacgagcccccaaagctccttgagacagtgcggtttccgctgatggaagctgaggtcctgcagcggctgcatgacaagctggaccccagccctttgagggacacagtggccagcgccctcatgtaccaccggaacgagagcctacagcccagcctgcagagcccgcaaacggagctgcggtcggacttccagtgcgttgtgggcttcgggggcattcactccacgccgtccactgtcctcagcgaccaggccaagtatctaaaccccttactgggagagtggaagcacttcactgcctccctggccccccgcatgtccaaccagggcatcgcggtgctcaacaacttcgtatacttgattggaggggacaacaatgtccaaggatttcgagcagagtcccgatgctggaggtatgacccacggcacaaccgctggttccagatccagtccctgcagcaggagcacgccgacctgtccgtgtgtgttgtaggcaggtacatctacgctgtggcgggccgtgactaccacaatgacctgaatgctgtggagcgctacgaccctgccaccaactcctgggcatacgtggccccactcaagagggaggtgtatgcccacgcaggcgcgacgctggaggggaagatgtatatcacctgcggccgcagaggggaggattacctgaaagagacacactgctacgatccaggcagcaacacttggcacacactggctgatgggcctgtgcggcgcgcctggcacggcatggcaaccctcctcaacaagctgtatgtgatcgggggcagtggggttggaggatgagagctcctgaggggcagaggagcagagatgcatcagctcgcctgggactggctctgtgataaaaagacccctcccgctgggttttcagaccccatgttgttggtcaatgaaataaagcatcttacagaaggtgttaactgtt

SEQ ID NO: 432992 - DNA, 3741 bp, Homo sapiens
gaggctgaggcaggagaattgcttgaacctaggaggcagaggttgcagtgagccgagaccgtgcctttgcactccagcctgggcgacagagtgagactccatctcaaaaacaaaaaaccttggcaaaatactgcaaataaccccattaaaaagagggcaaaagaagccgggcacggtggctcacacctgtaatcccagcactttgggaggccaaggtgggtggatcacgaggtcaggagattgagaccatcctggctaacacggtgaaaccccatctctactaaaaatacaaaaaattagctggatgtggtggcggacgtctatagtcccagctacttgggaggctgaggcaggagaatggtgtgaacccaggaggcagagggtgcagtgagctgagattgtgccactgcactccagcctgggcgacacggcaagactctgtctcaaaaaaaaacaaacaaaacaaaacaaaacaaaacaaaaaacagaaggcaaaagagttgaagaaacatttcactgaagaggatgtatagatggcaaataagcatataaggagatatgtaacattattagctatcagggaaatgcaaattaaagccacagtgagagaactacctcaggatgactaaaataaaaagtagtgaaaatacgaaatactggtgactgtgcagggaaactatgctcatggattgctgataggaatgtgaaatggtacagccactctggaaaacagatctggcagttaccatcctgggtatttatcccagagaaatgaaaactactctgtatacgttagccaggcatggtgatgcgtgcctgtaatcccagctactccggaggctgaggcacaagaattgcttgaacccgggaggcagaggttgcagtgagccaagattgtgccactatattccagcatgggcaatagaccaagaccctgtctcaaaaaaataaaaaataacttatctgtacatgaatgttaatagtagctttattggtaatagccagaaactggaaacaaatcaggtgttttcaacagtgaatggttaaacaagctgtggtagatacccatggaatactactgagcaatagaaaaggaaccaactattggtacatgttgagtaccctttatctgaaatgctggggaccagaagtgttttggatttcagattttttcagattttggaatctttgcattatagttactggttcagcatttcttatccaaaagtctgaaatgcatttcctttgagtgccgtgtttgtgctcaaaaagtctcagattttggaggtactcaacctgtacatgcaacaacctggtagaacctgggttggggtagaaagccaatgtcaaaaggttgtatactgatttaattcagacaacactcttgaagttacaaaactgtagaaatagagaagagattggtggtttccagggcttaaggaagggattagggtaagggaggtgagtggatgtcaccctaaagggcagcccctcgggatcctggtggtgataggacagttctgtggctgtgtccacgtcagcatcctggtgaccctgtgatatagtgacacaggctcctaccatgggggaaagaaggcacgtgagacctctgtatttttacttccaactacacgtgactacacttatctcaaaatgaaaagtttaattaaaaagaaaaacctcggctgggcgtggtggctcatgcctataatcctagcactttggaaggccgaggcaggtgggtcacgaggtcaggagatcgagaccatcctggccaacatggtgaaaccctgtctctattaaaaatacaaaagttagctgggtatggtggcgggcgcctataatcccagctactcgggaagctgaggcaggagaatcattcgaacccgggaggcggagattgcagtgagccgagatcgtgccactgcactccggcctggtgacagagcgagactccgtctcaaaaaaaaaaaaagaaaaacctccccagacccctactggtgataggagaagacccaaaccaaacccttggtgtgtgttcttcctccccactgctccgtccacctctctagactcttgtgtttttgccacccgcatggcctcagtgttagtgacttgcccagtaacatagctctggagcctccacaccctgaggggctcctctaccctcaaaacacccagggccttgccttggggccttctgttggcctgctgggtgtgagtgggtgggttccggaagtggtagggccagggtaagaggtgcccatgatgggggcaggctgggccctatggagatagcccaacagagggagggtaaaaagcccacagaaggttcaggaccagaatcaagaaccatgtgtatttttctccccacatcatgagtttagtgtcagatattatttacaaacattttaaaagcagggtcagcaggcccggaggattgcatgtccagtgggagtgggggaggggtggaggccactgagggtgggtcagcggtccccagggttctgtggcttcttccagactggcttggaaaaaatgcttttattttcttggagttcccccatgcagatgttaactttaggggcaaaggaaagacaaaggctacatttcatttctgagtctatagatgtatccgctattgggaagaggttagaggtcaatgactaggacagtatgtcccatgagaatcgagggaggattcttgtctgtatgtgagtgggaagtggtgaagcctcacagcgttgtcaggcaggtgtggggtggtgattggccttgacagagtacccagccacccttcctcactgccctctcacgccatttctcctggtggctccacacaggtgtatgcccacgcaggcgcgacgctggaggggaagatgtatatcacctgcggccgcagaggggaggattacctgaaagagacacactgctacgatccaggcagcaacacttggcacacactggctgatgggcctgtgcggcgcgcctggcacggcatggcaaccctcctcaacaagctgtatgtgatcgggggcagcaacaacgatgccggatacaggagggacgtgcaccagcaggtgagtggggcccggggcagtccacacccgtcatcattcccaagcctctcagttgttattgatggaaaatgtaattgaatcatgtgccttttaaaaatagactattttttagagcagttttaggttcacagcaaaattaagtggaaggtacagtttccatacacccccttttccccccatacacatatagcctccccactgcagacctctcgctccagaggggtggatgtgtcacagttgttgaaactgcattgatgcatcaccatcaaccagagtccacagtgttcactcttggcacattctataggtttggacaaatgtcaccatgacagtatcacacacatacacatctacctttgcttattactcttaaaaacttttaggccggatgtggtggcacatgcctgtaatccaagcagtttgggaagccaaggcgagaggatcacttgagctcaggagcttgagaccagcctgggcatcatggcaaaaccccatctctacaaaaatacaaaaattagccaggtgtggttgcatgcctgtactctcagctacttgggaggctgaggttgggggatggctggagcccaggaggcagaggtttcagtaagctgagatcacgccactgcactccagcctgggcgacagagccaggccttgtctc

SEQ ID NO: 432993 - DNA, 3188 bp, Homo sapiens
gcaagttttatatcagcatatatttttcattttttcttttaaagatatataatcatgtgccacacagtgatgtttccgtcaatgacagaccagaccacatgaaggatggtggtcccatatttttactgtaccttgtctgtgtttagatacacaaattccattgtgttacagttgcctatagtattcagtactgtgatattgtgaaatatatatttggtcttgtctcatttcttggcatacaacttctaaaatctttggactttccagagtgatgcctttttgtatgctggccagcagcccctaggtagcttcaggatgggggctggtgacaggaaaggccaaggcaggcataagagggttgggactttcagcctcacctctcaacctccggagaggggagacaggctgaagattaagttcatcaccaatggccagtgatttaatcagtcatgcctacataatgaagcttccataaaaattctgaatgactgggtttggaaaacttctggatagttgaacacatggaggctcctaaagagtgatgttcctggagagggcctggaagctctgcaccacttcccacatgtctggccccatgcatctcttcatcttaaaggaaagtaggccctggaaatgccacccccttggcacccacctcccagactcctggctgtgtgtctcctgaccactactcaggccacagttgtaagggatcttgtggctgtcaggatggcagaggagcaggagttcacccagctctgcaagttgcctgcacagccctcacacccacactgcgtgaacaacacctaccgcagcgcacagcactcccaggctctgctccgagggctgctggctctccgggacagcggaatcctcttcgatgttgtgctggtggtggagggcagacacatcgaggcccatcgcatcctgctggctgcgtcctgcgattacttcagaggaatgtttgctgggggattgaaggagatggaacaggaagaggtcctgatccacggtgtgtcctacaatgctatgtgccaaatcctacatttcatatacacctccgagctggagctcagcctgagcaatgtacaagagacactggtggctgcctgccagcttcagatcccagaaattatccatttctgctgtgatttcctcatgtcctgggtggacgaagagaacattctcgatgtctaccggctggcagagctgtttgacttgagccgcctgactgagcaactggacacctatatcctcaaaaactttgtggccttctctcggactgacaagtaccgccagcttccattggagaaggtctactccctcctcagcagcaatcgcctggaggtctcctgcgagaccgaggtatatgagggggcccttctctaccattatagcctggagcaggtgcaggctgaccagatctcgctgcacgagcccccaaagctccttgagacagtgcggtttccgctgatggaagctgaggtcctgcagcggctgcatgacaagctggaccccagccctttgagggacacagtggccagcgccctcatgtaccaccggaacgagagcctacagcccagcctgcagagcccgcaaacggagctgcggtcggacttccagtgcgttgtgggcttcgggggcattcactccacgccgtccactgtcctcagcgaccaggccaagtatctaaaccccttactgggagagtggaagcacttcactgcctccctggccccccgcatgtccaaccagggcatcgcggtgctcaacaacttcgtatacttgattggaggggacaacaatgtccaaggatttcgagcagagtcccgatgctggaggtatgacccacggcacaaccgctggttccagatccagtccctgcagcaggagcacgccgacctgtccgtgtgtgttgtaggcaggtacatctacgctgtggcgggccgtgactaccacaatgacctgaatgctgtggagcgctacgaccctgccaccaactcctgggcatacgtggccccactcaagagggaggtgtatgcccacgcaggcgcgacgctggaggggaagatgtatatcacctgcggccgcagaggggaggattacctgaaagagacacactgctacgatccaggcagcaacacttggcacacactggctgatgggcctgtgcggcgcgcctggcacggcatggcaaccctcctcaacaagctgtatgtgatcgggggcagcaacaacgatgccggatacaggagggacgtgcaccaggtggcctgctacagctgcacgtctggacagtggtcatctgtctgcccactccctgctgggcacggtgagcctggcattgctgtgctggacaacaggatctatgtgttaggtggccgctcacacaaccgcggcagccgcacaggctacgtgcacatttacgatgtggagaaggactgctgggaggaagggccccagctggacaactccatctcaggcctggcggcctgtgtgctcaccctgccccgctccctgctccttgagccgccccgcgggacccctgaccgcagccaggccgacccggactttgcctctgaggtgatgagtgtgtctgactgggaggagtttgacaactccagtgaggactaggctccctgtgcctggcatcagagggaagggaggctggggctgcagggcagtgaaacccacgcagcctaggccagagcactttactccaggcagggcccctgcccctgttggccacagcttatgggccctgccctctttcttcacaccagccccttggccagcctgccgcaggcatctcagggccatgcagatcccaggctgtggattacgtcactgcaggaactgcttctgaaaggctttggccttcctcagtgagccctggaggggttggccttctctcctccctgcctagatcagtccttctccaaaaggacctgggagctggcagcctgggcaggggggctgaggcacgtggtagccctctttctgtgaatggggtggggctgtgggggcagctggggttggaggatgagagctcctgaggggcagaggagcagagatgcatcagctcgcctgggactggctctgtgataaaaagacccctcccgctgggttttcagaccccatgttgttggtcaatgaaataaagcatcttacagaaggtgttaactgtt

SEQ ID NO: 432994 - DNA, 2439 bp, Homo sapiens
cccgcctcgcgcctcccgcctcccgcctcccgcctccctccagctgcgagtgcggcctcggctggcggcggcaccaggccacagttgtaagggatcttgtggctgtcaggatggcagaggagcaggagttcacccagctctgcaagttgcctgcacagccctcacacccacactgcgtgaacaacacctaccgcagcgcacagcactcccaggctctgctccgagggctgctggctctccgggacagcggaatcctcttcgatgttgtgctggtggtggagggcagacacatcgaggcccatcgcatcctgctggctgcgtcctgcgattacttcagaggaatgtttgctgggggattgaaggagatggaacaggaagaggtcctgatccacggtgtgtcctacaatgctatgtgccaaatcctacatttcatatacacctccgagctggagctcagcctgagcaatgtacaagagacactggtggctgcctgccagcttcagatcccagaaattatccatttctgctgtgatttcctcatgtcctgggtggacgaagagaacattctcgatgtctaccggctggcagagctgtttgacttgagccgcctgactgagcaactggacacctatatcctcaaaaactttgtggccttctctcggactgacaagtaccgccagcttccattggagaaggtctactccctcctcagcagcaatcgcctggaggtctcctgcgagaccgaggtatatgagggggcccttctctaccattatagcctggagcaggtgcaggctgaccagatctcgctgcacgagcccccaaagctccttgagacagtgcggtttccgctgatggaagctgaggtcctgcagcggctgcatgacaagctggaccccagccctttgagggacacagtggccagcgccctcatgtaccaccggaacgagagcctacagcccagcctgcagagcccgcaaacggagctgcggtcggacttccagtgcgttgtgggcttcgggggcattcactccacgccgtccactgtcctcagcgaccaggccaagtatctaaaccccttactgggagagtggaagcacttcactgcctccctggccccccgcatgtccaaccagggcatcgcggtgctcaacaacttcgtatacttgattggaggggacaacaatgtccaaggatttcgagcagagtcccgatgctggaggtatgacccacggcacaaccgctggttccagatccagtccctgcagcaggagcacgccgacctgtccgtgtgtgttgtaggcaggtacatctacgctgtggcgggccgtgactaccacaatgacctgaatgctgtggagcgctacgaccctgccaccaactcctgggcatacgtggccccactcaagagggaggtgtatgcccacgcaggcgcgacgctggaggggaagatgtatatcacctgcggccgcagaggggaggattacctgaaagagacacactgctacgatccaggcagcaacacttggcacacactggctgatgggcctgtgcggcgcgcctggcacggcatggcaaccctcctcaacaagctgtatgtgatcgggggcagcaacaacgatgccggatacaggagggacgtgcaccaggtggcctgctacagctgcacgtctggacagtggtcatctgtctgcccactccctgctgggcacggtgagcctggcattgctgtgctggacaacaggatctatgtgttaggtggccgctcacacaaccgcggcagccgcacaggctacgtgcacatttacgatgtggagaaggactgctgggaggaagggccccagctggacaactccatctcaggcctggcggcctgtgtgctcaccctgccccgctccctgctccttgagccgccccgcgggacccctgaccgcagccaggccgacccggactttgcctctgaggtgatgagtgtgtctgactgggaggagtttgacaactccagtgaggactaggctccctgtgcctggcatcagagggaagggaggctggggctgcagggcagtgaaacccacgcagcctaggccagagcactttactccaggcagggcccctgcccctgttggccacagcttatgggccctgccctctttcttcacaccagccccttggccagcctgccgcaggcatctcagggccatgcagatcccaggctgtggattacgtcactgcaggaactgcttctgaaaggctttggccttcctcagtgagccctggagggtggggttggaggatgagagctcctgaggggcagaggagcagagatgcatcagctcgcctgggactggctctgtgataaaaagacccctcccgctgggttttcagaccccatgttgttggtcaatgaaataaagcatcttacagaaggtgttaactgtt

SEQ ID NO: 432995 - DNA, 2376 bp, Homo sapiens
cccgcctcgcgcctcccgcctcccgcctcccgcctccctccagctgcgagtgcggcctcggctggcggcggcaccaggccacagttgtaagggatcttgtggctgtcaggatggcagaggagcaggagttcacccagctctgcaagttgcctgcacagccctcacacccacactgcgtgaacaacacctaccgcagcgcacagcactcccaggctctgctccgagggctgctggctctccgggacagcggaatcctcttcgatgttgtgctggtggtggagggcagacacatcgaggcccatcgcatcctgctggctgcgtcctgcgattacttcagaggaatgtttgctgggggattgaaggagatggaacaggaagaggtcctgatccacggtgtgtcctacaatgctatgtgccaaatcctacatttcatatacacctccgagctggagctcagcctgagcaatgtacaagagacactggtggctgcctgccagcttcagatcccagaaattatccatttctgctgtgatttcctcatgtcctgggtggacgaagagaacattctcgatgtctaccggctggcagagctgtttgacttgagccgcctgactgagcaactggacacctatatcctcaaaaactttgtggccttctctcggactgacaagtaccgccagcttccattggagaaggtctactccctcctcagcagcaatcgcctggaggtctcctgcgagaccgaggtatatgagggggcccttctctaccattatagcctggagcaggtgcaggctgaccagatctcgctgcacgagcccccaaagctccttgagacagtgcggtttccgctgatggaagctgaggtcctgcagcggctgcatgacaagctggaccccagccctttgagggacacagtggccagcgccctcatgtaccaccggaacgagagcctacagcccagcctgcagagcccgcaaacggagctgcggtcggacttccagtgcgttgtgggcttcgggggcattcactccacgccgtccactgtcctcagcgaccaggccaagtatctaaaccccttactgggagagtggaagcacttcactgcctccctggccccccgcatgtccaaccagggcatcgcggtgctcaacaacttcgtatacttgattggaggggacaacaatgtccaaggatttcgagcagagtcccgatgctggaggtatgacccacggcacaaccgctggttccagatccagtccctgcagcaggagcacgccgacctgtccgtgtgtgttgtaggcaggtacatctacgctgtggcgggccgtgactaccacaatgacctgaatgctgtggagcgctacgaccctgccaccaactcctgggcatacgtggccccactcaagagggaggtgtatgcccacgcaggcgcgacgctggaggggaagatgtatatcacctgcggccgcagaggggaggattacctgaaagagacacactgctacgatccaggcagcaacacttggcacacactggctgatgggcctgtgcggcgcgcctggcacggcatggcaaccctcctcaacaagctgtatgtgatcgggggcagcaacaacgatgccggatacaggagggacgtgcaccaggtggcctgctacagctgcacgtctggacagtggtcatctgtctgcccactccctgctgggcacggtgagcctggcattgctgtgctggacaacaggatctatgtgttaggtggccgctcacacaaccgcggcagccgcacaggctacgtgcacatttacgatgtggagaaggactgctgggaggaagggccccagctggacaactccatctcaggcctggcggcctgtgtgctcaccctgccccgctccctgctccttgagccgccccgcgggacccctgttggccacagcttatgggccctgccctctttcttcacaccagccccttggccagcctgccgcaggcatctcagggccatgcagatcccaggctgtggattacgtcactgcaggaactgcttctgaaaggctttggccttcctcagtgagccctggaggggttggccttctctcctccctgcctagatcagtccttctccaaaaggacctgggagctggcagcctgggcaggggggctgaggcacgtggtagccctctttctgtgaatggggtggggctgtgggggcagctggggttggaggatgagagctcctgaggggcagaggagcagagatgcatcagctcgcctgggactggctctgtgataaaaagacccctcccgctgggttttcagaccccatgttgttggtcaatgaaataaagcatcttacagaaggtgttaactgtt

SEQ ID NO: 432996 - DNA, 2426 bp, Homo sapiens
cccgcctcgcgcctcccgcctcccgcctcccgcctccctccagctgcgagtgcggcctcggctggcggcggcaccaggccacagttgtaagggatcttgtggctgtcaggatggcagaggagcaggagttcacccagctctgcaagttgcctgcacagccctcacacccacactgcgtgaacaacacctaccgcagcgcacagcactcccaggctctgctccgagggctgctggctctccgggacagcggaatcctcttcgatgttgtgctggtggtggagggcagacacatcgaggcccatcgcatcctgctggctgcgtcctgcgattacttcagaggaatgtttgctgggggattgaaggagatggaacaggaagaggtcctgatccacggtgtgtcctacaatgctatgtgccaaatcctacatttcatatacacctccgagctggagctcagcctgagcaatgtacaagagacactggtggctgcctgccagcttcagatcccagaaattatccatttctgctgtgatttcctcatgtcctgggtggacgaagagaacattctcgatgtctaccggctggcagagctgtttgacttgagccgcctgactgagcaactggacacctatatcctcaaaaactttgtggccttctctcggactgacaagtaccgccagcttccattggagaaggtctactccctcctcagcagcaatcgcctggaggtctcctgcgagaccgaggtatatgagggggcccttctctaccattatagcctggagcaggtgcaggctgaccagatctcgctgcacgagcccccaaagctccttgagacagtgcggtttccgctgatggaagctgaggtcctgcagcggctgcatgacaagctggaccccagccctttgagggacacagtggccagcgccctcatgtaccaccggaacgagagcctacagcccagcctgcagagcccgcaaacggagctgcggtcggacttccagtgcgttgtgggcttcgggggcattcactccacgccgtccactgtcctcagcgaccaggccaagtatctaaaccccttactgggagagtggaagcacttcactgcctccctggccccccgcatgtccaaccagggcatcgcggtgctcaacaacttcgtatacttgattggaggggacaacaatgtccaaggatttcgagcagagtcccgatgctggaggtatgacccacggcacaaccgctggttccagatccagtccctgcagcaggagcacgccgacctgtccgtgtgtgttgtaggcaggtacatctacgctgtggcgggccgtgactaccacaatgacctgaatgctgtggagcgctacgaccctgccaccaactcctgggcatacgtggccccactcaagagggaggtgtatgcccacgcaggcgcgacgctggaggggaagatgtatatcacctgcggccgcagaggggaggattacctgaaagagacacactgctacgatccaggcagcaacacttggcacacactggctgatgggcctgtgcggcgcgcctggcacggcatggcaaccctcctcaacaagctgtatgtgatcgggggcagcaacaacgatgccggatacaggagggacgtgcaccagctacgtgcacatttacgatgtggagaaggactgctgggaggaagggccccagctggacaactccatctcaggcctggcggcctgtgtgctcaccctgccccgctccctgctccttgagccgccccgcgggacccctgaccgcagccaggccgacccggactttgcctctgaggtgatgagtgtgtctgactgggaggagtttgacaactccagtgaggactaggctccctgtgcctggcatcagagggaagggaggctggggctgcagggcagtgaaacccacgcagcctaggccagagcactttactccaggcagggcccctgcccctgttggccacagcttatgggccctgccctctttcttcacaccagccccttggccagcctgccgcaggcatctcagggccatgcagatcccaggctgtggattacgtcactgcaggaactgcttctgaaaggctttggccttcctcagtgagccctggaggggttggccttctctcctccctgcctagatcagtccttctccaaaaggacctgggagctggcagcctgggcaggggggctgaggcacgtggtagccctctttctgtgaatggggtggggctgtgggggcagctggggttggaggatgagagctcctgaggggcagaggagcagagatgcatcagctcgcctgggactggctctgtgataaaaagacccctcccgctgggttttcagaccccatgttgttggtcaatgaaataaagcatcttacagaaggtgttaactgtt

SEQ ID NO: 432997 - DNA, 2304 bp, Homo sapiens
cccgcctcgcgcctcccgcctcccgcctcccgcctccctccagctgcgagtgcggcctcggctggcggcggcaccaggccacagttgtaagggatcttgtggctgtcaggatggcagaggagcaggagttcacccagctctgcaagttgcctgcacagccctcacacccacactgcgtgaacaacacctaccgcagcgcacagcactcccaggctctgctccgagggctgctggctctccgggacagcggaatcctcttcgatgttgtgctggtggtggagggcagacacatcgaggcccatcgcatcctgctggctgcgtcctgcgattacttcagaggaatgtttgctgggggattgaaggagatggaacaggaagaggtcctgatccacggtgtgtcctacaatgctatgtgccaaatcctacatttcatatacacctccgagctggagctcagcctgagcaatgtacaagagacactggtggctgcctgccagcttcagatcccagaaattatccatttctgctgtgatttcctcatgtcctgggtggacgaagagaacattctcgatgtctaccggctggcagagctgtttgacttgagccgcctgactgagcaactggacacctatatcctcaaaaactttgtggccttctctcggactgacaagtaccgccagcttccattggagaaggtctactccctcctcagcagcaatcgcctggaggtctcctgcgagaccgaggtatatgagggggcccttctctaccattatagcctggagcaggtgcaggctgaccagatctcgctgcacgagcccccaaagctccttgagacagtgcggtttccgctgatggaagctgaggtcctgcagcggctgcatgacaagctggaccccagccctttgagggacacagtggccagcgccctcatgtaccaccggaacgagagcctacagcccagcctgcagagcccgcaaacggagctgcggtcggacttccagtgcgttgtgggcttcgggggcattcactccacgccgtccactgtcctcagcgaccaggccaagtatctaaaccccttactgggagagtggaagcacttcactgcctccctggccccccgcatgtccaaccagggcatcgcggtgctcaacaacttcgtatacttgattggaggggacaacaatgtccaaggatttcgagcagagtcccgatgctggaggtatgacccacggcacaaccgctggttccagatccagtccctgcagcaggagcacgccgacctgtccgtgtgtgttgtaggcaggtacatctacgctgtggcgggccgtgactaccacaatgacctgaatgctgtggagcgctacgaccctgccaccaactcctgggcatacgtggccccactcaagagggaggtgtatgcccacgcaggcgcgacgctggaggggaagatgtatatcacctgcggccgcagaggggaggattacctgaaagagacacactgctacgatccaggcagcaacacttctacgtgcacatttacgatgtggagaaggactgctgggaggaagggccccagctggacaactccatctcaggcctggcggcctgtgtgctcaccctgccccgctccctgctccttgagccgccccgcgggacccctgaccgcagccaggccgacccggactttgcctctgaggtgatgagtgtgtctgactgggaggagtttgacaactccagtgaggactaggctccctgtgcctggcatcagagggaagggaggctggggctgcagggcagtgaaacccacgcagcctaggccagagcactttactccaggcagggcccctgcccctgttggccacagcttatgggccctgccctctttcttcacaccagccccttggccagcctgccgcaggcatctcagggccatgcagatcccaggctgtggattacgtcactgcaggaactgcttctgaaaggctttggccttcctcagtgagccctggaggggttggccttctctcctccctgcctagatcagtccttctccaaaaggacctgggagctggcagcctgggcaggggggctgaggcacgtggtagccctctttctgtgaatggggtggggctgtgggggcagctggggttggaggatgagagctcctgaggggcagaggagcagagatgcatcagctcgcctgggactggctctgtgataaaaagacccctcccgctgggttttcagaccccatgttgttggtcaatgaaataaagcatcttacagaaggtgttaactgtt

SEQ ID NO: 432998 - DNA, 3997 bp, Homo sapiens
gaggctgaggcaggagaattgcttgaacctaggaggcagaggttgcagtgagccgagaccgtgcctttgcactccagcctgggcgacagagtgagactccatctcaaaaacaaaaaaccttggcaaaatactgcaaataaccccattaaaaagagggcaaaagaagccgggcacggtggctcacacctgtaatcccagcactttgggaggccaaggtgggtggatcacgaggtcaggagattgagaccatcctggctaacacggtgaaaccccatctctactaaaaatacaaaaaattagctggatgtggtggcggacgtctatagtcccagctacttgggaggctgaggcaggagaatggtgtgaacccaggaggcagagggtgcagtgagctgagattgtgccactgcactccagcctgggcgacacggcaagactctgtctcaaaaaaaaacaaacaaaacaaaacaaaacaaaacaaaaaacagaaggcaaaagagttgaagaaacatttcactgaagaggatgtatagatggcaaataagcatataaggagatatgtaacattattagctatcagggaaatgcaaattaaagccacagtgagagaactacctcaggatgactaaaataaaaagtagtgaaaatacgaaatactggtgactgtgcagggaaactatgctcatggattgctgataggaatgtgaaatggtacagccactctggaaaacagatctggcagttaccatcctgggtatttatcccagagaaatgaaaactactctgtatacgttagccaggcatggtgatgcgtgcctgtaatcccagctactccggaggctgaggcacaagaattgcttgaacccgggaggcagaggttgcagtgagccaagattgtgccactatattccagcatgggcaatagaccaagaccctgtctcaaaaaaataaaaaataacttatctgtacatgaatgttaatagtagctttattggtaatagccagaaactggaaacaaatcaggtgttttcaacagtgaatggttaaacaagctgtggtagatacccatggaatactactgagcaatagaaaaggaaccaactattggtacatgttgagtaccctttatctgaaatgctggggaccagaagtgttttggatttcagattttttcagattttggaatctttgcattatagttactggttcagcatttcttatccaaaagtctgaaatgcatttcctttgagtgccgtgtttgtgctcaaaaagtctcagattttggaggtactcaacctgtacatgcaacaacctggtagaacctgggttggggtagaaagccaatgtcaaaaggttgtatactgatttaattcagacaacactcttgaagttacaaaactgtagaaatagagaagagattggtggtttccagggcttaaggaagggattagggtaagggaggtgagtggatgtcaccctaaagggcagcccctcgggatcctggtggtgataggacagttctgtggctgtgtccacgtcagcatcctggtgaccctgtgatatagtgacacaggctcctaccatgggggaaagaaggcacgtgagacctctgtatttttacttccaactacacgtgactacacttatctcaaaatgaaaagtttaattaaaaagaaaaacctcggctgggcgtggtggctcatgcctataatcctagcactttggaaggccgaggcaggtgggtcacgaggtcaggagatcgagaccatcctggccaacatggtgaaaccctgtctctattaaaaatacaaaagttagctgggtatggtggcgggcgcctataatcccagctactcgggaagctgaggcaggagaatcattcgaacccgggaggcggagattgcagtgagccgagatcgtgccactgcactccggcctggtgacagagcgagactccgtctcaaaaaaaaaaaaagaaaaacctccccagacccctactggtgataggagaagacccaaaccaaacccttggtgtgtgttcttcctccccactgctccgtccacctctctagactcttgtgtttttgccacccgcatggcctcagtgttagtgacttgcccagtaacatagctctggagcctccacaccctgaggggctcctctaccctcaaaacacccagggccttgccttggggccttctgttggcctgctgggtgtgagtgggtgggttccggaagtggtagggccagggtaagaggtgcccatgatgggggcaggctgggccctatggagatagcccaacagagggagggtaaaaagcccacagaaggttcaggaccagaatcaagaaccatgtgtatttttctccccacatcatgagtttagtgtcagatattatttacaaacattttaaaagcagggtcagcaggcccggaggattgcatgtccagtgggagtgggggaggggtggaggccactgagggtgggtcagcggtccccagggttctgtggcttcttccagactggcttggaaaaaatgcttttattttcttggagttcccccatgcagatgttaactttaggggcaaaggaaagacaaaggctacatttcatttctgagtctatagatgtatccgctattgggaagaggttagaggtcaatgactaggacagtatgtcccatgagaatcgagggaggattcttgtctgtatgtgagtgggaagtggtgaagcctcacagcgttgtcaggcaggtgtggggtggtgattggccttgacagagtacccagccacccttcctcactgccctctcacgccatttctcctggtggctccacacaggtgtatgcccacgcaggcgcgacgctggaggggaagatgtatatcacctgcggccgcagaggggaggattacctgaaagagacacactgctacgatccaggcagcaacacttggcacacactggctgatgggcctgtgcggcgcgcctggcacggcatggcaaccctcctcaacaagctgtatgtgatcgggggcagcaacaacgatgccggatacaggagggacgtgcaccaggtggcctgctacagctgcacgtctggacagtggtcatctgtctgcccactccctgctgggcacggtgagcctggcattgctgtgctggacaacaggatctatgtgttaggtggccgctcacacaaccgcggcagccgcacaggctacgtgcacatttacgatgtggagaaggactgctgggaggaagggccccagctggacaactccatctcaggcctggcggcctgtgtgctcaccctgccccgctccctgctccttgagccgccccgcgggacccctgaccgcagccaggccgacccggactttgcctctgaggtgatgagtgtgtctgactgggaggagtttgacaactccagtgaggactaggctccctgtgcctggcatcagagggaagggaggctggggctgcagggcagtgaaacccacgcagcctaggccagagcactttactccaggcagggcccctgcccctgttggccacagcttatgggccctgccctctttcttcacaccagccccttggccagcctgccgcaggcatctcagggccatgcagatcccaggctgtggattacgtcactgcaggaactgcttctgaaaggctttggccttcctcagtgagccctggaggggttggccttctctcctccctgcctagatcagtccttctccaaaaggacctgggagctggcagcctgggcaggggggctgaggcacgtggtagccctctttctgtgaatggggtggggctgtgggggcagctggggttggaggatgagagctcctgaggggcagaggagcagagatgcatcagctcgcctgggactggctctgtgataaaaagacccctcccgctgggttttcagaccccatgttgttggtcaatgaaataaagcatcttacagaaggtgttaactgtt

SEQ ID NO: 432999 - DNA, 2303 bp, Homo sapiens
gcaagttttatatcagcatatatttttcattttttcttttaaagatatataatcatgtgccacacagtgatgtttccgtcaatgacagaccagaccacatgaaggatggtggtcccatatttttactgtaccttgtctgtgtttagatacacaaattccattgtgttacagttgcctatagtattcagtactgtgatattgtgaaatatatatttggtcttgtctcatttcttggcatacaacttctaaaatctttggactttccagagtgatgcctttttgtatgctggccagcagcccctaggtagcttcaggatgggggctggtgacaggaaaggccaaggcaggcataagagggttgggactttcagcctcacctctcaacctccggagaggggagacaggctgaagattaagttcatcaccaatggccagtgatttaatcagtcatgcctacataatgaagcttccataaaaattctgaatgactgggtttggaaaacttctggatagttgaacacatggaggctcctaaagagtgatgttcctggagagggcctggaagctctgcaccacttcccacatgtctggccccatgcatctcttcatcttaaaggaaagtaggccctggaaatgccacccccttggcacccacctcccagactcctggctgtgtgtctcctgaccactactcaggccacagttgtaagggatcttgtggctgtcaggatggcagaggagcaggagttcacccagctctgcaagttgcctgcacagccctcacacccacactgcgtgaacaacacctaccgcagcgcacagcactcccaggctctgctccgagggctgctggctctccgggacagcggaatcctcttcgatgttgtgctggtggtggagggcagacacatcgaggcccatcgcatcctgctggctgcgtcctgcgattacttcaggtatgacccacggcacaaccgctggttccagatccagtccctgcagcaggagcacgccgacctgtccgtgtgtgttgtaggcaggtacatctacgctgtggcgggccgtgactaccacaatgacctgaatgctgtggagcgctacgaccctgccaccaactcctgggcatacgtggccccactcaagagggaggtgtatgcccacgcaggcgcgacgctggaggggaagatgtatatcacctgcggccgcagaggggaggattacctgaaagagacacactgctacgatccaggcagcaacacttggcacacactggctgatgggcctgtgcggcgcgcctggcacggcatggcaaccctcctcaacaagctgtatgtgatcgggggcagcaacaacgatgccggatacaggagggacgtgcaccaggtggcctgctacagctgcacgtctggacagtggtcatctgtctgcccactccctgctgggcacggtgagcctggcattgctgtgctggacaacaggatctatgtgttaggtggccgctcacacaaccgcggcagccgcacaggctacgtgcacatttacgatgtggagaaggactgctgggaggaagggccccagctggacaactccatctcaggcctggcggcctgtgtgctcaccctgccccgctccctgctccttgagccgccccgcgggacccctgaccgcagccaggccgacccggactttgcctctgaggtgatgagtgtgtctgactgggaggagtttgacaactccagtgaggactaggctccctgtgcctggcatcagagggaagggaggctggggctgcagggcagtgaaacccacgcagcctaggccagagcactttactccaggcagggcccctgcccctgttggccacagcttatgggccctgccctctttcttcacaccagccccttggccagcctgccgcaggcatctcagggccatgcagatcccaggctgtggattacgtcactgcaggaactgcttctgaaaggctttggccttcctcagtgagccctggaggggttggccttctctcctccctgcctagatcagtccttctccaaaaggacctgggagctggcagcctgggcaggggggctgaggcacgtggtagccctctttctgtgaatggggtggggctgtgggggcagctggggttggaggatgagagctcctgaggggcagaggagcagagatgcatcagctcgcctgggactggctctgtgataaaaagacccctcccgctgggttttcagaccccatgttgttggtcaatgaaataaagcatcttacagaaggtgttaactgtt

SEQ ID NO: 433000 - DNA, 1559 bp, Homo sapiens
  misc_feature (38)..(38): n is a, c, g, or t
agcccacaacgcactggaagtccgaccgcagctccgtntgcgggctctgcaggctgggctgtaggctctcgttccggtggtacatgagggcgctggccactgtgtccctcaaagggctggggtccagcttgtcatgcagccgctgcaggacctcagcttccatcagcggaaaccgcactgtccaaggatttcgagcagagtcccgatgctgggtatgacccacggcacaaccgctggttccagatccagtccctgcagcaggagcacgccgacctgtccgtgtgtgttgtaggcaggtacatctacgctgtggcgggccgtgactaccacaatgacctgaatgctgtggagcgctacgaccctgccaccaactcctgggcatacgtggccccactcaagagggaggtgtatgcccacgcaggcgcgacgctggaggggaagatgtatatcacctgcggccgcagaggggaggattacctgaaagagacacactgctacgatccaggcagcaacacttggcacacactggctgatgggcctgtgcggcgcgcctggcacggcatggcaaccctcctcaacaagctgtatgtgatcgggggcagcaacaacgatgccggatacaggagggacgtgcaccaggtggcctgctacagctgcacgtctggacagtggtcatctgtctgcccactccctgctgggcacggtgagcctggcattgctgtgctggacaacaggatctatgtgttaggtggccgctcacacaaccgcggcagccgcacaggctacgtgcacatttacgatgtggagaaggactgctgggaggaagggccccagctggacaactccatctcaggcctggcggcctgtgtgctcaccctgccccgctccctgctccttgagccgccccgcgggacccctgaccgcagccaggccgacccggactttgcctctgaggtgatgagtgtgtctgactgggaggagtttgacaactccagtgaggactaggctccctgtgcctggcatcagagggaagggaggctggggctgcagggcagtgaaacccacgcagcctaggccagagcactttactccaggcagggcccctgcccctgttggccacagcttatgggccctgccctctttcttcacaccagccccttggccagcctgccgcaggcatctcagggccatgcagatcccaggctgtggattacgtcactgcaggaactgcttctgaaaggctttggccttcctcagtgagccctggaggggttggccttctctcctccctgcctagatcagtccttctccaaaaggacctgggagctggcagcctgggcaggggggctgaggcacgtggtagccctctttctgtgaatggggtggggctgtgggggcagctggggttggaggatgagagctcctgaggggcagaggagcagagatgcatcagctcgcctgggactggctctgtgataaaaagacccctcccgctgggttttcagaccccatgttgttggtcaatgaaataaagcatcttacagaaggtgttaactgtt

SEQ ID NO: 433001 - DNA, 2313 bp, Homo sapiens
cccgcctcgcgcctcccgcctcccgcctcccgcctccctccagctgcgagtgcggcctcggctggcggcggcaccaggccacagttgtaagggatcttgtggctgtcaggatggcagaggagcaggagttcacccagctctgcaagttgcctgcacagccctcacacccacactgcgtgaacaacacctaccgcagcgcacagcactcccaggctctgctccgagggctgctggctctccgggacagcggaatcctcttcgatgttgtgctggtggtggagggcagacacatcgaggcccatcgcatcctgctggctgcgtcctgcgattacttcagaggaatgtttgctgggggattgaaggagatggaacaggaagaggtcctgatccacggtgtgtcctacaatgctatgtgccaaatcctacatttcatatacacctccgagctggagctcagcctgagcaatgtacaagagacactggtggctgcctgccagcttcagatcccagaaattatccatttctgctgtgatttcctcatgtcctgggtggacgaagagaacattctcgatgtctaccggctggcagagctgtttgacttgagccgcctgactgagcaactggacacctatatcctcaaaaactttgtggccttctctcggactgacaagtaccgccagcttccattggagaaggtctactccctcctcagcagcaatcgcctggaggtctcctgcgagaccgaggtatatgagggggcccttctctaccattatagcctggagcaggtgcaggctgaccagatctcgctgcacgagcccccaaagctccttgagacagtgcggtttccgctgatggaagctgaggtcctgcagcggctgcatgacaagctggaccccagccctttgagggacacagtggccagcgccctcatgtaccaccggaacgagagcctacagcccagcctgcagagcccgcaaacggagctgcggtcggacttccagtgcgttgtgggcttcgggggcattcactccacgccgtccactgtcctcagcgaccaggccaagtatctaaaccccttactgggagagtggaagcacttcactgcctccctggccccccgcatgtccaaccagggcatcgcggtgctcaacaacttcgtatacttgattggaggggacaacaatgtccaaggatttcgagcagagtcccgatgctggaggtatgacccacggcacaaccgctggttccagatccagtccctgcagcaggagcacgccgacctgtccgtgtgtgttgtaggcaggtacatctacgctgtggcgggccgtgactaccacaatgacctgaatgctgtggagcgctacgaccctgccaccaactcctgggcatacgtggccccactcaagagggaggtgtatgcccacgcaggcgcgacgctggaggggaagatgtatatcacctgcggccgcagaggggaggattacctgaaagagacacactgctacgatccaggcagcaacacttggcacacactggctgatgggcctgtgcggcgcgcctggcacggcatggcaaccctcctcaacaagctgtatgtgatcgggggcagcaacaacgatgccggatacaggagggacgtgcaccagcaggtgagtggggcccggggcagtccacacccgtcatcattcccaagcctctcagttgttattgatggaaaatgtaattgaatcatgtgccttttaaaaatagactattttttagagcagttttaggttcacagcaaaattaagtggaaggtacagtttccatacacccccttttccccccatacacatatagcctccccactgcagacctctcgctccagaggggtggatgtgtcacagttgttgaaactgcattgatgcatcaccatcaaccagagtccacagtgttcactcttggcacattctataggtttggacaaatgtcaccatgacagtatcacacacatacacatctacctttgcttattactcttaaaaacttttaggccggatgtggtggcacatgcctgtaatccaagcagtttgggaagccaaggcgagaggatcacttgagctcaggagcttgagaccagcctgggcatcatggcaaaaccccatctctacaaaaatacaaaaattagccaggtgtggttgcatgcctgtactctcagctacttgggaggctgaggttgggggatggctggagcccaggaggcagaggtttcagtaagctgagatcacgccactgcactccagcctgggcgacagagccaggccttgtctc

SEQ ID NO: 433002 - DNA, 1845 bp, Homo sapiens
cccgcctcgcgcctcccgcctcccgcctcccgcctccctccagctgcgagtgcggcctcggctggcggcggcaccaggccacagttgtaagggatcttgtggctgtcaggatggcagaggagcaggagttcacccagctctgcaagttgcctgcacagccctcacacccacactgcgtgaacaacacctaccgcagcgcacagcactcccaggctctgctccgagggctgctggctctccgggacagcggaatcctcttcgatgttgtgctggtggtggagggcagacacatcgaggcccatcgcatcctgctggctgcgtcctgcgattacttcagaggaatgtttgctgggggattgaaggagatggaacaggaagaggtcctgatccacggtgtgtcctacaatgctatgtgccaaatcctacatttcatatacacctccgagctggagctcagcctgagcaatgtacaagagacactggtggctgcctgccagcttcagatcccagaaattatccatttctgctgtgatttcctcatgtcctgggtggacgaagagaacattctcgatgtctaccggctggcagagctgtttgacttgagccgcctgactgagcaactggacacctatatcctcaaaaactttgtggccttctctcggactgacaagtaccgccagcttccattggagaaggtctactccctcctcagcagcaatcgcctggaggtctcctgcgagaccgaggtatatgagggggcccttctctaccattatagcctggagcaggtgcaggctgaccagatctcgctgcacgagcccccaaagctccttgagacagtgcggtttccgctgatggaagctgaggtcctgcagcggctgcatgacaagctggaccccagccctttgagggacacagtggccagcgccctcatgtaccaccggaacgagagcctacagcccagcctgcagagcccgcaaacggagctgcggtcggacttccagtgcgttgtgggcttcgggggcattcactccacgccgtccactgtcctcagcgaccaggccaagtatctaaaccccttactgggagagtggaagcacttcactgcctccctggccccccgcatgtccaaccagggcatcgcggtgctcaacaacttcgtatacttgattggaggggacaacaatgtccaaggatttcgagcagagtcccgatgctggaggtatgacccacggcacaaccgctggttccagatccagtccctgcagcaggagcacgccgacctgtccgtgtgtgttgtaggcaggtacatctacgctgtggcgggccgtgactaccacaatgacctgaatgctgtggagcgctacgaccctgccaccaactcctgggcatacgtggccccactcaagagggaggtgtatgcccacgcaggcgcgacgctggaggggaagatgtatatcacctgcggccgcagaggggaggattacctgaaagagacacactgctacgatccaggcagcaacactttggggttggaggatgagagctcctgaggggcagaggagcagagatgcatcagctcgcctgggactggctctgtgataaaaagacccctcccgctgggttttcagaccccatgttgttggtcaatgaaataaagcatcttacagaaggtgttaactgttaaaaaaaaaaaaaaaacactaaaaccaagtcagaaactgttcaacctcaacacccccgtaaatactgatgctccatataattgagctttttacacctaattgtttcatctatcgccctataatagaactaacggtcgtccatgttcattcgctgcgcgct

SEQ ID NO: 433003 - DNA, 1088 bp, Homo sapiens
ctggcccatggacaggatgtttcaacactggccctgtgccatccttccagggggcctgacctgtcagaatggtgggtaactgttgccaccttggtcagtgggcttgtgggggagctggcagcctcgtcccagtgggtgctgggctttattctagccttggctttgcaggtggcctgctacagctgcacgtctggacagtggtcatctgtctgcccactccctgctgggcacggtgagcctggcattgctgtgctggacaacaggatctatgtgttaggtggccgctcacacaaccgcggcagccgcacaggctacgtgcacatttacgatgtggagaaggactgctgggaggaagggccccagctggacaactccatctcaggcctggcggcctgtgtgctcaccctgccccgctccctgctccttgagccgccccgcgggacccctgaccgcagccaggccgacccggactttgcctctgaggtgatgagtgtgtctgactgggaggagtttgacaactccagtgaggactaggctccctgtgcctggcatcagagggaagggaggctggggctgcagggcagtgaaacccacgcagcctaggccagagcactttactccaggcagggcccctgcccctgttggccacagcttatgggccctgccctctttcttcacaccagccccttggccagcctgccgcaggcatctcagggccatgcagatcccaggctgtggattacgtcactgcaggaactgcttctgaaaggctttggccttcctcagtgagccctggaggggttggccttctctcctccctgcctagatcagtccttctccaaaaggacctgggagctggcagcctgggcaggggggctgaggcacgtggtagccctctttctgtgaatggggtggggctgtgggggcagctggggttggaggatgagagctcctgaggggcagaggagcagagatgcatcagctcgcctgggactggctctgtgataaaaagacccctcccgctgggttttcagaccccatgttgttggtcaatgaaataaagcatcttacagaaggtgttaactgtt

SEQ ID NO: 433004 - DNA, 1657 bp, Homo sapiens
cccgcctcgcgcctcccgcctcccgcctcccgcctccctccagctgcgagtgcggcctcggctggcggcggcaccaggccacagttgtaagggatcttgtggctgtcaggatggcagaggagcaggagttcacccagctctgcaagttgcctgcacagccctcacacccacactgcgtgaacaacacctaccgcagcgcacagcactcccaggctctgctccgagggctgctggctctccgggacagcggaatcctcttcgatgttgtgctggtggtggagggcagacacatcgaggcccatcgcatcctgctggctgcgtcctgcgattacttcagaggaatgtttgctgggggattgaaggagatggaacaggaagaggtcctgatccacggtgtgtcctacaatgctatgtgccaaatcctacatttcatatacacctccgagctggagctcagcctgagcaatgtacaagagacactggtggctgcctgccagcttcagatcccagaaattatccatttctgctgtgatttcctcatgtcctgggtggacgaagagaacattctcgatgtctaccggctggcagagctgtttgacttgagccgcctgactgagcaactggacacctatatcctcaaaaactttgtggccttctctcggactgacaagtaccgccagcttccattggagaaggtctactccctcctcagcagcaatcgcctggaggtctcctgcgagaccgaggtatatgagggggcccttctctaccattatagcctggagcaggtgcaggctgaccagatctcgctgcacgagcccccaaagctccttgagacagtgcggtttccgctgatggaagctgaggtcctgcagcggctgcatgacaagctggaccccagccctttgagggacacagtggccagcgccctcatgtaccaccggaacgagagcctacagcccagcctgcagagcccgcaaacggagctgcggtcggacttccagtgcgttgtgggcttcgggggcattcactccacgccgtccactgtcctcagcgaccaggccaagtatctaaaccccttactgggagagtggaagcacttcactgcctccctggccccccgcatgtccaaccagggcatcgcggtgctcaacaacttcgtatacttgattggaggggacaacaatgtccaaggatttcgagcagagtcccgatgctggaggtatgacccacggcacaaccgctggttccagatccagtccctgcagcaggagcacgccgacctgtccgtgtgtgttgtaggcaggtacatctacgctgtggcgggccgtgactaccacaatgacctgaatgctgtggagcgctacgaccctgccaccaactcctgggcatacgtggccccactcaagagggagctggggaagcagcagttctccagcttggccacagaggggcagccttggctttcaaccagctgcatcgtggctgccggtgttccttcatgcacgcattcattccgcaactactaagcaccatgtaccaagtcctgggaatccagtggtgacaagaaatgagaaagactccccactccatggtgtttacagccttgtaggagaaaccactcttaaccagaaaacagatcagtaaagtggttaca

SEQ ID NO: 433005 - DNA, 1542 bp, Homo sapiens
gcaagttttatatcagcatatatttttcattttttcttttaaagatatataatcatgtgccacacagtgatgtttccgtcaatgacagaccagaccacatgaaggatggtggtcccatatttttactgtaccttgtctgtgtttagatacacaaattccattgtgttacagttgcctatagtattcagtactgtgatattgtgaaatatatatttggtcttgtctcatttcttggcatacaacttctaaaatctttggactttccagagtgatgcctttttgtatgctggccagcagcccctaggtagcttcaggatgggggctggtgacaggaaaggccaaggcaggcataagagggttgggactttcagcctcacctctcaacctccggagaggggagacaggctgaagattaagttcatcaccaatggccagtgatttaatcagtcatgcctacataatgaagcttccataaaaattctgaatgactgggtttggaaaacttctggatagttgaacacatggaggctcctaaagagtgatgttcctggagagggcctggaagctctgcaccacttcccacatgtctggccccatgcatctcttcatcttaaaggaaagtaggccctggaaatgccacccccttggcacccacctcccagactcctggctgtgtgtctcctgaccactactcaggccacagttgtaagggatcttgtggctgtcaggatggcagaggagcaggagttcacccagctctgcaagttgcctgcacagccctcacacccacactgcgtgaacaacacctaccgcagcgcacagcactcccaggctctgctccgagggctgctggctctccgggacagcggaatcctcttcgatgttgtgctggtggtggagggcagacacatcgaggcccatcgcatcctgctggctgcgtcctgcgattacttcagaggaatgtttgctgggggattgaaggagatggaacaggaagaggtcctgatccacggtgtgtcctacaatgctatgtgccaaatcctacatttcatatacacctccgagctggagctcagcctgagcaatgtacaagagacactggtggctgcctgccagcttcaggtgaggcatgtctcatctagcaaggcagacccacacccaggtggggttccctgagatgcccatgatgcctgccgggcactagcattggcttgaagatgggtcaggaatgtgaggagaccaagcagtgacgaaggccatgaagtggggaagactctggagttgttcctggagctcaagcagagccgctctagacaccccaggcctctgcctttgccctcttctctattgctggttgtttccccactgtctgagtctccctgtcattgaaagcatcctgcacataagcaggtaggctgacccgaggctgcatgtggacgtcctgtgtgctctggggtctggcaatggggagcatccaccagcattgctgccagggcccttcctgcctgtcccctcactgggccacttcagtctcttgaaaac

SEQ ID NO: 433006 - DNA, 2993 bp, Homo sapiens
cggaatctggccagcgggtgtacctggctgagtctctgtggccgcggagcgcggagctaagcggctcggattatcctgggcagaccagagacttgaccagctaaacacttccgtcggtccggggcgtggacggggccagatcagcctcctgctctcccgagtcagggccacggaaaggcacaaatccatccgtgcgactcctggtacccagaccgggaggttgtctagtcacgcgcggtccgtgttgggcgagagctgaggagccggcgtccctgccaacgactcggccccgggacggtcaggagcctggggccctggtcccgcacctgtcttcgggcggacgcatccctcacggtctctccgcagcccgcgggtcctgcccccgcaggcagcgcgcgaacgtgggcgtggggatggccaccagtttccggacagcttcgtgctggggattattgtcattcaaggatatatctatggagttcacctgggatgaatggcagctactggattctacacagaagtacctgtacagagatgtgatattggaaaactatcataacctgatatcagtggatggctgggaagaatggtaccagaacaatcaagatgagcttgagagtattgaaagaagctatgcttgtagtgtgttgggaagacttaatctgagcaaaacccatgattcttcaagacagagactctataacacacgtggaaaaagtttgacacaaaactcagctccaagcagaagttatttaagaaagaatcctgataagtttcatggttatgaagaaccatattttcttaagcatcaaagagctcatagcatagaaaaaaactgtgtgtgtagtgaatgtgggaaagcttttcgttgtaagtcacagctcattgtacatctcagaattcatacaggagagagaccttatgaatgcagtaaatgtgaaagagccttcagtgccaagtcaaaccttaatgctcatcagagagttcatacaggagaaaaaccctactcatgtagtgagtgcgagaaggtcttctctttcaggtcacagctcattgtccatcaggaaattcacacaggagggaaaccctatggctgcagtgaatgtgggaaagcctacagttggaaatcacagcttcttttacaccagagaagtcacacaggagtgaaaccgtatgaatgcagcgaatgtgggaaagcctttagtttgaagtctccattcgttgtacaccagagaactcatacaggagtgaaaccccataaatgcagtgaatgtgggaaagcctttaggagtaagtcctatctccttgttcacatccgaatgcatacaggagaaaaaccctatcaatgcagtgattgtgggaaagccttcaatatgaagacacaactcattgtacatcagggagttcacacaggaaataatccttatcaatgcggtgaatgtgggaaagcctttggtaggaaggaacagctcactgcacatctgagagctcatgcaggagagaagccctatggatgcagtgaatgtgggaaggctttcagcagcaagtcataccttgttatacataggagaacacacaccggagagagaccctatgaatgtagtttgtgtgagagagccttttgtggaaaatcacagctgattatacatcagagaactcattcaactgagaagccctatgaatgcaatgaatgtgaaaaagcctaccctaggaaggcatcacttcagatacaccagaaaactcattcgggagagaaaccttttaaatgcagtgaatgtggaaaagccttcactcagaagtcatctctcagtgaacatcagagagttcacactggagagaaaccatggaaatgctctgaatgtgggaaatccttctgttggaattcagggcttcgtatacatcggaagactcataaatgagaaatcagaatgatgcaatgtgagaaactgatgttcaggagacttcggataatatagacaggatttacaagcaggaggccctaaaattacactcatgtcaaaaatcagagaggagagagaccaaccatatttgggatgagtgtaaaagctttcagaaataagttacaaatctttgtagatgaaaataatggaaggaatgtggagcaataaatgtatcaaatgttgtagtatcatcatgaagattcagagaatttacactaggaacaccttataagttgaataaattaaggaagcattttcccattgaaagtgtgttccatggaaagtcacattccagatttgaagctgtgtttttgtaaaataaaatcttggtatgaacagttgacttcatggtggagtataaagttgtttttttaaaaatatgtaaataatgttcaggaaaaacgcagggaacagagtcttaaagttaatggatatttaatgtgactttcctgagttaacactgaatagtatttctaaaattttttgtactttattttttaatgtaacttgttctatctatctatatatatatttgatagtttgtggaataatatcccccagtattttccatattaaatgctaattatcttttgatttctttttcataagcagatctggcatttattacagggctgccgcttaagagaactcattataatgaacgtttattatattttgcagttccatgcctgttgtccattgattgacatgagcacccctgttttctctggagaaatacctcccctctctggggtgcttcctgtggtagtgtctttcaggtatccgttccactagctacaggtgagcattttacccattgttggataatggtaatctctttttcagaattttgagtctgtaattcatttgtacatgaaccagaaaatgtgggaactcattcattcttgtcccagaattctgttgagaacatccattcattctggctaattgattacaagaataactgtggatacgatccctttagaacctgcttctctgatctgtgtgtttcctcacttctcaataaaaatg

SEQ ID NO: 433007 - DNA, 3089 bp, Homo sapiens
cggaatctggccagcgggtgtacctggctgagtctctgtggccgcggagcgcggagctaagcggctcggattatcctgggcagaccagagacttgaccagctaaacacttccgtcggtccggggcgtggacggggccagatcagcctcctgctctcccgagtcagggccacggaaaggcacaaatccatccgtgcgactcctggtacccagaccgggaggttgtctagtcacgcgcggtccgtgttgggcgagagctgaggagccggcgtccctgccaacgactcggccccgggacggtcaggagcctggggccctggtcccgcacctgtcttcgggcggacgcatccctcacggtctctccgcagcccgcgggtcctgcccccgcaggcagcgcgcgaacgtgggcgtggggatggccaccagtttccggacagcttcgtgctggggattattgtcattcaaggatatatctatggagttcacctgggatgaatggcagctactggattctacacagaagtacctgtacagagatgtgatattggaaaactatcataacctgatatcagtggggtatcatggtaccaagcctgacttaatcttcaagttggaacaaggagaagatccatggataataaatgccaaaatttccaggcagagctgtccagatggctgggaagaatggtaccagaacaatcaagatgagcttgagagtattgaaagaagctatgcttgtagtgtgttgggaagacttaatctgagcaaaacccatgattcttcaagacagagactctataacacacgtggaaaaagtttgacacaaaactcagctccaagcagaagttatttaagaaagaatcctgataagtttcatggttatgaagaaccatattttcttaagcatcaaagagctcatagcatagaaaaaaactgtgtgtgtagtgaatgtgggaaagcttttcgttgtaagtcacagctcattgtacatctcagaattcatacaggagagagaccttatgaatgcagtaaatgtgaaagagccttcagtgccaagtcaaaccttaatgctcatcagagagttcatacaggagaaaaaccctactcatgtagtgagtgcgagaaggtcttctctttcaggtcacagctcattgtccatcaggaaattcacacaggagggaaaccctatggctgcagtgaatgtgggaaagcctacagttggaaatcacagcttcttttacaccagagaagtcacacaggagtgaaaccgtatgaatgcagcgaatgtgggaaagcctttagtttgaagtctccattcgttgtacaccagagaactcatacaggagtgaaaccccataaatgcagtgaatgtgggaaagcctttaggagtaagtcctatctccttgttcacatccgaatgcatacaggagaaaaaccctatcaatgcagtgattgtgggaaagccttcaatatgaagacacaactcattgtacatcagggagttcacacaggaaataatccttatcaatgcggtgaatgtgggaaagcctttggtaggaaggaacagctcactgcacatctgagagctcatgcaggagagaagccctatggatgcagtgaatgtgggaaggctttcagcagcaagtcataccttgttatacataggagaacacacaccggagagagaccctatgaatgtagtttgtgtgagagagccttttgtggaaaatcacagctgattatacatcagagaactcattcaactgagaagccctatgaatgcaatgaatgtgaaaaagcctaccctaggaaggcatcacttcagatacaccagaaaactcattcgggagagaaaccttttaaatgcagtgaatgtggaaaagccttcactcagaagtcatctctcagtgaacatcagagagttcacactggagagaaaccatggaaatgctctgaatgtgggaaatccttctgttggaattcagggcttcgtatacatcggaagactcataaatgagaaatcagaatgatgcaatgtgagaaactgatgttcaggagacttcggataatatagacaggatttacaagcaggaggccctaaaattacactcatgtcaaaaatcagagaggagagagaccaaccatatttgggatgagtgtaaaagctttcagaaataagttacaaatctttgtagatgaaaataatggaaggaatgtggagcaataaatgtatcaaatgttgtagtatcatcatgaagattcagagaatttacactaggaacaccttataagttgaataaattaaggaagcattttcccattgaaagtgtgttccatggaaagtcacattccagatttgaagctgtgtttttgtaaaataaaatcttggtatgaacagttgacttcatggtggagtataaagttgtttttttaaaaatatgtaaataatgttcaggaaaaacgcagggaacagagtcttaaagttaatggatatttaatgtgactttcctgagttaacactgaatagtatttctaaaattttttgtactttattttttaatgtaacttgttctatctatctatatatatatttgatagtttgtggaataatatcccccagtattttccatattaaatgctaattatcttttgatttctttttcataagcagatctggcatttattacagggctgccgcttaagagaactcattataatgaacgtttattatattttgcagttccatgcctgttgtccattgattgacatgagcacccctgttttctctggagaaatacctcccctctctggggtgcttcctgtggtagtgtctttcaggtatccgttccactagctacaggtgagcattttacccattgttggataatggtaatctctttttcagaattttgagtctgtaattcatttgtacatgaaccagaaaatgtgggaactcattcattcttgtcccagaattctgttgagaacatccattcattctggctaattgattacaagaataactgtggatacgatccctttagaacctgcttctctgatctgtgtgtttcctcacttctcaataaaaatg

SEQ ID NO: 433008 - DNA, 2707 bp, Homo sapiens
ctgcatcttttccatgtcacctaatgtaattgcatccaattgaacagggtgtgtgttatttcagggattattgtcattcaaggatatatctatggagttcacctgggatgaatggcagctactggattctacacagaagtacctgtacagagatgtgatattggaaaactatcataacctgatatcagtggggtatcatggtaccaagcctgacttaatcttcaagttggaacaaggagaagatccatggataataaatgccaaaatttccaggcagagctgtccagatggctgggaagaatggtaccagaacaatcaagatgagcttgagagtattgaaagaagctatgcttgtagtgtgttgggaagacttaatctgagcaaaacccatgattcttcaagacagagactctataacacacgtggaaaaagtttgacacaaaactcagctccaagcagaagttatttaagaaagaatcctgataagtttcatggttatgaagaaccatattttcttaagcatcaaagagctcatagcatagaaaaaaactgtgtgtgtagtgaatgtgggaaagcttttcgttgtaagtcacagctcattgtacatctcagaattcatacaggagagagaccttatgaatgcagtaaatgtgaaagagccttcagtgccaagtcaaaccttaatgctcatcagagagttcatacaggagaaaaaccctactcatgtagtgagtgcgagaaggtcttctctttcaggtcacagctcattgtccatcaggaaattcacacaggagggaaaccctatggctgcagtgaatgtgggaaagcctacagttggaaatcacagcttcttttacaccagagaagtcacacaggagtgaaaccgtatgaatgcagcgaatgtgggaaagcctttagtttgaagtctccattcgttgtacaccagagaactcatacaggagtgaaaccccataaatgcagtgaatgtgggaaagcctttaggagtaagtcctatctccttgttcacatccgaatgcatacaggagaaaaaccctatcaatgcagtgattgtgggaaagccttcaatatgaagacacaactcattgtacatcagggagttcacacaggaaataatccttatcaatgcggtgaatgtgggaaagcctttggtaggaaggaacagctcactgcacatctgagagctcatgcaggagagaagccctatggatgcagtgaatgtgggaaggctttcagcagcaagtcataccttgttatacataggagaacacacaccggagagagaccctatgaatgtagtttgtgtgagagagccttttgtggaaaatcacagctgattatacatcagagaactcattcaactgagaagccctatgaatgcaatgaatgtgaaaaagcctaccctaggaaggcatcacttcagatacaccagaaaactcattcgggagagaaaccttttaaatgcagtgaatgtggaaaagccttcactcagaagtcatctctcagtgaacatcagagagttcacactggagagaaaccatggaaatgctctgaatgtgggaaatccttctgttggaattcagggcttcgtatacatcggaagactcataaatgagaaatcagaatgatgcaatgtgagaaactgatgttcaggagacttcggataatatagacaggatttacaagcaggaggccctaaaattacactcatgtcaaaaatcagagaggagagagaccaaccatatttgggatgagtgtaaaagctttcagaaataagttacaaatctttgtagatgaaaataatggaaggaatgtggagcaataaatgtatcaaatgttgtagtatcatcatgaagattcagagaatttacactaggaacaccttataagttgaataaattaaggaagcattttcccattgaaagtgtgttccatggaaagtcacattccagatttgaagctgtgtttttgtaaaataaaatcttggtatgaacagttgacttcatggtggagtataaagttgtttttttaaaaatatgtaaataatgttcaggaaaaacgcagggaacagagtcttaaagttaatggatatttaatgtgactttcctgagttaacactgaatagtatttctaaaattttttgtactttattttttaatgtaacttgttctatctatctatatatatatttgatagtttgtggaataatatcccccagtattttccatattaaatgctaattatcttttgatttctttttcataagcagatctggcatttattacagggctgccgcttaagagaactcattataatgaacgtttattatattttgcagttccatgcctgttgtccattgattgacatgagcacccctgttttctctggagaaatacctcccctctctggggtgcttcctgtggtagtgtctttcaggtatccgttccactagctacaggtgagcattttacccattgttggataatggtaatctctttttcagaattttgagtctgtaattcatttgtacatgaaccagaaaatgtgggaactcattcattcttgtcccagaattctgttgagaacatccattcattctggctaattgattacaagaataactgtggatacgatccctttagaacctgcttctctgatctgtgtgtttcctcacttctcaataaaaatg

SEQ ID NO: 433009 - DNA, 970 bp, Homo sapiens
cggaatctggccagcgggtgtacctggctgagtctctgtggccgcggagcgcggagctaagcggctcggattatcctgggcagaccagagacttgaccagctaaacacttccgtcggtccggggcgtggacggggccagatcagcctcctgctctcccgagtcagggccacggaaaggcacaaatccatccgtgcgactcctggtacccagaccgggaggttgtctagtcacgcgcggtccgtgttgggcgagagctgaggagccggcgtccctgccaacgactcggccccgggacggtcaggagcctggggccctggtcccgcacctgtcttcgggcggacgcatccctcacggtctctccgcagcccgcgggtcctgcccccgcaggcagcgcgcgaacgtgggcgtggggatggccaccagtttccggacagcttcgtgctggcctgtaactcacatgggaggtctaaactggaaatacataaagacaccttattgtattcgtggaagctcagagtgtgaccaactggaaccctcaagaggaccgaggtgaggactcaggttaatgaaaggaaaggacacacggtggagaaaggctgttgtgctaaagaaacgagagaaagttaggagtggatttctccccctgtgagtttgttcctttgtcagagatcagttgactatatttatatgggtctatttctgggctctttattgagttctattgatctatttgttgtttcactaataccacactgccacactgtcttgatttttgtagctttgtaataagtctttttttatttttttgagacagagcgagactcaacaacaacaacaaaataaaaatagctaggcatggtggctgatgcctgtaatcccagcactttgggagactgaagccaggagtttgagaccagcctgggcaacgcagagaccttgcctatacaaaacaacaacaacaacaaaaaa

SEQ ID NO: 433010 - DNA, 442 bp, Homo sapiens
aattattgatggagtgaaccagaggggagtctttacaagtgatttgattgccaaatcctttgccctcggtgagtggtgttgacgacgttgccggatgtggtgctctaccattgagctatacagccggagactaggaatgctattggaagagggaccctgggaatgactttcgcaggtgttgaatatccaatgcctgtatttcagcctgtaactcacatgggaggtctaaactggaaatacataaagacaccttattgtattcgtggaagctcagagtgtgaccaactggaaccctcaagaggaccgaggtgaggactcaggttaatgaaaggaaaggacacacggtggagaaaggctgttgtgctaaagaaacgagagaaagttaggagtggatttctccccctgtgagtttgttcctttgtcagagatcagttgactatat

SEQ ID NO: 433011 - DNA, 1359 bp, Homo sapiens
cagcaggtctcacagagtttgctctttaatactctccccagcacacggaaggggaagggggtggaggttgctgctatgagagagaaaaaaaaaaacagccacaatagagattctgccttcaaaggttggcttgccacctgaagcagccactgcccagggggtgcaaagaagagacagcagcgcccagcttggaggtgctaactccagaggccagcatcagcaactgggcacagaaaggagccgcctgggcagggaccatggcacggccacatccctggtggctgtgcgttctggggaccctggtggggctctcagctactccagcccccaagagctgcccagagaggcactactgggctcagggaaagctgtgctgccagatgtgtgagccaggaacattcctcgtgaaggactgtgaccagcatagaaaggctgctcagtgtgatccttgcataccgggggtctccttctctcctgaccaccacacccggccccactgtgagagctgtcggcactgtaactctggtcttctcgttcgcaactgcaccatcactgccaatgctgagtgtgcctgtcgcaatggctggcagtgcagggacaaggagtgcaccgagtgtgatcctcttccaaacccttcgctgaccgctcggtcgtctcaggccctgagcccacaccctcagcccacccacttaccttatgtcagtgagatgctggaggccaggacagctgggcacatgcagactctggctgacttcaggcagctgcctgcccggactctctctacccactggccaccccaaagatccctgtgcagctccgattttattcgcatccttgtgatcttctctggaatgttccttgttttcaccctggccggggccctgttcctccatcaacgaaggaaatatagatcaaacaaaggagaaagtcctgtggagcctgcagagccttgtcgttacagctgccccagggaggaggagggcagcaccatccccatccaggaggattaccgaaaaccggagcctgcctgctccccctgagccagcacctgcgggagctgcactacagccctggcctccacccccaccccgccgaccatccaagggagagtgagacctggcagccacaactgcagtcccatcctcttgtcagggccctttcctgtgtacacgtgacagagtgccttttcgagactggcagggacgaggacaaatatggatgaggtggagagtgggaagcaggagcccagccagctgcgcctgcgctgcaggagggcgggggctctggttgtaaaacacacttcctgctgcgaaagacccacatgctacaagacgggcaaaataaagtgacagatgacca

SEQ ID NO: 433012 - DNA, 536 bp, Homo sapiens
gacaaaggagaaagtcctgtggagcctgcagagccttgttttcaccctggccggggccctgttcctccatcaacgaaggaaatatagatcaaacaaaggagaaagtcctgtggagcctgcagagccttgtcgttacagctgccccagggaggaggagggcagcaccatccccatccaggaggattaccgaaaaccggagcctgcctgctccccctgagccagcacctgcgggagctgcactacagccctggcctccacccccaccccgccgaccatccaagggagagtgagacctggcagccacaactgcagtcccatcctcttgtcagggccctttcctgtgtacacgtgacagagtgccttttcgagactggcagggacgaggacaaatatggatgaggtggagagtgggaagcaggagcccagccagctgcgcctgcgctgcaggagggcgggggctctggttgtaaaacacacttcctgctgcgaaagacccacatgctacaagacgggcaaaataaagtgacagatgacca

SEQ ID NO: 433013 - DNA, 1281 bp, Homo sapiens
cccttattcccaaaaaaaaggggtttttggggggcttttttggccccaaacccctttggaaaaagcagccactgcccagggggtgcaaagaagagacagcagcgcccagcttggaggtgctaactccagaggccagcatcagcaactgggcacagaaaggagccgcctgggcagggaccatggcacggccacatccctggtggctgtgcgttctggggaccctggtggggctctcagctactccagcccccaagagctgcccagagaggcactactgggctcagggaaagctgtgctgccagatgtgtgagccaggaacattcctcgtgaaggactgtgaccagcatagaaaggctgctcagtgtgatccttgcataccgggggtctccttctctcctgaccaccacacccggccccactgtgagagctgtcggcactgtaactctggtcttctcgttcgcaactgcaccatcactgccaatgctgagtgtgcctgtcgcaatggctggcagtgcagggacaaggagtgcaccgagtgtgatcctcttccaaacccttcgctgaccgctcggtcgtctcaggccctgagcccacaccctcagcccacccacttaccttatgtcagtgagatgctggaggccaggacagctgggcacatgcagactctggctgacttcaggcagctgcctgcccggactctctctacccactggccaccccaaagatccctgtgcagctccgattttattcgcatccttgtgatcttctctggaatgttccttgttttcaccctggccggggccctgttcctccatcaacgaaggaaatatagatcaaacaaaggagaaagtcctgtggagcctgcagagccttgtcgttacagctgccccagggaggaggagggcagcaccatccccatccaggaggattaccgaaaaccggagcctgcctgctccccctgagccagcacctgcgggagctgcactacagccctggcctccacccccaccccgccgaccatccaagggagagtgagacctggcagccacaactgcagtcccatcctcttgtcagggccctttcctgtgtacacgtgacagagtgccttttcgagactggcagggacgaggacaaatatggatgaggtggagagtgggaagcaggagcccagccagctgcgcctgcgctgcaggagggcgggggctctggttgtaaaacacacttcctgctgcgaaagacccacatgctacaagacgggcaaaataaagtgacagatgacca

SEQ ID NO: 433014 - DNA, 1471 bp, Homo sapiens
cagcaggtctcacagagtttgctctttaatactctccccagcacacggaaggggaagggggtggaggttgctgctatgagagagaaaaaaaaaaacagccacaatagagattctgccttcaaaggttggcttgccacctgaagcagccactgcccagggggtgcaaagaagagacagcagcgcccagcttggaggtgctaactccagaggccagcatcagcaactgggcacagaaaggagccgcctgggcagggaccatggcacggccacatccctggtggctgtgcgttctggggaccctggtggggctctcagctactccagcccccaagagctgcccagagaggcactactgggctcagggaaagctgtgctgccagatgtgtgagccaggaacattcctcgtgaaggactgtgaccagcatagaaaggctgctcagtgtgatccttgcataccgggggtctccttctctcctgaccaccacacccggccccactgtgagagctgtcggcactgtaactctggtcttctcgttcgcaactgcaccatcactgccaatgctgagtgtgcctgtcgcaatggctggcagtgcagggacaaggagtgcaccgagtgtgatcctcttccaaacccttcgctgaccgctcggtcgtctcaggccctgagcccacaccctcagcccacccacttaccttatgtcagtgagatgctggaggccaggacagctgggcacatgcagactctggctgacttcaggcagctgcctgcccggactctctctacccactggccaccccaaagatccctgtgcagctccgattttattcgcatccttgtgatcttctctggaatgttccttgttttcaccctggccggggccctgttcctccatcaacgaaggaaatatagatcaactggcgtgctcctgacacccctcccccaagcgcacccgcctctacccatctccttctcccgtctccccctgcccccactgctggccaagactcatcggatctccttctgcagacaaaggagaaagtcctgtggagcctgcagagccttgtcgttacagctgccccagggaggaggagggcagcaccatccccatccaggaggattaccgaaaaccggagcctgcctgctccccctgagccagcacctgcgggagctgcactacagccctggcctccacccccaccccgccgaccatccaagggagagtgagacctggcagccacaactgcagtcccatcctcttgtcagggccctttcctgtgtacacgtgacagagtgccttttcgagactggcagggacgaggacaaatatggatgaggtggagagtgggaagcaggagcccagccagctgcgcctgcgctgcaggagggcgggggctctggttgtaaaacacacttcctgctgcgaaagacccacatgctacaagacgggcaaaataaagtgacagatgacca

SEQ ID NO: 433015 - DNA, 507 bp, Homo sapiens
gaggcccgaggggcggcccaggactcgaggatgtacacgctgctgtcgggcttgtacaagtacatgtttcagaaggacgagtactgcatcctgatcctgggcctggacaatgctgggaagacgaccttcctggagcagtcgaaaacccgatttaacaagaactacaaggggatgagtctatccaaaatcaccaccaccgtgggcctaaacatcggcactgtggatgtgggaaaggctcggctcatgttctgggacttaggagggcaggaagagctgcagtctttgtgggacaagtcaggacaagacaaagtgtggggacctggggaccctgcactcctccaaagtgagtgcctcctttcggctcagagaccttgctgctgaccaccacaggacacagaaatggcaaagaccagatgtggggacggcaggatggctgcctctcccctgatgaggttccttcagttctagcttaacatttgttcttccatgatcaccagaagactcctc

SEQ ID NO: 433016 - DNA, 869 bp, Homo sapiens
cgcgccgctgctcacccgccctgtagtccgctccccccagggccgtccccgttttaagaaatggggtgatggggcgtccctacccggcgcctgcaggggctcctggggagcgcgccggtggctcgctgctcccgggtggggcgcggggctggcgctcgagggtgccgtggcccaggcggggctgcagcgagtgtgttccccgttccgcgcgcgtgaagcgtgggagcgaagcctcgggggagggcgggagcgcggctgagctcactgtgaacacccggctgggtagtcccgcgagcaggggaggggccggaaccgatgtgtatgcggagaggtcgcagtcattgctgtgagcaggacacagtggcggctgacctgggagaagttacagagggacggggtgggagagggacgaggagtcgggaatggcccccaggctctcgtcctgagcggtcggctggacgtggggcgccactgaccaccgtggagaagcccgggggaggggaggtgctttctggctgcacactgacctatgttggggtgcccaggggatgtacacgctgctgtcgggcttgtacaagtacatgtttcagaaggacgagtactgcatcctgatcctgggcctggacaatgctgggaagacgacggtgagtgcccacgcccttgcgcgcacctttcccacggcctggcggcgcccccttcggttttgtgctgtcagctgcacgttcactacccagacggaagccaaatttcacctgagacggcaggatagtcaccaccagcctcctgaagagcagagtgttgctctgtttctgtttctgtcttttaaagaacagacctgagtaaggatatttggaagccagtatagcccc

SEQ ID NO: 433017 - DNA, 2395 bp, Homo sapiens
ctgggacgcggttcagctcattccctgaggccggcccgcgtcccgtcaggcgccgcgcggggttagcgcggggtcagcggaggtcagcgggggtcagcagcagcggctccgagggcgcggcggacgcaggatgtacacgctgctgtcgggcttgtacaagtacatgtttcagaaggacgagtactgcatcctgatcctgggcctggacaatgctgggaagacgaccttcctggagcagtcgaaaacccgatttaacaagaactacaaggggatgagtctatccaaaatcaccaccaccgtgggcctaaacatcggcactgtggatgtgggaaaggctcggctcatgttctgggacttaggagggcaggaagagctgcagtctttgtgggacaagtattatgcggagtgtcacggcgtcatctacgtcattgactccaccgacgaggagaggctggctgagtccaagcaggcgtttgagaaggtggtgaccagcgaggcgctgtgcggtgtccccgtcttggtgctggccaacaagcaggatgtggagacgtgcctctcaatccctgacatcaagacggccttcagcgactgcaccagcaagatcggcaggcgagattgcctgacccaggcctgctcggccctcacaggcaaaggggtgcgcgagggcatcgagtggatggtgaagtgtgtcgtgcggaatgtgcaccggccgccgcggcagagggacatcacgtaggcgcagccgcgctgccgtcgggacggctggtcccctggtgctggaggagtggcctcctgttggctcccatgctgctgatctggggggtgggtttgctttgctttggggttcttctatttactttgttttctcgaagacaaactttcctctatgtctggaaaagcgtaggcatccggaggctttggaggggagtctggcagcccggctggcccaggccctgcagcggcagcctttccacagggcgcagcggcggcctttcgaggccctttctggggggtctgagggagacctggttgggaattggggctccagtgctcaggctggcttgggctgcatgaggacagccctgtgggaccctcgggagaccccgtggctgtctccgccccatcgaggaggaggcccgtcagccatggctgccatctggcttctgccctgtgaccccgtgaccccgtgaccccggaagtggtctggggctgatcttgccttgaggaagacccaggccatgttcccaaaggccagcgggggccctggattgtgatgcagcctcgggacagggctgaggcctgcgggggaagacctataccccacgcctgggcctggcttcacctcaccctaatcccccgggagggagctgactgatgcaaaaagctgagggggcctgctgggagtggctgtttttatgccccagccccgcaagttggggagtgtttgtgggggtccagagccctcccccagccaggagagaacctcccggaggggttctctgtggggccctgtgtcccctgctcgggagtaaggctggtcctggggtcctccctgcacggaccccactgggcctgccgagtgctgtgttcttcctcagtctggctgtgggcaggagcggcctgcccagtgtcacccagggtgagtgcaaaataaagacggcgagtgtggctctgtccatcccttccctcctggagggtggaggctcctggctgttggacacggaaaaaaaaaaagagaaaaaaaaaacaaagaaaacaaagaaaagaaaaataaaaaaaaaaaaaagaaagaagaggggggcggcgcgcgcgccacaagagaggctatctctcccacgagggggcgcgcgaccatgctgctcgcgcgcgcgcgccccgcgcggttttctgtgggagacaacggggcgcgcccattatagagggggagcgcgcgattatatatataagagcacgagagcgagcggcgggcgcgcggagggtttcaaacacaagcggggagagagcgggggagagaaaacgcggagagcacccgcggagagcgcctcttgaggggaagaggagacccttaactaatgcgggggggggggggagcgaaaaatattgagtgggggggcgaacaaaacatcacctctagcgaggagaagtttaataaaggcgtctctagagggggggacaaatatataataaacaatatatgcaaagaggggtgtatatccagggggtgtgtgaaaaaacaataaagggggtgaaaatatggtgattgtgaggaggtgagtaaaaaaaaatttgtgggggaaaattagggggggtgagtatatagtaatatgtaaaaagaaacaaatattatattttaccccggggggggggttatgatgtttatgaatataaaaggtga

SEQ ID NO: 433018 - DNA, 1668 bp, Homo sapiens
ctgggacgcggttcagctcattccctgaggccggcccgcgtcccgtcaggcgccgcgcggggttagcgcggggtcagcggaggtcagcgggggtcagcagcagcggctccgagggcgcggcggacgcaggatgtacacgctgctgtcgggcttgtacaagtacatgtttcagaaggacgagtactgcatcctgatcctgggcctggacaatgctgggaagacgaccttcctggagcagtcgaaaacccgatttaacaagaactacaaggggatgagtctatccaaaatcaccaccaccgtgggcctaaacatcggcactgtggatgtgggaaaggctcggctcatgttctgggacttaggagggcaggaagagctgcagtctttgtgggacaagtattatgcggagtgtcacggcgtcatctacgtcattgactccaccgacgaggagaggctggctgagtccaagcaggcgtttgagaaggtggtgaccagcgaggcgctgtgcggtgtccccgtcttggtgctggccaacaagcaggatgtggagacgtgcctctcaatccctgacatcaagacggccttcagcgactgcaccagcaagatcggcaggcgagattgcctgacccaggcctgctcggccctcacaggcaaaggggtgcgcgagggcatcgagtggatggtgaagtgtgtcgtgcggaatgtgcaccggccgccgcggcagagggacatcacgtaggcgcagccgcgctgccgtcgggacggctggtcccctggtgctggaggagtggcctcctgttggctcccatgctgctgatctggggggtgggtttgctttgctttggggttcttctatttactttgttttctcgaagacaaactttcctctatgtctggaaaagcgtaggcatccggaggctttggaggggagtctggcagcccggctggcccaggccctgcagcggcagcctttccacagggcgcagcggcggcctttcgaggccctttctggggggtctgagggagacctggttgggaattggggctccagtgctcaggctggcttgggctgcatgaggacagccctgtgggaccctcgggagaccccgtggctgtctccgccccatcgaggaggaggcccgtcagccatggctgccatctggcttctgccctgtgaccccgtgaccccgtgaccccggaagtggtctggggctgatcttgccttgaggaagacccaggccatgttcccaaaggccagcgggggccctggattgtgatgcagcctcgggacagggctgaggcctgcgggggaagacctataccccacgcctgggcctggcttcacctcaccctaatcccccgggagggagctgactgatgcaaaaagctgagggggcctgctgggagtggctgtttttatgccccagccccgcaagttggggagtgtttgtgggggtccagagccctcccccagccaggagagaacctcccggaggggttctctgtggggccctgtgtcccctgctcgggagtaaggctggtcctggggtcctccctgcacggaccccactgggcctgccgagtgctgtgttcttcctcagtctggctgtgggcaggagcggcctgcccagtgtcacccagggtgagtgcaaaataaagacggcgagtgtg

SEQ ID NO: 433019 - DNA, 2813 bp, Homo sapiens
cgcgccgctgctcacccgccctgtagtccgctccccccagggccgtccccgttttaagaaatggggtgatggggcgtccctacccggcgcctgcaggggctcctggggagcgcgccggtggctcgctgctcccgggtggggcgcggggctggcgctcgagggtgccgtggcccaggcggggctgcagcgagtgtgttccccgttccgcgcgcgtgaagcgtgggagcgaagcctcgggggagggcgggagcgcggctgagctcactgtgaacacccggctgggtagtcccgcgagcaggggaggggccggaaccgatgtgtatgcggagaggtcgcagtcattgctgtgagcaggacacagtggcggctgacctgggagaagttacagagggacggggtgggagagggacgaggagtcgggaatggcccccaggctctcgtcctgagcggtcggctggacgtggggcgccactgaccaccgtggagaagcccgggggaggggaggtgctttctggctgcacactgacctatgttggggtgcccaggggatgtacacgctgctgtcgggcttgtacaagtacatgtttcagaaggacgagtactgcatcctgatcctgggcctggacaatgctgggaagacgaccttcctggagcagtcgaaaacccgatttaacaagaactacaaggggatgagtctatccaaaatcaccaccaccgtgggcctaaacatcggcactgtggatgtgggaaaggctcggctcatgttctgggacttaggagggcaggaagagctgcagtctttgtgggacaagtattatgcggagtgtcacggcgtcatctacgtcattgactccaccgacgaggagaggctggctgagtccaagcaggcgtttgagaaggtggtgaccagcgaggcgctgtgcggtgtccccgtcttggtgctggccaacaagcaggatgtggagacgtgcctctcaatccctgacatcaagacggccttcagcgactgcaccagcaagatcggcaggcgagattgcctgacccaggcctgctcggccctcacaggcaaaggggtgcgcgagggcatcgagtggatggtgaagtgtgtcgtgcggaatgtgcaccggccgccgcggcagagggacatcacgtaggcgcagccgcgctgccgtcgggacggctggtcccctggtgctggaggagtggcctcctgttggctcccatgctgctgatctggggggtgggtttgctttgctttggggttcttctatttactttgttttctcgaagacaaactttcctctatgtctggaaaagcgtaggcatccggaggctttggaggggagtctggcagcccggctggcccaggccctgcagcggcagcctttccacagggcgcagcggcggcctttcgaggccctttctggggggtctgagggagacctggttgggaattggggctccagtgctcaggctggcttgggctgcatgaggacagccctgtgggaccctcgggagaccccgtggctgtctccgccccatcgaggaggaggcccgtcagccatggctgccatctggcttctgccctgtgaccccgtgaccccgtgaccccggaagtggtctggggctgatcttgccttgaggaagacccaggccatgttcccaaaggccagcgggggccctggattgtgatgcagcctcgggacagggctgaggcctgcgggggaagacctataccccacgcctgggcctggcttcacctcaccctaatcccccgggagggagctgactgatgcaaaaagctgagggggcctgctgggagtggctgtttttatgccccagccccgcaagttggggagtgtttgtgggggtccagagccctcccccagccaggagagaacctcccggaggggttctctgtggggccctgtgtcccctgctcgggagtaaggctggtcctggggtcctccctgcacggaccccactgggcctgccgagtgctgtgttcttcctcagtctggctgtgggcaggagcggcctgcccagtgtcacccagggtgagtgcaaaataaagacggcgagtgtggctctgtccatcccttccctcctggagggtggaggctcctggctgttggacacggaaaaaaaaaaagagaaaaaaaaaacaaagaaaacaaagaaaagaaaaataaaaaaaaaaaaaagaaagaagaggggggcggcgcgcgcgccacaagagaggctatctctcccacgagggggcgcgcgaccatgctgctcgcgcgcgcgcgccccgcgcggttttctgtgggagacaacggggcgcgcccattatagagggggagcgcgcgattatatatataagagcacgagagcgagcggcgggcgcgcggagggtttcaaacacaagcggggagagagcgggggagagaaaacgcggagagcacccgcggagagcgcctcttgaggggaagaggagacccttaactaatgcgggggggggggggagcgaaaaatattgagtgggggggcgaacaaaacatcacctctagcgaggagaagtttaataaaggcgtctctagagggggggacaaatatataataaacaatatatgcaaagaggggtgtatatccagggggtgtgtgaaaaaacaataaagggggtgaaaatatggtgattgtgaggaggtgagtaaaaaaaaatttgtgggggaaaattagggggggtgagtatatagtaatatgtaaaaagaaacaaatattatattttaccccggggggggggttatgatgtttatgaatataaaaggtga

SEQ ID NO: 433020 - DNA, 2347 bp, Homo sapiens
gacaaccacaaacacacagaacaattacggtcaggtacgaggctgcgtgggttacagcagcggctccgagggcgcggcggagatgtacacgctgctgtcgggcttgtacaagtacatgtttcagaaggacgagtactgcatcctgatcctgggcctggacaatgctgggaagacgaccttcctggagcagtcgaaaacccgatttaacaagaactacaaggggatgagtctatccaaaatcaccaccaccgtgggcctaaacatcggcactgtggatgtgggaaaggctcggctcatgttctgggacttaggagggcaggaagagctgcagtctttgtgggacaagtattatgcggagtgtcacggcgtcatctacgtcattgactccaccgacgaggagaggctggctgagtccaagcaggcgtttgagaaggtggtgaccagcgaggcgctgtgcggtgtccccgtcttggtgctggccaacaagcaggatgtggagacgtgcctctcaatccctgacatcaagacggccttcagcgactgcaccagcaagatcggcaggcgagattgcctgacccaggcctgctcggccctcacaggcaaaggggtgcgcgagggcatcgagtggatggtgaagtgtgtcgtgcggaatgtgcaccggccgccgcggcagagggacatcacgtaggcgcagccgcgctgccgtcgggacggctggtcccctggtgctggaggagtggcctcctgttggctcccatgctgctgatctggggggtgggtttgctttgctttggggttcttctatttactttgttttctcgaagacaaactttcctctatgtctggaaaagcgtaggcatccggaggctttggaggggagtctggcagcccggctggcccaggccctgcagcggcagcctttccacagggcgcagcggcggcctttcgaggccctttctggggggtctgagggagacctggttgggaattggggctccagtgctcaggctggcttgggctgcatgaggacagccctgtgggaccctcgggagaccccgtggctgtctccgccccatcgaggaggaggcccgtcagccatggctgccatctggcttctgccctgtgaccccgtgaccccgtgaccccggaagtggtctggggctgatcttgccttgaggaagacccaggccatgttcccaaaggccagcgggggccctggattgtgatgcagcctcgggacagggctgaggcctgcgggggaagacctataccccacgcctgggcctggcttcacctcaccctaatcccccgggagggagctgactgatgcaaaaagctgagggggcctgctgggagtggctgtttttatgccccagccccgcaagttggggagtgtttgtgggggtccagagccctcccccagccaggagagaacctcccggaggggttctctgtggggccctgtgtcccctgctcgggagtaaggctggtcctggggtcctccctgcacggaccccactgggcctgccgagtgctgtgttcttcctcagtctggctgtgggcaggagcggcctgcccagtgtcacccagggtgagtgcaaaataaagacggcgagtgtggctctgtccatcccttccctcctggagggtggaggctcctggctgttggacacggaaaaaaaaaaagagaaaaaaaaaacaaagaaaacaaagaaaagaaaaataaaaaaaaaaaaaagaaagaagaggggggcggcgcgcgcgccacaagagaggctatctctcccacgagggggcgcgcgaccatgctgctcgcgcgcgcgcgccccgcgcggttttctgtgggagacaacggggcgcgcccattatagagggggagcgcgcgattatatatataagagcacgagagcgagcggcgggcgcgcggagggtttcaaacacaagcggggagagagcgggggagagaaaacgcggagagcacccgcggagagcgcctcttgaggggaagaggagacccttaactaatgcgggggggggggggagcgaaaaatattgagtgggggggcgaacaaaacatcacctctagcgaggagaagtttaataaaggcgtctctagagggggggacaaatatataataaacaatatatgcaaagaggggtgtatatccagggggtgtgtgaaaaaacaataaagggggtgaaaatatggtgattgtgaggaggtgagtaaaaaaaaatttgtgggggaaaattagggggggtgagtatatagtaatatgtaaaaagaaacaaatattatattttaccccggggggggggttatgatgtttatgaatataaaaggtga

SEQ ID NO: 433021 - DNA, 2301 bp, Homo sapiens
ctgggacgcggttcagctcattccctgaggccggcccgcgtcccgtcaggcgccgcgcggggttagcgcggggtcagcggaggtcagcgggggtcagcagcagcggctccgagggcgcggcggacgcagaccttcctggagcagtcgaaaacccgatttaacaagaactacaaggggatgagtctatccaaaatcaccaccaccgtgggcctaaacatcggcactgtggatgtgggaaaggctcggctcatgttctgggacttaggagggcaggaagagctgcagtctttgtgggacaagtattatgcggagtgtcacggcgtcatctacgtcattgactccaccgacgaggagaggctggctgagtccaagcaggcgtttgagaaggtggtgaccagcgaggcgctgtgcggtgtccccgtcttggtgctggccaacaagcaggatgtggagacgtgcctctcaatccctgacatcaagacggccttcagcgactgcaccagcaagatcggcaggcgagattgcctgacccaggcctgctcggccctcacaggcaaaggggtgcgcgagggcatcgagtggatggtgaagtgtgtcgtgcggaatgtgcaccggccgccgcggcagagggacatcacgtaggcgcagccgcgctgccgtcgggacggctggtcccctggtgctggaggagtggcctcctgttggctcccatgctgctgatctggggggtgggtttgctttgctttggggttcttctatttactttgttttctcgaagacaaactttcctctatgtctggaaaagcgtaggcatccggaggctttggaggggagtctggcagcccggctggcccaggccctgcagcggcagcctttccacagggcgcagcggcggcctttcgaggccctttctggggggtctgagggagacctggttgggaattggggctccagtgctcaggctggcttgggctgcatgaggacagccctgtgggaccctcgggagaccccgtggctgtctccgccccatcgaggaggaggcccgtcagccatggctgccatctggcttctgccctgtgaccccgtgaccccgtgaccccggaagtggtctggggctgatcttgccttgaggaagacccaggccatgttcccaaaggccagcgggggccctggattgtgatgcagcctcgggacagggctgaggcctgcgggggaagacctataccccacgcctgggcctggcttcacctcaccctaatcccccgggagggagctgactgatgcaaaaagctgagggggcctgctgggagtggctgtttttatgccccagccccgcaagttggggagtgtttgtgggggtccagagccctcccccagccaggagagaacctcccggaggggttctctgtggggccctgtgtcccctgctcgggagtaaggctggtcctggggtcctccctgcacggaccccactgggcctgccgagtgctgtgttcttcctcagtctggctgtgggcaggagcggcctgcccagtgtcacccagggtgagtgcaaaataaagacggcgagtgtggctctgtccatcccttccctcctggagggtggaggctcctggctgttggacacggaaaaaaaaaaagagaaaaaaaaaacaaagaaaacaaagaaaagaaaaataaaaaaaaaaaaaagaaagaagaggggggcggcgcgcgcgccacaagagaggctatctctcccacgagggggcgcgcgaccatgctgctcgcgcgcgcgcgccccgcgcggttttctgtgggagacaacggggcgcgcccattatagagggggagcgcgcgattatatatataagagcacgagagcgagcggcgggcgcgcggagggtttcaaacacaagcggggagagagcgggggagagaaaacgcggagagcacccgcggagagcgcctcttgaggggaagaggagacccttaactaatgcgggggggggggggagcgaaaaatattgagtgggggggcgaacaaaacatcacctctagcgaggagaagtttaataaaggcgtctctagagggggggacaaatatataataaacaatatatgcaaagaggggtgtatatccagggggtgtgtgaaaaaacaataaagggggtgaaaatatggtgattgtgaggaggtgagtaaaaaaaaatttgtgggggaaaattagggggggtgagtatatagtaatatgtaaaaagaaacaaatattatattttaccccggggggggggttatgatgtttatgaatataaaaggtga

SEQ ID NO: 433022 - DNA, 1679 bp, Homo sapiens
ctgggacgcggttcagctcattccctgaggccggcccgcgtcccgtcaggcgccgcgcggggttagcgcggggtcagcggaggtcagcgggggtcagcagcagcggctccgagggcgcggcggacgcaggatgtacacgctgctgtcgggcttgtacaagtacatgtttcagaaggacgagtactgcatcctgatcctgggcctggacaatgctgggaagacgaccttcctggagcagtcgaaaacccgatttaacaagaactacaaggggatgagtctatccaaaatcaccaccaccgtgggcctaaacatcggcactgtggatgtgggaaaggctcggctcatgttctgggacttaggagggcaggaagagctgcagtctttgtgggacaagtattatgcggagtgtcacggcgtcatctacgtcattgactccaccgacgaggagaggctggctgagtccaagcaggcgtttgagaaggtggtgaccagcgaggcgctgtgcggtgtccccgtcttggtgctggccaacaagcaggatgtggagacgtgcctctcaatccctgacatcaagacggccttcagcgactgcaccagcaagatcggcaggcgagattgcctgacccaggcctgctcggccctcacaggcaaaggggtgcgcgagggcatcgagtggatggtgaagtgtgtcgtgcggaatgtgcaccggccgccgcggcagagggacatcacgtaggcgcagccgcgctgccgtcgggacggctggtcccctggtgctggaggagtggcctcctgttggctcccatgctgctgatctggggggtgggtttgctttgctttggggttcttctatttactttgttttctcgaagacaaactttcctctatgtctggaaaagcgtaggcatccggaggctttggaggggagtctggcagcccggctggcccaggccctgcagcggcagcctttccacagggcgcagcggcggcctttcgaggccctttctggggggtctgagggagacctggttgggaattggggctccagtgctcaggctggcttgggctgcatgaggacagccctgtgggaccctcgggagaccccgtggctgtctccgccccatcgaggaggaggcccgtcagccatggctgccatctggcttctgccctgtgaccccgtgaccccgtgaccccggaagtggtctggggctgatcttgccttgaggaagacccaggccatgttcccaaaggccagcgggggccctggattgtgatgcagcctcgggacagggctgaggcctgcgggggaagacctataccccacgcctgggcctggcttcacctcaccctaatcccccgggagggagctgactgatgcaaaaagctgagggggcctgctgggagtggctgtttttatgccccagccccgcaagttggggagtgtttgtgggggtccagagccctcccccagccaggagagaacctcccggaggggttctctgtggggccctgtgtcccctgctcgggagtaaggctggtcctggggtcctccctgcacggaccccactgggcctgccgagtgctgtgttcttcctcagtattgcctgttggatctattattcggctatctcccatgtgtaaccctttatggttgaaggtgttcataaatctttatcaaa

SEQ ID NO: 433023 - DNA, 2301 bp, Homo sapiens
tgtctgggtgcggttataaagtaggcactgcttgcgcacattgtcatagctgatgtcctgacccagcttatcttgtgcatccgtgagtacagtctgccggatctccctagtagatagaactcagtcattactttcgataacgccaggtctcagacctgacacttaaatgaatcggggatgagtctatccaaaatcaccaccaccgtgggcctaaacatcggcactgtggatgtgggaaaggctcggctcatgttctgggacttaggagggcaggaagagctgcagtctttgtgggacaagtattatgcggagtgtcacggcgtcatctacgtcattgactccaccgacgaggagaggctggctgagtccaagcaggcgtttgagaaggtggtgaccagcgaggcgctgtgcggtgtccccgtcttggtgctggccaacaagcaggatgtggagacgtgcctctcaatccctgacatcaagacggccttcagcgactgcaccagcaagatcggcaggcgagattgcctgacccaggcctgctcggccctcacaggcaaaggggtgcgcgagggcatcgagtggatggtgaagtgtgtcgtgcggaatgtgcaccggccgccgcggcagagggacatcacgtaggcgcagccgcgctgccgtcgggacggctggtcccctggtgctggaggagtggcctcctgttggctcccatgctgctgatctggggggtgggtttgctttgctttggggttcttctatttactttgttttctcgaagacaaactttcctctatgtctggaaaagcgtaggcatccggaggctttggaggggagtctggcagcccggctggcccaggccctgcagcggcagcctttccacagggcgcagcggcggcctttcgaggccctttctggggggtctgagggagacctggttgggaattggggctccagtgctcaggctggcttgggctgcatgaggacagccctgtgggaccctcgggagaccccgtggctgtctccgccccatcgaggaggaggcccgtcagccatggctgccatctggcttctgccctgtgaccccgtgaccccgtgaccccggaagtggtctggggctgatcttgccttgaggaagacccaggccatgttcccaaaggccagcgggggccctggattgtgatgcagcctcgggacagggctgaggcctgcgggggaagacctataccccacgcctgggcctggcttcacctcaccctaatcccccgggagggagctgactgatgcaaaaagctgagggggcctgctgggagtggctgtttttatgccccagccccgcaagttggggagtgtttgtgggggtccagagccctcccccagccaggagagaacctcccggaggggttctctgtggggccctgtgtcccctgctcgggagtaaggctggtcctggggtcctccctgcacggaccccactgggcctgccgagtgctgtgttcttcctcagtctggctgtgggcaggagcggcctgcccagtgtcacccagggtgagtgcaaaataaagacggcgagtgtggctctgtccatcccttccctcctggagggtggaggctcctggctgttggacacggaaaaaaaaaaagagaaaaaaaaaacaaagaaaacaaagaaaagaaaaataaaaaaaaaaaaaagaaagaagaggggggcggcgcgcgcgccacaagagaggctatctctcccacgagggggcgcgcgaccatgctgctcgcgcgcgcgcgccccgcgcggttttctgtgggagacaacggggcgcgcccattatagagggggagcgcgcgattatatatataagagcacgagagcgagcggcgggcgcgcggagggtttcaaacacaagcggggagagagcgggggagagaaaacgcggagagcacccgcggagagcgcctcttgaggggaagaggagacccttaactaatgcgggggggggggggagcgaaaaatattgagtgggggggcgaacaaaacatcacctctagcgaggagaagtttaataaaggcgtctctagagggggggacaaatatataataaacaatatatgcaaagaggggtgtatatccagggggtgtgtgaaaaaacaataaagggggtgaaaatatggtgattgtgaggaggtgagtaaaaaaaaatttgtgggggaaaattagggggggtgagtatatagtaatatgtaaaaagaaacaaatattatattttaccccggggggggggttatgatgtttatgaatataaaaggtga

SEQ ID NO: 433024 - DNA, 2865 bp, Homo sapiens
cgcgccgctgctcacccgccctgtagtccgctccccccagggccgtccccgttttaagaaatggggtgatggggcgtccctacccggcgcctgcaggggctcctggggagcgcgccggtggctcgctgctcccgggtggggcgcggggctggcgctcgagggtgccgtggcccaggcggggctgcagcgagtgtgttccccgttccgcgcgcgtgaagcgtgggagcgaagcctcgggggagggcgggagcgcggctgagctcactgtgaacacccggctgggtagtcccgcgagcaggggaggggccggaaccgatgtgtatgcggagaggtcgcagtcattgctgtgagcaggacacagtggcggctgacctgggagaagttacagagggacggggtgggagagggacgaggagtcgggaatggcccccaggctctcgtcctgagcggtcggctggacgtggggcgccactgaccaccgtggagaagcccgggggaggggaggtgctttctggctgcacactgacctatgttggggtgcccaggggatgtacacgctgctgtcgggcttgtacaagtacatgtttcagaaggacgagtactgcatcctgatcctgggcctggacaatgctgggaagacgtgagagctagggaaggacgaccaactgatgaacagacgaggaacctcttgtggagcaagaaatctatcatatgaataatagaatgcaaggccaatgaacatccatttcactcattaattctcaagacagtcaggtctatctcggcactgtggatgtgggaaaggctcggctcatgttctgggacttaggagggcaggaagagctgcagtctttgtgggacaagtattatgcggagtgtcacggcgtcatctacgtcattgactccaccgacgaggagaggctggctgagtccaagcaggcgtttgagaaggtggtgaccagcgaggcgctgtgcggtgtccccgtcttggtgctggccaacaagcaggatgtggagacgtgcctctcaatccctgacatcaagacggccttcagcgactgcaccagcaagatcggcaggcgagattgcctgacccaggcctgctcggccctcacaggcaaaggggtgcgcgagggcatcgagtggatggtgaagtgtgtcgtgcggaatgtgcaccggccgccgcggcagagggacatcacgtaggcgcagccgcgctgccgtcgggacggctggtcccctggtgctggaggagtggcctcctgttggctcccatgctgctgatctggggggtgggtttgctttgctttggggttcttctatttactttgttttctcgaagacaaactttcctctatgtctggaaaagcgtaggcatccggaggctttggaggggagtctggcagcccggctggcccaggccctgcagcggcagcctttccacagggcgcagcggcggcctttcgaggccctttctggggggtctgagggagacctggttgggaattggggctccagtgctcaggctggcttgggctgcatgaggacagccctgtgggaccctcgggagaccccgtggctgtctccgccccatcgaggaggaggcccgtcagccatggctgccatctggcttctgccctgtgaccccgtgaccccgtgaccccggaagtggtctggggctgatcttgccttgaggaagacccaggccatgttcccaaaggccagcgggggccctggattgtgatgcagcctcgggacagggctgaggcctgcgggggaagacctataccccacgcctgggcctggcttcacctcaccctaatcccccgggagggagctgactgatgcaaaaagctgagggggcctgctgggagtggctgtttttatgccccagccccgcaagttggggagtgtttgtgggggtccagagccctcccccagccaggagagaacctcccggaggggttctctgtggggccctgtgtcccctgctcgggagtaaggctggtcctggggtcctccctgcacggaccccactgggcctgccgagtgctgtgttcttcctcagtctggctgtgggcaggagcggcctgcccagtgtcacccagggtgagtgcaaaataaagacggcgagtgtggctctgtccatcccttccctcctggagggtggaggctcctggctgttggacacggaaaaaaaaaaagagaaaaaaaaaacaaagaaaacaaagaaaagaaaaataaaaaaaaaaaaaagaaagaagaggggggcggcgcgcgcgccacaagagaggctatctctcccacgagggggcgcgcgaccatgctgctcgcgcgcgcgcgccccgcgcggttttctgtgggagacaacggggcgcgcccattatagagggggagcgcgcgattatatatataagagcacgagagcgagcggcgggcgcgcggagggtttcaaacacaagcggggagagagcgggggagagaaaacgcggagagcacccgcggagagcgcctcttgaggggaagaggagacccttaactaatgcgggggggggggggagcgaaaaatattgagtgggggggcgaacaaaacatcacctctagcgaggagaagtttaataaaggcgtctctagagggggggacaaatatataataaacaatatatgcaaagaggggtgtatatccagggggtgtgtgaaaaaacaataaagggggtgaaaatatggtgattgtgaggaggtgagtaaaaaaaaatttgtgggggaaaattagggggggtgagtatatagtaatatgtaaaaagaaacaaatattatattttaccccggggggggggttatgatgtttatgaatataaaaggtga

SEQ ID NO: 433025 - DNA, 2742 bp, Homo sapiens
cgcgccgctgctcacccgccctgtagtccgctccccccagggccgtccccgttttaagaaatggggtgatggggcgtccctacccggcgcctgcaggggctcctggggagcgcgccggtggctcgctgctcccgggtggggcgcggggctggcgctcgagggtgccgtggcccaggcggggctgcagcgagtgtgttccccgttccgcgcgcgtgaagcgtgggagcgaagcctcgggggagggcgggagcgcggctgagctcactgtgaacacccggctgggtagtcccgcgagcaggggaggggccggaaccgatgtgtatgcggagaggtcgcagtcattgctgtgagcaggacacagtggcggctgacctgggagaagttacagagggacggggtgggagagggacgaggagtcgggaatggcccccaggctctcgtcctgagcggtcggctggacgtggggcgccactgaccaccgtggagaagcccgggggaggggaggtgctttctggctgcacactgacctatgttggggtgcccaggggatgtacacgctgctgtcgggcttgtacaagtacatgtttcagaaggacgagtactgcatcctgatcctgggcctggacaatgctgggaagacgaccttcctggagcagtcgaaaacccgatttaacaagaactacaaggggatgagtctatccaaaatcaccaccaccgtgggcctaaacatcggcactgtggatgtgggaaaggctcggctcatgttctgggacttaggagggcaggaagagctgcagtctttgtgggacaagtattatgcggagtgtcacggcgtcatctacgtcattgactccaccgacgaggagaggctggctgagtccaagcaggcgtttgacgtgcctctcaatccctgacatcaagacggccttcagcgactgcaccagcaagatcggcaggcgagattgcctgacccaggcctgctcggccctcacaggcaaaggggtgcgcgagggcatcgagtggatggtgaagtgtgtcgtgcggaatgtgcaccggccgccgcggcagagggacatcacgtaggcgcagccgcgctgccgtcgggacggctggtcccctggtgctggaggagtggcctcctgttggctcccatgctgctgatctggggggtgggtttgctttgctttggggttcttctatttactttgttttctcgaagacaaactttcctctatgtctggaaaagcgtaggcatccggaggctttggaggggagtctggcagcccggctggcccaggccctgcagcggcagcctttccacagggcgcagcggcggcctttcgaggccctttctggggggtctgagggagacctggttgggaattggggctccagtgctcaggctggcttgggctgcatgaggacagccctgtgggaccctcgggagaccccgtggctgtctccgccccatcgaggaggaggcccgtcagccatggctgccatctggcttctgccctgtgaccccgtgaccccgtgaccccggaagtggtctggggctgatcttgccttgaggaagacccaggccatgttcccaaaggccagcgggggccctggattgtgatgcagcctcgggacagggctgaggcctgcgggggaagacctataccccacgcctgggcctggcttcacctcaccctaatcccccgggagggagctgactgatgcaaaaagctgagggggcctgctgggagtggctgtttttatgccccagccccgcaagttggggagtgtttgtgggggtccagagccctcccccagccaggagagaacctcccggaggggttctctgtggggccctgtgtcccctgctcgggagtaaggctggtcctggggtcctccctgcacggaccccactgggcctgccgagtgctgtgttcttcctcagtctggctgtgggcaggagcggcctgcccagtgtcacccagggtgagtgcaaaataaagacggcgagtgtggctctgtccatcccttccctcctggagggtggaggctcctggctgttggacacggaaaaaaaaaaagagaaaaaaaaaacaaagaaaacaaagaaaagaaaaataaaaaaaaaaaaaagaaagaagaggggggcggcgcgcgcgccacaagagaggctatctctcccacgagggggcgcgcgaccatgctgctcgcgcgcgcgcgccccgcgcggttttctgtgggagacaacggggcgcgcccattatagagggggagcgcgcgattatatatataagagcacgagagcgagcggcgggcgcgcggagggtttcaaacacaagcggggagagagcgggggagagaaaacgcggagagcacccgcggagagcgcctcttgaggggaagaggagacccttaactaatgcgggggggggggggagcgaaaaatattgagtgggggggcgaacaaaacatcacctctagcgaggagaagtttaataaaggcgtctctagagggggggacaaatatataataaacaatatatgcaaagaggggtgtatatccagggggtgtgtgaaaaaacaataaagggggtgaaaatatggtgattgtgaggaggtgagtaaaaaaaaatttgtgggggaaaattagggggggtgagtatatagtaatatgtaaaaagaaacaaatattatattttaccccggggggggggttatgatgtttatgaatataaaaggtga

SEQ ID NO: 433026 - DNA, 2883 bp, Homo sapiens
cgcgccgctgctcacccgccctgtagtccgctccccccagggccgtccccgttttaagaaatggggtgatggggcgtccctacccggcgcctgcaggggctcctggggagcgcgccggtggctcgctgctcccgggtggggcgcggggctggcgctcgagggtgccgtggcccaggcggggctgcagcgagtgtgttccccgttccgcgcgcgtgaagcgtgggagcgaagcctcgggggagggcgggagcgcggctgagctcactgtgaacacccggctgggtagtcccgcgagcaggggaggggccggaaccgatgtgtatgcggagaggtcgcagtcattgctgtgagcaggacacagtggcggctgacctgggagaagttacagagggacggggtgggagagggacgaggagtcgggaatggcccccaggctctcgtcctgagcggtcggctggacgtggggcgccactgaccaccgtggagaagcccgggggaggggaggtgctttctggctgcacactgacctatgttggggtgcccaggggatgtacacgctgctgtcgggcttgtacaagtacatgtttcagaaggacgagtactgcatcctgatcctgggcctggacaatgctgggaagacgaccttcctggagcagtcgaaaacccgatttaacaagaactacaaggggatgagtctatccaaaatcaccaccaccgtgggcctaaacatcggcactgtggatgtgggaaaggctcggctcatgttctgggacttaggagggcaggaagagctgcagtctttgtgggacaagtattatgcggagtgtcacggcgtcatctacgtcattgactccaccgacgaggagaggctggctgagtccaagcaggcgtttgagaaggtggtgaccagcgaggcgctgtgcggtgtccccgtcttggtgctggccaacaagcaggatgtggagacgtgcctctcaatccctgacatcaagacggccttcagcgactgcaccagcaagatcggcaggcgagattgcctgacccaggcctgctcggccctcacagggtgagtgggggctgcacctgcgggggctttggggaccgagaccccccgcctcacacccgctgtcttcacacaaaggggtgcgcgagggcatcgagtggatggtgaagtgtgtcgtgcggaatgtgcaccggccgccgcggcagagggacatcacgtaggcgcagccgcgctgccgtcgggacggctggtcccctggtgctggaggagtggcctcctgttggctcccatgctgctgatctggggggtgggtttgctttgctttggggttcttctatttactttgttttctcgaagacaaactttcctctatgtctggaaaagcgtaggcatccggaggctttggaggggagtctggcagcccggctggcccaggccctgcagcggcagcctttccacagggcgcagcggcggcctttcgaggccctttctggggggtctgagggagacctggttgggaattggggctccagtgctcaggctggcttgggctgcatgaggacagccctgtgggaccctcgggagaccccgtggctgtctccgccccatcgaggaggaggcccgtcagccatggctgccatctggcttctgccctgtgaccccgtgaccccgtgaccccggaagtggtctggggctgatcttgccttgaggaagacccaggccatgttcccaaaggccagcgggggccctggattgtgatgcagcctcgggacagggctgaggcctgcgggggaagacctataccccacgcctgggcctggcttcacctcaccctaatcccccgggagggagctgactgatgcaaaaagctgagggggcctgctgggagtggctgtttttatgccccagccccgcaagttggggagtgtttgtgggggtccagagccctcccccagccaggagagaacctcccggaggggttctctgtggggccctgtgtcccctgctcgggagtaaggctggtcctggggtcctccctgcacggaccccactgggcctgccgagtgctgtgttcttcctcagtctggctgtgggcaggagcggcctgcccagtgtcacccagggtgagtgcaaaataaagacggcgagtgtggctctgtccatcccttccctcctggagggtggaggctcctggctgttggacacggaaaaaaaaaaagagaaaaaaaaaacaaagaaaacaaagaaaagaaaaataaaaaaaaaaaaaagaaagaagaggggggcggcgcgcgcgccacaagagaggctatctctcccacgagggggcgcgcgaccatgctgctcgcgcgcgcgcgccccgcgcggttttctgtgggagacaacggggcgcgcccattatagagggggagcgcgcgattatatatataagagcacgagagcgagcggcgggcgcgcggagggtttcaaacacaagcggggagagagcgggggagagaaaacgcggagagcacccgcggagagcgcctcttgaggggaagaggagacccttaactaatgcgggggggggggggagcgaaaaatattgagtgggggggcgaacaaaacatcacctctagcgaggagaagtttaataaaggcgtctctagagggggggacaaatatataataaacaatatatgcaaagaggggtgtatatccagggggtgtgtgaaaaaacaataaagggggtgaaaatatggtgattgtgaggaggtgagtaaaaaaaaatttgtgggggaaaattagggggggtgagtatatagtaatatgtaaaaagaaacaaatattatattttaccccggggggggggttatgatgtttatgaatataaaaggtga

SEQ ID NO: 433027 - DNA, 1181 bp, Homo sapiens
  misc_feature (954)..(956): n is a, c, g, or t
  misc_feature (959)..(959): n is a, c, g, or t
  misc_feature (969)..(970): n is a, c, g, or t
  misc_feature (972)..(972): n is a, c, g, or t
ctgggacgcggttcagctcattccctgaggccggcccgcgtcccgtcaggcgccgcgcggggttagcgcggggtcagcggaggtcagcgggggtcagcagcagcggctccgagggcgcggcggacgcaggatgtacacgctgctgtcgggcttgtacaagtacatgtttcagaaggacgagtactgcatcctgatcctgggcctggacaatgctgggaagacgaccttcctggagcagtcgaaaacccgatttaacaagaactacaaggggatgagtctatccaaaatcaccaccaccgtgggcctaaacatcggcactgtggatgtgggaaaggctcggctcatgttctgggacttaggagggcaggaagagctgcagtctttgtgggacaagtattatgcggagtgtcacggcgtcatctacgtcattgactccaccgacgaggagaggctggctgagtccaagcaggcgtttgagaaggtggtgaccagcgaggcgctgtgcggtgtccccgtcttggtgctggccaacaagcaggatgtggagacgtgcctctcaatccctgacatcaagacggccttcagcgactgcaccagcaagatcggcaggcgagattgcctgacccaggcctgctcggccctcacaggcaaaggggtgcgcgagggcatcgagtggatggtgaagtgtgtcgtgcggaatgtgcaccggccgccgcggcagagggacatcacgtaggcgcagccgcgctgccgtcgggacggctggtcccctggtgctggaggagtggcctcctgttggctcccatgctgctgatctggggggtgggtttgctttgctttggggttcttctatttactttgttttctcgaagacaaactttcctctatgtctggaaaagcgtaggcatccggaggctttggaggggagtctggcagcccggctggcccaggctnnnggncttccacggnnanggggctttaggccttggggttaagagacgtggatgtggcacagcgaggtggggtataaacgtgacgtgatgcggtgtcccaaagacatgtgtgttctgcatcgcaccgatgtgttatacacatcgtaatgcagtgccgtctcgcgggttctctgtccggcgccccaaaaaataagaaaaaagaataaagtaaaatagaaatagaaaaaa

SEQ ID NO: 433028 - DNA, 1661 bp, Homo sapiens
cgcgccgctgctcacccgccctgtagtccgctccccccagggccgtccccgttttaagaaatggggtgatggggcgtccctacccggcgcctgcaggggctcctggggagcgcgccggtggctcgctgctcccgggtggggcgcggggctggcgctcgagggtgccgtggcccaggcggggctgcagcgagtgtgttccccgttccgcgcgcgtgaagcgtgggagcgaagcctcgggggagggcgggagcgcggctgagctcactgtgaacacccggctgggtagtcccgcgagcaggggaggggccggaaccgatgtgtatgcggagaggtcgcagtcattgctgtgagcaggacacagtggcggctgacctgggagaagttacagagggacggggtgggagagggacgaggagtcgggaatggcccccaggctctcgtcctgagcggtcggctggacgtggggcgccactgaccaccgtggagaagcccgggggaggggaggtgctttctggctgcacactgacctatgttggggtgcccaggggatgtacacgctgctgtcgggcttgtacaagtacatgtttcagaaggacgagtactgcatcctgatcctgggcctggacaatgctgggaagacgaccttcctggagcagtcgaaaacccgatttaacaagaactacaaggggatgagtctatccaaaatcaccaccaccgtgggcctaaacatcggcactgtggatgtgggaaaggctcggctcatgttctgggacttaggagggcaggaagagctgcagtctttgtgggacaagtattatgcggagtgtcacggcgtcatctacgtcattgactccaccgacgaggagaggctggctgagtccaagcaggcgtttgagaaggtggtgaccagcgaggcgctgtgcggtgtccccgtcttggtgctggccaacaagcaggatgtggagacgtgcctctcaatccctgacatcaagacggccttcagcgactgcaccagcaagatcggcaggcgagattgcctgacccaggcctgctcggccctcacagggtgagtgggggctgcacctgcgggggctttggggaccgagaccccccgcctcacacccgctgtcttcacacaaaggggtgcgcgagggcatcgagtggatggtgaagtgtgtcgtgcggaatgtgcaccggccgccgcggcagagggacatcacgtaggcgcagccgcgctgccgtcgggacggctggtcccctggtgctggaggagtggcctcctgttggccttccccatgccttgcttgaatccttgcgcggcgcggtcgggggttttggcgttttggcgctctttagggggggggggttttccttttcctttagttttgtaccccttcttgtggggtcttggtctcccttccgcgaccagaaccaaaaaacgcgtttttgttcccccctttcccgcttaaaactttggctttccccttcgcgggcaacaacgacaaacggccccggcttaaacgggtggggcccaaatgttttccccccgggcgggcaacagcggggcccgcttttttcttgggcggcacagcggccggggccgggaaaccgggtttccttttgggggcggccccaaaaggagccccccacccacggggggg

SEQ ID NO: 433029 - DNA, 1923 bp, Homo sapiens
ttctgagagtcccgggcccacaggcaggacagggccagacgtgggggctgctcctcacggccttacctcccccagacgtgcctctcaatccctgacatcaagacggccttcagcgactgcaccagcaagatcggcaggcgagattgcctgacccaggcctgctcggccctcacaggcaaaggggtgcgcgagggcatcgagtggatggtgaagtgtgtcgtgcggaatgtgcaccggccgccgcggcagagggacatcacgtaggcgcagccgcgctgccgtcgggacggctggtcccctggtgctggaggagtggcctcctgttggctcccatgctgctgatctggggggtgggtttgctttgctttggggttcttctatttactttgttttctcgaagacaaactttcctctatgtctggaaaagcgtaggcatccggaggctttggaggggagtctggcagcccggctggcccaggccctgcagcggcagcctttccacagggcgcagcggcggcctttcgaggccctttctggggggtctgagggagacctggttgggaattggggctccagtgctcaggctggcttgggctgcatgaggacagccctgtgggaccctcgggagaccccgtggctgtctccgccccatcgaggaggaggcccgtcagccatggctgccatctggcttctgccctgtgaccccgtgaccccgtgaccccggaagtggtctggggctgatcttgccttgaggaagacccaggccatgttcccaaaggccagcgggggccctggattgtgatgcagcctcgggacagggctgaggcctgcgggggaagacctataccccacgcctgggcctggcttcacctcaccctaatcccccgggagggagctgactgatgcaaaaagctgagggggcctgctgggagtggctgtttttatgccccagccccgcaagttggggagtgtttgtgggggtccagagccctcccccagccaggagagaacctcccggaggggttctctgtggggccctgtgtcccctgctcgggagtaaggctggtcctggggtcctccctgcacggaccccactgggcctgccgagtgctgtgttcttcctcagtctggctgtgggcaggagcggcctgcccagtgtcacccagggtgagtgcaaaataaagacggcgagtgtggctctgtccatcccttccctcctggagggtggaggctcctggctgttggacacggaaaaaaaaaaagagaaaaaaaaaacaaagaaaacaaagaaaagaaaaataaaaaaaaaaaaaagaaagaagaggggggcggcgcgcgcgccacaagagaggctatctctcccacgagggggcgcgcgaccatgctgctcgcgcgcgcgcgccccgcgcggttttctgtgggagacaacggggcgcgcccattatagagggggagcgcgcgattatatatataagagcacgagagcgagcggcgggcgcgcggagggtttcaaacacaagcggggagagagcgggggagagaaaacgcggagagcacccgcggagagcgcctcttgaggggaagaggagacccttaactaatgcgggggggggggggagcgaaaaatattgagtgggggggcgaacaaaacatcacctctagcgaggagaagtttaataaaggcgtctctagagggggggacaaatatataataaacaatatatgcaaagaggggtgtatatccagggggtgtgtgaaaaaacaataaagggggtgaaaatatggtgattgtgaggaggtgagtaaaaaaaaatttgtgggggaaaattagggggggtgagtatatagtaatatgtaaaaagaaacaaatattatattttaccccggggggggggttatgatgtttatgaatataaaaggtga

SEQ ID NO: 433030 - DNA, 2769 bp, Homo sapiens
cgcgccgctgctcacccgccctgtagtccgctccccccagggccgtccccgttttaagaaatggggtgatggggcgtccctacccggcgcctgcaggggctcctggggagcgcgccggtggctcgctgctcccgggtggggcgcggggctggcgctcgagggtgccgtggcccaggcggggctgcagcgagtgtgttccccgttccgcgcgcgtgaagcgtgggagcgaagcctcgggggagggcgggagcgcggctgagctcactgtgaacacccggctgggtagtcccgcgagcaggggaggggccggaaccgatgtgtatgcggagaggtcgcagtcattgctgtgagcaggacacagtggcggctgacctgggagaagttacagagggacggggtgggagagggacgaggagtcgggaatggcccccaggctctcgtcctgagcggtcggctggacgtggggcgccactgaccaccgtggagaagcccgggggaggggaggtgctttctggctgcacactgacctatgttggggtgcccaggggatgtacacgctgctgtcgggcttgtacaagtacatgtttcagaaggacgagtactgcatcctgatcctgggcctggacaatgctgggaagacgaccttcctggagcagtcgaaaacccgatttaacaagaactacaaggggatgagtctatccaaaatcaccaccaccgtgggcctaaacatcggcactgtggatgtgggaaaggctcggctcatgttctgggacttaggagggcaggaagagctgcagtctttgtgggacaagtattatgcggagtgtcacggcgtcatctacgtcattgactccaccgacgaggagaggctggctgagtccaagcaggcgtttgagaaggtggtgaccagcgaggcgctgtgcggtgtccccgtcttggtgctggccaacaagcaggatgtggagacgtgcctctcaatccctgacatcaagacggccttcagcgactgcaccagcaagatccaaaggggtgcgcgagggcatcgagtggatggtgaagtgtgtcgtgcggaatgtgcaccggccgccgcggcagagggacatcacgtaggcgcagccgcgctgccgtcgggacggctggtcccctggtgctggaggagtggcctcctgttggctcccatgctgctgatctggggggtgggtttgctttgctttggggttcttctatttactttgttttctcgaagacaaactttcctctatgtctggaaaagcgtaggcatccggaggctttggaggggagtctggcagcccggctggcccaggccctgcagcggcagcctttccacagggcgcagcggcggcctttcgaggccctttctggggggtctgagggagacctggttgggaattggggctccagtgctcaggctggcttgggctgcatgaggacagccctgtgggaccctcgggagaccccgtggctgtctccgccccatcgaggaggaggcccgtcagccatggctgccatctggcttctgccctgtgaccccgtgaccccgtgaccccggaagtggtctggggctgatcttgccttgaggaagacccaggccatgttcccaaaggccagcgggggccctggattgtgatgcagcctcgggacagggctgaggcctgcgggggaagacctataccccacgcctgggcctggcttcacctcaccctaatcccccgggagggagctgactgatgcaaaaagctgagggggcctgctgggagtggctgtttttatgccccagccccgcaagttggggagtgtttgtgggggtccagagccctcccccagccaggagagaacctcccggaggggttctctgtggggccctgtgtcccctgctcgggagtaaggctggtcctggggtcctccctgcacggaccccactgggcctgccgagtgctgtgttcttcctcagtctggctgtgggcaggagcggcctgcccagtgtcacccagggtgagtgcaaaataaagacggcgagtgtggctctgtccatcccttccctcctggagggtggaggctcctggctgttggacacggaaaaaaaaaaagagaaaaaaaaaacaaagaaaacaaagaaaagaaaaataaaaaaaaaaaaaagaaagaagaggggggcggcgcgcgcgccacaagagaggctatctctcccacgagggggcgcgcgaccatgctgctcgcgcgcgcgcgccccgcgcggttttctgtgggagacaacggggcgcgcccattatagagggggagcgcgcgattatatatataagagcacgagagcgagcggcgggcgcgcggagggtttcaaacacaagcggggagagagcgggggagagaaaacgcggagagcacccgcggagagcgcctcttgaggggaagaggagacccttaactaatgcgggggggggggggagcgaaaaatattgagtgggggggcgaacaaaacatcacctctagcgaggagaagtttaataaaggcgtctctagagggggggacaaatatataataaacaatatatgcaaagaggggtgtatatccagggggtgtgtgaaaaaacaataaagggggtgaaaatatggtgattgtgaggaggtgagtaaaaaaaaatttgtgggggaaaattagggggggtgagtatatagtaatatgtaaaaagaaacaaatattatattttaccccggggggggggttatgatgtttatgaatataaaaggtga

SEQ ID NO: 433031 - DNA, 1025 bp, Homo sapiens
cgcgccgctgctcacccgccctgtagtccgctccccccagggccgtccccgttttaagaaatggggtgatggggcgtccctacccggcgcctgcaggggctcctggggagcgcgccggtggctcgctgctcccgggtggggcgcggggctggcgctcgagggtgccgtggcccaggcggggctgcagcgagtgtgttccccgttccgcgcgcgtgaagcgtgggagcgaagcctcgggggagggcgggagcgcggctgagctcactgtgaacacccggctgggtagtcccgcgagcaggggaggggccggaaccgatgtgtatgcggagaggtcgcagtcattgctgtgagcaggacacagtggcggctgacctgggagaagttacagagggacggggtgggagagggacgaggagtcgggaatggcccccaggctctcgtcctgagcggtcggctggacgtggggcgccactgaccaccgtggagaagcccgggggaggggaggtgctttctggctgcacactgacctatgttggggtgcccaggggatgtacacgctgctgtcgggcttgtacaagtacatgtttcagaaggacgagtactgcatcctgatcctgggcctggacaatgctgggaagacgaccttcctggagcagtcgaaaacccgatttaacaagaactacaaggggatgagtctatccaaaatcaccaccaccgtgggcctaaacatcggcactgtggatgtgggaaaggctcggctcatgttctgggacttaggagggcaggaagagctgcagtctttgtgggacaagtcaggacaagacaaagtgtggggacctggggaccctgcactcctccaaagtgagtgcctcctttcggctcagagaccttgctgctgaccaccacaggacacagaaatggcaaagaccagatgtggggacggcaggatggctgcctctcccctgatgaggttccttcagttctagcttaacatttgttcttccatgatcaccagaagactcctc

SEQ ID NO: 433032 - DNA, 2851 bp, Homo sapiens
gtctcccggaagcggtagcagggccccggcgggtcggggaggaggtttactcagcttgggccccctccgggccagccgccgagggggcgcggcccaggacggcggctaggccgtagtgcagcctctccggagtcctcaggtttgccaataggattatcctgctgccatcatgtcttggtttgttgatcttgctggaaaggcagaagatcttttaaaccgagttgatcaaggggctgcaacagctctcagtaggaaagacaatgccagcaacatatatagcaaaaatactgactatactgaacttcaccagcaaaatacagatttgatatatcagactggacctaaatctacgtatatttcatcagcagctgataacattcgaaatcaaaaagccaccatcttagctggcactgcaaatgtgaaagtaggatctcggacaccagtagaggcctctcatcctgttgaaaatgcatctgttcctaggccttcatcccattttgtgcgaagaaaaaagtcagaacctgatgatgagctgctgtttgattttcttaatagttcacagaaggagcctaccgggagggtggaaatcagaaaggaaaaaggcaagacacctgtctttcagagctctcagacatcaagtgtcagttctgtgaaccccagtgtaaccaccatcaaaaccattgaagaaaattcttttgggagccaaacccacgaagctgccagtaactcagattctagccatgaaggtcaagaggaatcttcaaaggaaaatgtgtcatcaaatgctgcctgccctgaccacaccccaacacctaatgatgatggcaaatcacatgaactgtctaaccttcgactggagaatcagctgctgaggaatgaagttcagtctttaaatcaagaaatggcctcgttactccaaagatccaaagagactcaagaagaattaaacaaagcaagagcaagagttgaaaagtggaatgctgaccattcaaagagtgatcgaatgactcgaggactccgagcccaagtagatgacctgactgaagctgtggctgcaaaggattcccagctggctgtactgaaagtgagactccaggaagctgaccagctactgagtactcgcacagaagcattagaagccttacagagtgaaaaatcacgaataatgcaggatcaaagtgaaggtaacagcctgcagaatcaagctctgcagactcttcaggagagactgcatgaagcggatgccactctgaagagagagcaggagagctataaacagatgcagagcgagtttgctgcacgccttaataaagtggaaatggaacgtcagaatttagcagaagcaattacactggccgaaagaaaatactcagatgagaagaagagggttgatgaactgcagcagcaagtcaagctgtataagttgaacttggagtcctctaagcaggaattaattgactacaagcaaaaagctactagaatactgcaatctaaggaaaaattgattaacagcttgaaagaaggctctggttttgaaggcctagatagcagcactgccagtagcatggagctggaagaacttcggcatgagaaagagatgcagagggaggaaatacagaagctgatgggccagatacatcagctcagatccgaattacaggatatggaggcacagcaagttaatgaagcagaatcagcaagagaacagttacaggatctgcatgaccaaatagctgggcagaaagcatccaaacaagaactagagacagaactggagcgactgaagcaggagttccactatatagaagaagatctttatcgaacaaagaacacattgcaaagcagaattaaagatcgagacgaagaaattcaaaaactcaggaatcagcttaccaataaaactttaagcaatagcagtcagtctgagttagaaaatcgactccatcagctaacagagactctcatccagaaacagaccatgctggagagtctcagcacagaaaagaactccctggtctttcaactggagcgcctcgaacagcagatgaactccgcctctggaagtagtagtaatgggtcttcgattaatatgtctggaattgacaatggtgaaggcactcgtctgcgaaatgttcctgttctttttaatgacacagaaactaatctggcaggaatgtacggaaaagttcgcaaagctgctagttcaattgatcagtttagtattcgcctgggaatttttctccgaagataccccatagcgcgagtttttgtaattatatatatggctttgcttcacctctgggtcatgattgttctgttgacttacacaccagaaatgcaccacgaccaaccatatggcaaatgaaccaagcccagttgttgcagtgattggttgtctttttctagacttgggatctgcaagaaggccaattgcctaaaatttctgagaacagtgcacaagattattttatcactacaagcttttaactttttaagttattgtacaagtattctacctaaatcttccaatttcctttaaatggtaagagtttctaaaacagacaataatttaacaagctcagctctgctttatctgagtttagtggtcctaatatatatgtagagaaagatggtggggttgttcacctctgtacagaccatctgtatgttaggtgacattgattatgggttataatcagggaaactaattgtatttagtgacaaaaataaaaagttttttttttataattcagtctgcttttggattttcatatatttaactttgcaaaaagatttactttgtacatgttacaggcttgattggtgtaaatctttttataaatacataaat

SEQ ID NO: 433033 - DNA, 2882 bp, Homo sapiens
gtctcccggaagcggtagcagggccccggcgggtcggggaggaggtttactcagcttgggccccctccgggccagccgccgagggggcgcggcccaggacggcggctaggccgtagtgcagcctctccggagtcctcaggtttgccaataggattatcctgctgccatcatgtcttggtttgttgatcttgctggaaaggcagaagatcttttaaaccgagttgatcaaggggctgcaacagctctcagtaggaaagacaatgccagcaacatatatagcaaaaatactgactatactgaacttcaccagcaaaatacagatttgatatatcagactggacctaaatctacgtatatttcatcagcagctgataacattcgaaatcaaaaagccaccatcttagctggcactgcaaatgtgaaagtaggatctcggacaccagtagaggcctctcatcctgttgaaaatgcatctgttcctaggccttcatcccattttgtgcgaagaaaaaagtcagaacctgatgatgagctgctgtttgattttcttaatagttcacagaaggagcctaccgggagggtggaaatcagaaaggaaaaaggcaagacacctgtctttcagagctctcagacatcaagtgtcagttctgtgaaccccagtgtaaccaccatcaaaaccattgaagaaaattcttttgggagccaaacccacgaagctgccagtaactcagattctagccatgaaggtcaagaggaatcttcaaaggaaaatgtgtcatcaaatgctgcctgccctgaccacaccccaacacctaatgatgatggcaaatcacatgaactgtctaaccttcgactggagaatcagctgctgaggaatgaagttcagtctttaaatcaagaaatggcctcgttactccaaagatccaaagagactcaagaagaattaaacaaagcaagagcaagagttgaaaagtggaatgctgaccattcaaagagtgatcgaatgactcgaggactccgagcccaagtagatgacctgactgaagctgtggctgcaaaggattcccagctggctgtactgaaagtgagactccaggaagctgaccagctactgagtactcgcacagaagcattagaagccttacagagtgaaaaatcacgaataatgcaggatcaaagtgaaggtaacagcctgcagaatcaagctctgcagactcttcaggagagactgcatgaagcggatgccactctgaagagagagcaggagagctataaacagatgcagagcgagtttgctgcacgccttaataaagtggaaatggaacgtcagaatttagcagaagcaattacactggccgaaagaaaatactcagatgagaagaagagggttgatgaactgcagcagcaagtcaagctgtataagttgaacttggagtcctctaagcaggaattaattgactacaagcaaaaagctactagaatactgcaatctaaggaaaaattgattaacagcttgaaagaaggctctggttttgaaggcctagatagcagcactgccagtagcatggagctggaagaacttcggcatgagaaagagatgcagagggaggaaatacagaagctgatgggccagatacatcagctcagatccgaattacaggatatggaggcacagcaagttaatgaagcagaatcagcaagagaacagttacaggatctgcatgaccaaatagctgggcagaaagcatccaaacaagaactagagacagaactggagcgactgaagcaggagttccactatatagaagaagatctttatcgaacaaagaacacattgcaaagcagaattaaagatcgagacgaagaaattcaaaaactcaggaatcagcttaccaataaaactttaagcaatagcagtcagtctgagttagaaaatcgactccatcagctaacagagactctcatccagaaacagaccatgctggagagtctcagcacagaaaagaactccctggtctttcaactggagcgcctcgaacagcagatgaactccgcctctggaagtagtagtaatgggtcttcgattaatatgtctggaattgacaatggtgaaggcactcgtctgcgaaatgttcctgttctttttaatgacacagaaactaatctggcaggaatgtacggaaaagttcgcaaagctgctagttcaattgatcagtttagtattcgcctgggaatttttctccgaagataccccatagcgcgagtttttgtaattatatatatggctttgcttcacctctgggtcatgattgttctgttgacttacacaccagaaatgcaccacgaccaaccatatggcaaatgaaccaagcccagttgttgcagtgattggttgtctttttctagacttgggatctgcaagaaggccaattgcctaaaatttctgagaacagtgcacaagattattttatcactacaagcttttaactttttaagttattgtacaagtattctacctaaatcttccaatttcctttaaatggtaagagtttctaaaacagacaataatttaacaagctcagctctgctttatctgagtttagtggtcctaatatatatgtagagaaagatggtggggttgttcacctctgtacagaccatctgtatgttaggtgacattgattatgggttataatcagggaaactaattgtatttagtgacaaaaataaaaagttttttttttataattcagtctgcttttggattttcatatatttaactttgcaaaaagatttactttgtacatgttacaggcttgattggtgtaaatctttttataaatacataaataaaagaaaaatatgcatttttcttttctaaa

SEQ ID NO: 433034 - DNA, 2822 bp, Homo sapiens
gtctcccggaagcggtagcagggccccggcgggtcggggaggaggtttactcagcttgggccccctccgggccagccgccgagggggcgcggcccaggacggcggctaggccgtagtgcagcctctccggagtcctcaggtttgccaataggattatcctgctgccatcatgtcttggtttgttgatcttgctggaaaggcagaagatcttttaaaccgagttgatcaaggggctgcaacagctctcagtaggaaagacaatgccagcaacatatatagcaaaaatactgactatactgaacttcaccagcaaaatacagatttgatatatcagactggacctaaatctacgtatatttcatcagcagctgataacattcgaaatcaaaaagccaccatcttagctggcactgcaaatgtgaaagtaggatctcggacaccagtagaggcctctcatcctgttgaaaatgcatctgttcctaggccttcatcccattttgtgcgaagaaaaaagtcagaacctgatgatgagctgctgtttgattttcttaatagttcacagaaggagcctaccgggagggtggaaatcagaaaggaaaaaggcaagacacctgtctttcagagctctcagacatcaagtgtcagttctgtgaaccccagtgtaaccaccatcaaaaccattgaagaaaattcttttgggagccaaacccacgaagctgccagtaactcagattctagccatgaaggtcaagaggaatcttcaaaggaaaatgtgtcatcaaatgctgcctgccctgaccacaccccaacacctaatgatgatggcaaatcacatgaactgtctaaccttcgactggagaatcagctgctgaggaatgaagttcagtctttaaatcaagaaatggcctcgttactccaaagatccaaagagactcaagaagaattaaacaaagcaagagcaagagttgaaaagtggaatgctgaccattcaaagagtgatcgaatgactcgaggactccgagcccaagtagatgacctgactgaagctgtggctgcaaaggattcccagctggctgtactgaaagtgagactccaggaagctgaccagctactgagtactcgcacagaagcattagaagccttacagagtgaaaaatcacgaataatgcaggatcaaagtgaaggtaacagcctgcagaatcaagctctgcagactcttcaggagagactgcatgaagcggatgccactctgaagagagagcaggagagctataaacagatgcagagcgagtttgctgcacgccttaataaagtggaaatggaacgtcagaatttagcagaagcaattacactggccgaaagaaaatactcagatgagaagaagagggttgatgaactgcagcagcaagtcaagctgtataagttgaacttggagtcctctaagcaggaattaattgactacaagcaaaaagctactagaatactgcaatctaaggaaaaattgattaacagcttgaaagaaggctctggttttgaaggcctagatagcagcactgccagtagcatggagctggaagaacttcggcatgagaaagagatgcagagggaggaaatacagaagctgatgggccagatacatcagctcagatccgaattacaggatatggaggcacagcaagttaatgaagcagaatcagcaagagaacagttacaggatctgcatgaccaaatagctgggcagaaagcatccaaacaagaactagagacagaactggagcgactgaagcaggagttccactatatagaagaagatctttatcgaacaaagaacacattgcaaagcagaattaaagatcgagacgaagaaattcaaaaactcaggaatcagcttaccaataaaactttaagcaatagcagtcagtctgagttagaaaatcgactccatcagctaacagagactctcatccagaaacagaccatgctggagagtctcgcctctggaagtagtagtaatgggtcttcgattaatatgtctggaattgacaatggtgaaggcactcgtctgcgaaatgttcctgttctttttaatgacacagaaactaatctggcaggaatgtacggaaaagttcgcaaagctgctagttcaattgatcagtttagtattcgcctgggaatttttctccgaagataccccatagcgcgagtttttgtaattatatatatggctttgcttcacctctgggtcatgattgttctgttgacttacacaccagaaatgcaccacgaccaaccatatggcaaatgaaccaagcccagttgttgcagtgattggttgtctttttctagacttgggatctgcaagaaggccaattgcctaaaatttctgagaacagtgcacaagattattttatcactacaagcttttaactttttaagttattgtacaagtattctacctaaatcttccaatttcctttaaatggtaagagtttctaaaacagacaataatttaacaagctcagctctgctttatctgagtttagtggtcctaatatatatgtagagaaagatggtggggttgttcacctctgtacagaccatctgtatgttaggtgacattgattatgggttataatcagggaaactaattgtatttagtgacaaaaataaaaagttttttttttataattcagtctgcttttggattttcatatatttaactttgcaaaaagatttactttgtacatgttacaggcttgattggtgtaaatctttttataaatacataaataaaagaaaaatatgcatttttcttttctaaa

SEQ ID NO: 433035 - DNA, 2771 bp, Homo sapiens
gtctcccggaagcggtagcagggccccggcgggtcggggaggaggtttactcagcttgggccccctccgggccagccgccgagggggcgcggcccaggacggcggctaggccgtagtgcagcctctccggagtcctcaggtttgccaataggattatcctgctgccatcatgtcttggtttgttgatcttgctggaaaggcagaagatcttttaaaccgagttgatcaaggggctgcaacagctctcagtaggaaagacaatgccagcaacatatatagcaaaaatactgactatactgaacttcaccagcaaaatacagatttgatatatcagactggacctaaatctacgtatatttcatcagcagctgataacattcgaaatcaaaaagccaccatcttagctggcactgcaaatgtgaaagtaggatctcggacaccagtagaggcctctcatcctgttgaaaatgcatctgttcctaggccttcatcccattttgtgcgaagaaaaaagtcagaacctgatgatgagctgctgtttgattttcttaatagttcacagaaggagcctaccgggagggtggaaatcagaaaggaaaaagaagctgccagtaactcagattctagccatgaaggtcaagaggaatcttcaaaggaaaatgtgtcatcaaatgctgcctgccctgaccacaccccaacacctaatgatgatggcaaatcacatgaactgtctaaccttcgactggagaatcagctgctgaggaatgaagttcagtctttaaatcaagaaatggcctcgttactccaaagatccaaagagactcaagaagaattaaacaaagcaagagcaagagttgaaaagtggaatgctgaccattcaaagagtgatcgaatgactcgaggactccgagcccaagtagatgacctgactgaagctgtggctgcaaaggattcccagctggctgtactgaaagtgagactccaggaagctgaccagctactgagtactcgcacagaagcattagaagccttacagagtgaaaaatcacgaataatgcaggatcaaagtgaaggtaacagcctgcagaatcaagctctgcagactcttcaggagagactgcatgaagcggatgccactctgaagagagagcaggagagctataaacagatgcagagcgagtttgctgcacgccttaataaagtggaaatggaacgtcagaatttagcagaagcaattacactggccgaaagaaaatactcagatgagaagaagagggttgatgaactgcagcagcaagtcaagctgtataagttgaacttggagtcctctaagcaggaattaattgactacaagcaaaaagctactagaatactgcaatctaaggaaaaattgattaacagcttgaaagaaggctctggttttgaaggcctagatagcagcactgccagtagcatggagctggaagaacttcggcatgagaaagagatgcagagggaggaaatacagaagctgatgggccagatacatcagctcagatccgaattacaggatatggaggcacagcaagttaatgaagcagaatcagcaagagaacagttacaggatctgcatgaccaaatagctgggcagaaagcatccaaacaagaactagagacagaactggagcgactgaagcaggagttccactatatagaagaagatctttatcgaacaaagaacacattgcaaagcagaattaaagatcgagacgaagaaattcaaaaactcaggaatcagcttaccaataaaactttaagcaatagcagtcagtctgagttagaaaatcgactccatcagctaacagagactctcatccagaaacagaccatgctggagagtctcagcacagaaaagaactccctggtctttcaactggagcgcctcgaacagcagatgaactccgcctctggaagtagtagtaatgggtcttcgattaatatgtctggaattgacaatggtgaaggcactcgtctgcgaaatgttcctgttctttttaatgacacagaaactaatctggcaggaatgtacggaaaagttcgcaaagctgctagttcaattgatcagtttagtattcgcctgggaatttttctccgaagataccccatagcgcgagtttttgtaattatatatatggctttgcttcacctctgggtcatgattgttctgttgacttacacaccagaaatgcaccacgaccaaccatatggcaaatgaaccaagcccagttgttgcagtgattggttgtctttttctagacttgggatctgcaagaaggccaattgcctaaaatttctgagaacagtgcacaagattattttatcactacaagcttttaactttttaagttattgtacaagtattctacctaaatcttccaatttcctttaaatggtaagagtttctaaaacagacaataatttaacaagctcagctctgctttatctgagtttagtggtcctaatatatatgtagagaaagatggtggggttgttcacctctgtacagaccatctgtatgttaggtgacattgattatgggttataatcagggaaactaattgtatttagtgacaaaaataaaaagttttttttttataattcagtctgcttttggattttcatatatttaactttgcaaaaagatttactttgtacatgttacaggcttgattggtgtaaatctttttataaatacataaataaaagaaaaatatgcatttttcttttctaaa

SEQ ID NO: 433036 - DNA, 2270 bp, Homo sapiens
gtctcccggaagcggtagcagggccccggcgggtcggggaggaggtttactcagcttgggccccctccgggccagccgccgagggggcgcggcccaggacggcggctaggccgtagtgcagcctctccggagtcctcaggtttgccaataggattatcctgctgccatcatgtcttggtttgttgatcttgctggaaaggcagaagatcttttaaaccgagttgatcaaggggctgcaacagctctcagtaggaaagacaatgccagcaacatatatagcaaaaatactgactatactgaacttcaccagcaaaatacagatttgatatatcagactggacctaaatctacgtatatttcatcagcagctgataacattcgaaatcaaaaagccaccatcttagctggcactgcaaatgtgaaagtaggatctcggacaccagtagaggcctctcatcctgttgaaaatgcatctgttcctaggccttcatcccattttgtgcgaagaaaaaagtcagaacctgatgatgagctgctgtttgattttcttaatagttcacagaaggagcctaccgggagggtggaaatcagaaaggaaaaaggcaagacacctgtctttcagagctctcagacatcaagtgtcagttctgtgaaccccagtgtaaccaccatcaaaaccattgaagaaaattcttttgggagccaaacccacgaagctgccagtaactcagattctagccatgaaggtcaagaggaatcttcaaaggaaaatgtgtcatcaaatgctgcctgccctgaccacaccccaacacctaatgatgatggcaaatcacatgaactgtctaaccttcgactggagaatcagctgctgaggaatgaagttcagtctttaaatcaagaaatggcctcgttactccaaagatccaaagagactcaagaagaattaaacaaagcaagagcaagagttgaaaagtggaatgctgaccattcaaagagtgatcgaatgactcgaggactccgagcccaagtagatgacctgactgaagctgtggctgcaaaggattcccagctggctgtactgaaagtgagactccaggaagctgaccagctactgagtactcgcacagaagcattagaagccttacagagtgaaaaatcacgaataatgcaggatcaaagtgaaggtaacagcctgcagaatcaagctctgcagactcttcaggagagactgcatgaagcggatgccactctgaagagagagcaggagagctataaacagatgcagagcgagtttgctgcacgccttaataaagtggaaatggaacgtcagaatttagcagaagcaattacactggccgaaagaaaatactcagatgagaagaagagggttgatgaactgcagcagcaagtcaagctgtataagttgaacttggagtcctctaagcaggaattaattgactacaagcaaaaagctactagaatactgcaatctaaggaaaaattgattaacagcttgaaagaaggctctggttttgaaggcctagatagcagcactgccagtagcatggagctggaagaacttcggcatgagaaagagatgcagagggaggaaatacagaagctgatgggccagatacatcagctcagatccgaattacaggatatggaggcacagcaagttaatgaagcagaatcagcaagagaacagttacaggatctgcatgaccaaatagctgggcagaaagcatccaaacaagaactagagacagaactggagcgactgaagcaggagttccactatatagaagaagatctttatcgaacaaagaacacattgcaaagcagaattaaagatcgagacgaagaaattcaaaaactcaggaatcagcttaccaataaaactttaagcaatagcagtcagtctgagttagaaaatcgactccatcagctaacagagactctcatccagaaacagaccatgctggagagtctcagcacagaaaagaactccctggtctttcaactggagcgcctcgaacagcagatgaactccgcctctggaagtagtagtaatgggtcttcgattaatatgtctggaattgacaatggtgaaggcactcgtctgcgaaatgttcctgttctttttaatgacacagaaactaatctggcaggaatgtacggaaaagttcgcaaagctgctagttcaattgatcagtttaggtaagcaatgccagtagggatgagtgatggaccatcagctgtttttacgt

SEQ ID NO: 433037 - DNA, 1323 bp, Homo sapiens
gtctcccggaagcggtagcagggccccggcgggtcggggaggaggtttactcagcttgggccccctccgggccagccgccgagggggcgcggcccaggacggcggctaggccgtagtgcagcctctccggagtcctcaggtttgccaataggattatcctgctgccatcatgtcttggtttgttgatcttgctggaaaggcagaagatcttttaaaccgagttgatcaaggggctgcaacagctctcagtaggaaagacaatgccagcaacatatatagcaaaaatactgactatactgaacttcaccagcaaaatacagatttgatatatcagactggacctaaatctacgtatatttcatcagcagctgataacattcgaaatcaaaaagccaccatcttagctggcactgcaaatgtgaaagtaggatctcggacaccagtagaggcctctcatcctgttgaaaatgcatctgttcctaggccttcatcccattttgtgcgaagaaaaaagtcagaacctgatgatgagctgctgtttgattttcttaatagttcacagaaggagcctaccgggagggtggaaatcagaaaggaaaaaggcaagacacctgtctttcagagctctcagacatcaagtgtcagttctgtgaaccccagtgtaaccaccatcaaaaccattgaagaaaattcttttgggagccaaacccacgaagctgccagtaactcagattctagccatgaaggtcaagaggaatcttcaaaggaaaatgtgtcatcaaatgctgcctgccctgaccacaccccaacacctaatgatgatggcaaatcacatgaactgtctaaccttcgactggagaatcagctgctgaggaatgaagttcagtctttaaatcaagaaatggcctcgttactccaaagatccaaagagactcaagaaggtagaggcttaaattgttcaggattaggaatttaacttttaaaaataaacttaaggctggacgcagtggctcgtgcctgtaatcccagcactttgggaggccgaggcgggcggattgcctgaggtcaggagttcaagaccagtctggccaacatggtgaaaccctgtgtctactaaaaatacaaaaaaattagtcaggtgtggttgcaggcacctgtaatcccagccactcaggaggctgaggcaggggagttgcttgaaccagggaggtggaggttgcagtgaaccgagattgcactactgcactctagtctgggcagcagagcaagactctatctcaaaaataaataaataaaaataaaataaaataataaacttaaaaa

SEQ ID NO: 433038 - DNA, 887 bp, Homo sapiens
gatttctggcacacgacaaagtggtgaggcacttagtgatggaatctcgtatcatttcggtactaccatgagggaattaaatttgtcactatgaatcgtgttctgggccctacatcagcctctgaaacgacacattatttctgtctagaatattttcccatctcttcttcaccgaacattggttaaactctctttcagaataccaactataactgttctaaaagtgttttctaaccaacttcatgtgtatctagcagttttaatcactctgcattataatcaactgattattttgcatacacgtgcatattgtgaatgtgttgaagttcagagctgactcctctcaactgaattctgtaggagtagcaagtctttattaccttccattgcactgagctcatttagttgtttcattcattccttcatgtgtcccataggggatacagaggcaggtaagacacagtgcctgccctcagtgtacagtgggcctttggtaaaaattggtttattggctaatccacaaattgctttttctttctctaggctttgcttcacctctgggtcatgattgttctgttgacttacacaccagaaatgcaccacgaccaaccatatggcaaatgaaccaagcccagttgttgcagtgattggttgtctttttctagacttgggatctgcaagaaggccaattgcctaaaatttctgagaacagtgcacaagattattttatcactacaagcttttaactttttaagttattgtacaagtattctacctaaatcttccaatttcctttaaatggtaagagtttctaaaacagacaataatttaacaagctcagctctgctttatctgagtttagtggtcctaatatatatgtagagaaa

SEQ ID NO: 433039 - DNA, 2747 bp, Homo sapiens
gtctcccggaagcggtagcagggccccggcgggtcggggaggaggtttactcagcttgggccccctccgggccagccgccgagggggcgcggcccaggacggcggctaggccgtagtgcagcctctccggagtcctcaggtttgccaataggattatcctgctgccatcatgtcttggtttgttgatcttgctggaaaggcagaagatcttttaaaccgagttgatcaaggggctgcaacagctctcagtaggaaagacaatgccagcaacatatatagcaaaaatactgactatactgaacttcaccagcaaaatacagatttgatatatcagactggacctaaatctacgtatatttcatcagcagctgataacattcgaaatcaaaaagccaccatcttagctggcactgcaaatgtgaaagtaggatctcggacaccagtagaggcctctcatcctgttgaaaatgcatctgttcctaggccttcatcccattttgtgcgaagaaaaaagtcagaacctgatgatgagctgctgtttgattttcttaatagttcacagaaggagcctaccgggagggtggaaatcagaaaggaaaaaggcaagacacctgtctttcagagctctcagacatcaagtgtcagttctgtgaaccccagtgtaaccaccatcaaaaccattgaagaaaattcttttgggagccaaacccacgaagctgccagtaactcagattctagccatgaaggtcaagaggaatcttcaaaggaaaatgtgtcatcaaatgctgcctgccctgaccacaccccaacacctaatgatgatggcaaatcacatgaactgtctaaccttcgactggagaatcagctgctgaggaatgaagttcagtctttaaatcaagaaatggcctcgttactccaaagatccaaagagactcaagaagaattaaacaaagcaagagcaagagttgaaaagtggaatgctgaccattcaaagagtgatcgaatgactcgaggactccgagcccaagtagatgacctgactgaagctgtggctgcaaaggattcccagctggctgtactgaaagtgagactccaggaagctgaccagctactgagtactcgcacagaagcattagaagccttacagagtgaaaaatcacgaataatgcaggatcaaagtgaaggtaacagcctgcagaatcaagctctgcagactcttcaggagagactgcatgaagcggatgccactctgaagagagagcaggagagctataaacagatgcagagcgagtttgctgcacgccttaataaagtggaaatggaacgtcagaatttagcagaagcaattacactggccgaaagaaaatactcagatgagaagaagagggttgatgaactgcagcagcaagtcaagctgtataagttgaacttggagtcctctaagcaggaattaattgactacaagcaaaaagctactagaatactgcaatctaaggaaaaattgattaacagcttgaaagaaggctctggttttgaaggcctagatagcagcactgccagtagcatggagctggaagaacttcggcatgagaaagagatgcagagggaggaaatacagaagctgatgggccagatacatcagctcagatccgaattacaggatatggaggcacagcaagttaatgaagcagaatcagcaagagaacagttacaggatctgcatgaccaaatagctgggcagaaagcatccaaacaagaactagagacagaactggagcgactgaagcaggagttccactatatagaagaagatctttatcgaacaaagaacacattgcaaagcagaattaaagatcgagacgaagaaattcaaaaactcaggaatcagcttaccaataaaactttaagcaatagcagtcagtctgagttagaaaatcgactccatcagctaacagagactctcatccagaaacagaccatgctggagagtctcagcacagaaaagaactccctggtctttcaactggagcgcctcgaacagcagatgaactccgcctctggaagtagtagtaatgggtcttcgattaatatgtctggaattgacaatggtgaaggcactcgtctgcgaaatgttcctgttctttttaatgacacagaaactaatctggcaggaatgtacggaaaagttcgcaaagctgctagttcaattgatcagtttagtattcgcctgggaatttttctccgaagataccccatagcgcgagtttttgtaattatatatatggctttgcttcacctctgggtcatgattgttctgttgacttacacaccagaaatgcaccacgaccaaccatatggcaaatgaaccaagcccagttgttgcagtgattggttgtctttttctagacttgggatctgcaagaaggccaattgcctaaaatttctgagaacagtgcacaagattattttatcactacaagcttttaactttttaagttattgtacaagtattctacctaaatcttccaatttcctttaaatggtaagagtttctaaaacagacaataatttaacaagctcagctctgctttatctgagtttagtggtcctaatatatatgtagagaaagatggtggggttgttcacctctgtacagaccatctgtatgttaggtgacattgattatgggttataatcagggaaactaattgtatttagtgacaaaaataaaaagttttttttttata

SEQ ID NO: 433040 - DNA, 2822 bp, Homo sapiens
gtctcccggaagcggtagcagggccccggcgggtcggggaggaggtttactcagcttgggccccctccgggccagccgccgagggggcgcggcccaggacggcggctaggccgtagtgcagcctctccggagtcctcaggtttgccaataggattatcctgctgccatcatgtcttggtttgttgatcttgctggaaaggcagaagatcttttaaaccgagttgatcaaggggctgcaacagctctcagtaggaaagacaatgccagcaacatatatagcaaaaatactgactatactgaacttcaccagcaaaatacagatttgatatatcagactggacctaaatctacgtatatttcatcagcagctgataacattcgaaatcaaaaagccaccatcttagctggcactgcaaatgtgaaagtaggatctcggacaccagtagaggcctctcatcctgttgaaaatgcatctgttcctaggccttcatcccattttgtgcgaagaaaaaagtcagaacctgatgatgagctgctgtttgattttcttaatagttcacagaaggagcctaccgggagggtggaaatcagaaaggaaaaaggcaagacacctgtctttcagagctctcagacatcaagtgtcagttctgtgaaccccagtgtaaccaccatcaaaaccattgaagaaaattcttttgggagccaaacccacgaagctgccagtaactcagattctagccatgaaggtcaagaggaatcttcaaaggaaaatgtgtcatcaaatgctgcctgccctgaccacaccccaacacctaatgatgatggcaaatcacatgaactgtctaaccttcgactggagaatcagctgctgaggaatgaagttcagtctttaaatcaagaaatggcctcgttactccaaagatccaaagagactcaagaagaattaaacaaagcaagagcaagagttgaaaagtggaatgctgaccattcaaagagtgatcgaatgactcgaggactccgagcccaagtagatgacctgactgaagctgtggctgcaaaggattcccagctggctgtactgaaagtgagactccaggaagctgaccagctactgagtactcgcacagaagcattagaagccttacagagtgaaaaatcacgaataatgcaggatcaaagtgaaggtaacagcctgcagaatcaagctctgcagactcttcaggagagactgcatgaagcggatgccactctgaagagagagcaggagagctataaacagatgcagagcgagtttgctgcacgccttaataaagtggaaatggaacgtcagaatttagcagaagcaattacactggccgaaagaaaatactcagatgagaagaagagggttgatgaactgcagcagcaagtcaagctgtataagttgaacttggagtcctctaagcaggaattaattgactacaagcaaaaagctactagaatactgcaatctaaggaaaaattgattaacagcttgaaagaaggctctggttttgaaggcctagatagcagcactgccagtagcatggagctggaagaacttcggcatgagaaagagatgcagagggaggaaatacagaagctgatgggccagatacatcagctcagatccgaattacaggatatggaggcacagcaagttaatgaagcagaatcagcaagagaacagttacaggatctgcatgaccaaatagctgggcagaaagcatccaaacaagaactagagacagaactggagcgactgaagcaggagttccactatatagaagaagatctttatcgaacaaagaacacattgcaaagcagaattaaagatcgagacgaagaaattcaaaaactcaggaatcagcttaccaataaaactttaagcaatagcagtcagtctgagttagaaagcacagaaaagaactccctggtctttcaactggagcgcctcgaacagcagatgaactccgcctctggaagtagtagtaatgggtcttcgattaatatgtctggaattgacaatggtgaaggcactcgtctgcgaaatgttcctgttctttttaatgacacagaaactaatctggcaggaatgtacggaaaagttcgcaaagctgctagttcaattgatcagtttagtattcgcctgggaatttttctccgaagataccccatagcgcgagtttttgtaattatatatatggctttgcttcacctctgggtcatgattgttctgttgacttacacaccagaaatgcaccacgaccaaccatatggcaaatgaaccaagcccagttgttgcagtgattggttgtctttttctagacttgggatctgcaagaaggccaattgcctaaaatttctgagaacagtgcacaagattattttatcactacaagcttttaactttttaagttattgtacaagtattctacctaaatcttccaatttcctttaaatggtaagagtttctaaaacagacaataatttaacaagctcagctctgctttatctgagtttagtggtcctaatatatatgtagagaaagatggtggggttgttcacctctgtacagaccatctgtatgttaggtgacattgattatgggttataatcagggaaactaattgtatttagtgacaaaaataaaaagttttttttttataattcagtctgcttttggattttcatatatttaactttgcaaaaagatttactttgtacatgttacaggcttgattggtgtaaatctttttataaatacataaataaaagaaaaatatgcatttttcttttctaaa

SEQ ID NO: 433041 - DNA, 2843 bp, Homo sapiens
gtctcccggaagcggtagcagggccccggcgggtcggggaggaggtttactcagcttgggccccctccgggccagccgccgagggggcgcggcccaggacggcggctaggccgtagtgcagcctctccggagtcctcaggtttgccaataggattatcctgctgccatcatgtcttggtttgttgatcttgctggaaaggcagaagatcttttaaaccgagttgatcaaggggctgcaacagctctcagtaggaaagacaatgccagcaacatatatagcaaaaatactgactatactgaacttcaccagcaaaatacagatttgatatatcagactggacctaaatctacgtatatttcatcagcagctgataacattcgaaatcaaaaagccaccatcttagctggcactgcaaatgtgaaagtaggatctcggacaccagtagaggcctctcatcctgttgaaaatgcatctgttcctaggccttcatcccattttgtgcgaagaaaaaagtcagaacctgatgatgagctgctgtttgattttcttaatagttcacagaaggagcctaccgggagggtggaaatcagaaaggaaaaaggcaagacacctgtctttcagagctctcagacatcaagtgtcagttctgtgaaccccagtgtaaccaccatcaaaaccattgaagaaaattcttttgggagccaaacccacgaagctgccagtaactcagattctagccatgaaggtcaagaggaatcttcaaaggaaaatgtgtcatcaaatgctgcctgccctgaccacaccccaacacctaatgatgatggcaaatcacatgaactgtctaaccttcgactggagaatcagctgctgaggaatgaagttcagtctttaaatcaagaaatggcctcgttactccaaagatccaaagagactcaagaagaattaaacaaagcaagagcaagagttgaaaagtggaatgctgaccattcaaagagtgatcgaatgactcgaggactccgagcccaagtagatgacctgactgaagctgtggctgcaaaggattcccagctggctgtactgaaagtgagactccaggaagctgaccagctactgagtactcgcacagaagcattagaagccttacagagtgaaaaatcacgaataatgcaggatcaaagtgaaggtaacagcctgcagaatcaagctctgcagactcttcaggagagactgcatgaagcggatgccactctgaagagagagcaggagagctataaacagatgcagagcgagtttgctgcacgccttaataaagtggaaatggaacgtcagaatttagcagaagcaattacactggccgaaagaaaatactcagatgagaagaagagggttgatgaactgcagcagcaagtcaagctgtataagttgaacttggagtcctctaagcaggaattaattgactacaagcaaaaagctactagaatactgcaatctaaggaaaaattgattaacagcttgaaagaaggctctggttttgaaggcctagatagcagcactgccagtagcatggagctggaagaacttcggcatgagaaagagatgcagagggaggaaatacagaagctgatgggccagatacatcagctcagatccgaattacaggatatggaggcacagcaagttaatgaagcagaatcagcaagagaacagttacaggatctgcatgaccaaatagctgggcagaaagcatccaaacaagaactagagacagaactggagcgactgaagcaggagttccactatatagaagaagatctttatcgaacaaagaacacattgcaaagcagaattaaagatcgagacgaagaaattcaaaaactcaggaatcagcttaccaataaaactttaagcaatagcagtcagtctgagttagaaaatcgactccatcagctaacagagactctcatccagaaacagaccatgctggagagtctcagcacagaaaagaactccctggtctttcaactggagcgcctcgaacagcagatgaactccgcctctggaagtagtagtaatgggtcttcgattaatatgtctggaattgacaatggtgaaggcactcgtctgcgaaatgttcctgttctttttaatgacacagaaactaatctggcaggaatgtacggtattcgcctgggaatttttctccgaagataccccatagcgcgagtttttgtaattatatatatggctttgcttcacctctgggtcatgattgttctgttgacttacacaccagaaatgcaccacgaccaaccatatggcaaatgaaccaagcccagttgttgcagtgattggttgtctttttctagacttgggatctgcaagaaggccaattgcctaaaatttctgagaacagtgcacaagattattttatcactacaagcttttaactttttaagttattgtacaagtattctacctaaatcttccaatttcctttaaatggtaagagtttctaaaacagacaataatttaacaagctcagctctgctttatctgagtttagtggtcctaatatatatgtagagaaagatggtggggttgttcacctctgtacagaccatctgtatgttaggtgacattgattatgggttataatcagggaaactaattgtatttagtgacaaaaataaaaagttttttttttataattcagtctgcttttggattttcatatatttaactttgcaaaaagatttactttgtacatgttacaggcttgattggtgtaaatctttttataaatacataaataaaagaaaaatatgcatttttcttttctaaa

SEQ ID NO: 433042 - DNA, 1002 bp, Homo sapiens
atgactttcattttatgtaagaattttgtgaacactttctctttcagcttaccaataaaactttaagcaatagcagtcagtctgagttagaaaatcgactccatcagctaacagagactctcatccagaaacagaccatgctggagagtctcagcacagaaaagaactccctggtctttcaactggagcgcctcgaacagcagatgaactccgcctctggaagtagtagtaatgggtcttcgattaatatgtctggaattgacaatggtgaaggcactcgtctgcgaaatgttcctgttctttttaatgacacagaaactaatctggcaggaatgtacggtattcgcctgggaatttttctccgaagataccccatagcgcgagtttttgtaattatatatatggctttgcttcacctctgggtcatgattgttctgttgacttacacaccagaaatgcaccacgaccaaccatatggcaaatgaaccaagcccagttgttgcagtgattggttgtctttttctagacttgggatctgcaagaaggccaattgcctaaaatttctgagaacagtgcacaagattattttatcactacaagcttttaactttttaagttattgtacaagtattctacctaaatcttccaatttcctttaaatggtaagagtttctaaaacagacaataatttaacaagctcagctctgctttatctgagtttagtggtcctaatatatatgtagagaaagatggtggggttgttcacctctgtacagaccatctgtatgttaggtgacattgattatgggttataatcagggaaactaattgtatttagtgacaaaaataaaaagttttttttttataattcagtctgcttttggattttcatatatttaactttgcaaaaagatttactttgtacatgttacaggcttgattggtgtaaatctttttataaatacataaataaaagaaaaatatgcatttttcttttctaaa

SEQ ID NO: 433043 - DNA, 1406 bp, Homo sapiens
ttctacgtcgctgactcgtgacctgaccggtatcctaaactgggatcttgggtaggaggaagaaaagataaggagttcctctatctgaaattagtcgggctgttttgaggagtactggttagataccttccgatactcctccaaagaactctcggattcaagtaaacaaacatccattaatacaagttaagtatgttccaggcgctgtgtgttccaggtactgttaacaaaagcgggttactagttaagacttccttcatgccctggcgcctctgctcagccagttcccttcgcctaggaggacctctctacaccaccccgctatattccctccccggaattccttcccaaccttcaaggaccatctgccccaactagtggcgaacatcgaggctgtcgtgactgtgtagatacttatttgacctgctcccttggcaaacacttgaaacgcaatacatgtttgtggaactgaacatagcctgtgcatgcagcaaggcttctttccctggaatcgcctgcccttcctccaacacagcgaccagccggtcagaatcccaacccctcgactccggaaatgatctgagagacggaacttccgaacgtcgcaatcagatttgggcgggctaggagggtttgggtcttcaggtcacatctggacggagagacctccggggcctccgttggtcggtccttccgctccggataccgttccggatgtcaggttttacacatccataagtagacctttttggagcctcaccagccaattcaatggcgtcctcttctactgtgcctctgggatttcactatgaaacaaagtatgttgttctcagctacttgggactcctctctcaagagaagctgcaagagcaacatctttcctcaccccaaggggttcaactagatatagcttcacaatctctggatcaagaaattttattaaaagttaaaactgaaattgaagaagagctaaaatctctggacaaagaaatttctgaagccttcaccagcacaggctttgaccgtcacacttctccagtgttcagccctgccaatccagaaagctcaatggaagactgcttggcccatcttggagaaaaagtgtcccaggaactgaaagagcctctccataaagcattgcaaatgctcctgagccagccagtgacatatcaggcatttcgggaatgtacactggagaccacagttcatgccagcggctggaataagattttggtgcctctggttttgctacgacaaatgcttttggaattgacaagacgtggtcaagaacctttgagcgcactgctgcagtttggcgtgacatacctggaggactattcggcagagtacatcattcagcaaggtggctgggtatgagctgttatatattaaaaatattttcttga

SEQ ID NO: 433044 - DNA, 542 bp, Homo sapiens
ggctgcaggaattcggcacgaggaattttaggacactctctatttcaagcttctttttcctactttttatttcagtgatatttaggacactctctatttcactgaaataaaaagtaggaaaaagaagcttgaattttaagactgaggctgctctgcagattctagtttggctttcagagttcaagagtggtggcatcttcacctgaattcttcaatgccagggtaataaaccaaaatagtcctaatcagtatatgctagttgagcatcggcataattttctttcctctggctgatcccagccctaaaggaagggtagacccgtgtctttccagccctaaaggaagggtagacccgtgtctttccagccctaaaggaagggcagacccgtgtctttccatgcccgagggccacgacgtcactatgcagggcacacgtggcttggtttaaaaaggtcatcttagatttatcttagtaaatgtaataaattattttttagatcttgaaatttataataaaaatactttacctaccctgatcacca

SEQ ID NO: 433045 - DNA, 1330 bp, Homo sapiens
acgaaggcacgccggggtgacctcaccctccaacatggcggcggcggtagattagggccgcgggtcggagcactcaccgccgctgggggaccctgtcggaagcaactgccgccgccgcctctttcatctcttctggggcaggggccagggccaggttttacacatccataagtagacctttttggagcctcaccagccaattcaatggcgtcctcttctactgtgcctctgggatttcactatgaaacaaagtatgttgttctcagctacttgggactcctctctcaagagaagctgcaagagcaacatctttcctcaccccaaggggttcaactagatatagcttcacaatctctggatcaagaaattttattaaaagttaaaactgaaattgaagaagagctaaaatctctggacaaagaaatttctgaagccttcaccagcacaggctttgaccgtcacacttctccagtgttcagccctgccaatccagaaagctcaatggaagactgcttggcccatcttggagaaaaagtgtcccaggaactgaaagagcctctccataaagcattgcaaatgctcctgagccaattttggtgcctctggttttgctacgacaaatgcttttggaattgacaagacgtggtcaagaacctttgagcgcactgctgcagtttggcgtgacatacctggaggactattcggcagagtacatcattcagcaaggtggctgggtatgagctgttatatattaaaaatattttcttgaaaaaaaattaggtttgttgtttttcttaagagatgggttcttgctgtgttacccgggctggagtgcagtgtctaattgctggcactatcatggcaggcttcggtctcaaactcctgggctcaagtgatcctgcctcaggtcctgaatagccaagagcacaggctgggactataggtgcccaccactgtgccgtgctctatcccgtactttttgatatgtaattattattattattcagttggttcagttgtttataaattttccttatatgttctttgacccttgaattacttagaaatgtattttttaatttctaaatacttacaggtttaaaaattttgttttcaattactaatttaattctgtttcatcagaaagcacgaccatcgtggcattgaaacttgagttatagcctactatcatgatcaatttaaaaaatatatatatagggctgggtgcagtggtgcacatctgtaatcccagtgctttgggaggctgaggtggggtgaatcacctggaggtccggaggttcaagaccagcctggtcaatgtgaaaaaccc

SEQ ID NO: 433046 - DNA, 547 bp, Homo sapiens
  misc_feature (545)..(547): n is a, c, g, or t
ggaaggattcatttaacttctctgaacctcagtttcaactacaaaaagggaagaatagcttctctgtctcacaaaaataatgatgtgaaagtgttttgtgaaaatgtcacacttttacaaatgccaggttttcacatgcgtctctgaagagtgtggtttttttccctctccttaagtctgatcaccatttcctcttagtttcagttttgacttttatttgccctgcagcccggtgagggcacagactggttcatgtgctgtgattctccctgagtcatccttgctccctccctcctcattctcttttcatttcctgggcttgtgttgctacgttagaagtctgtctgtctcctggaaagggcagagcaagtccactgtggtaaggcttgtattttactttctccgtcgtcacatgataaatacttcttgtgaaagatttacttttagattccataaaagattactggagggaatgtcatctgtctattgtaatatttaagtattttgaataaaattaatctttgtcattttctcttgaaaaaaannn

SEQ ID NO: 433047 - DNA, 688 bp, Homo sapiens
ttctacgtcgctgactcgtgacctgaccggtatcctaaactgggatcttgggtaggaggaagaaaagataaggagttcctctatctgaaattagtcgggctgttttgaggagtactggttaggtatattggagaatgtgcctttattggaatttttcgcataattacacagggttatgggcttaggggtacatgattgttggccgggcgtggtggctcacgcctgcaatccggagactttgggagaccaaggcgggtgtatcgcttgacctcaagttcgagaccaggctggacaacatagaggaaccccgtctctaccaaaagaaaaaaaaaagggggatacatgatttctgactattcatgtcaaccttgattacctgaataaagtgtagggtttgtaggtttctccactctgaagttaccttttttaaccccctttccatactgtagtcttaggaaggaagccactatacaaagcccacacctagggagtgggaagctatgctcaacttccttattagggtggagcagctacataatttatttggaacttttctgagatagcctatatatttttcaaaagccttcccaggtcccatttagaggaatattaggacagaaatccccccaggctcatttgtttttatttggatttacctcaagcccgtttttttccccaaaatcccaaa

SEQ ID NO: 433048 - DNA, 463 bp, Homo sapiens
acgaaggcacgccggggtgacctcaccctccaacatggcggcggcggtagattagggccgcgggtcggagcactcaccgccgctgggggaccctgtcggaagcaactgccgccgccgcctctttcatctcttctggggcaggggccagggccaggttttacacatccataagtagacctttttggagcctcaccagccaattcaatggcgtcctcttctactgtgcctctgggatttcactatgaaacaaagtatgttgttctcagctacttgggactcctctctcaagagaagctgcaagagcaacatctttcctcaccccaagagtctctctcttgcccaggctggtgtgcagtgttgagaacacagctccctacagcctctacctgttgggctcaagcaattctcccatctcagcttcctgagtagctggaccacaggtgcgcaccaccatgcccagcta

SEQ ID NO: 433049 - DNA, 3347 bp, Homo sapiens
acgaaggcacgccggggtgacctcaccctccaacatggcggcggcggtagattagggccgcgggtcggagcactcaccgccgctgggggaccctgtcggaagcaactgccgccgccgcctctttcatctcttctggggcaggggccagggccaggttttacacatccataagtagacctttttggagcctcaccagccaattcaatggcgtcctcttctactgtgcctctgggatttcactatgaaacaaagtatgttgttctcagctacttgggactcctctctcaagagaagctgcaagagcaacatctttcctcaccccaaggggttcaactagatatagcttcacaatctctggatcaagaaattttattaaaagttaaaactgaaattgaagaagagctaaaatctctggacaaagaaatttctgaagccttcaccagcacaggctttgaccgtcacacttctccagtgttcagccctgccaatccagaaagctcaatggaagactgcttggcccatcttggagaaaaagtgtcccaggaactgaaagagcctctccataaagcattgcaaatgctcctgagccagccagtgacatatcaggcatttcgggaatgtacactggagaccacagttcatgccagcggctggaataagattttggtgcctctggttttgctacgacaaatgcttttggaattgacaagacgtggtcaagaacctttgagcgcactgctgcagtttggcgtgacatacctggaggactattcggcagagtacatcattcagcaaggtggctggggcactgtgtttagtcttgagtcagaggaggaggaataccctggaatcactgcagaagatagcaatgacatttacatcctgcccagcgacaactctggacaagtcagtcccccagagtctccaactgtgaccacttcctggcagtctgagagcttacctgtgtcactgtcagctagccagagttggcacacagaaagcctgccagtgtcactaggccctgagtcctggcagcagattgcaatggatcctgaagaagtgaaaagcttagacagcaacggagctggagagaagagtgagaacaactcctctaattctgacattgtgcacgtggagaaagaagaggtgcccgagggcatggaagaggctgctgtggcttctgtggtcttgccagcgcgggagctgcaagaggcacttcctgaagccccagctcccttgcttccacatatcactgccacctccctgctggggacaagggaacctgacacagaagtgatcacagttgagaaatccagccctgctacatctctgtttgtagaacttgatgaagaagaggtgaaagcagcaacaactgaacctactgaagtggaggaggtggtccccgcactggaacccacagaaacgctgctgagtgagaaggagataaacgcaagggaagagagccttgtggaagagctgtcccctgccagcgagaagaagcccgtgccgccgtctgagggcaagtctagactgtcccccgccggtgagatgaagcccatgccgctgtctgagggcaagtctatactgctgtttggaggggctgctgctgttgccatcctggcagtggccatcggggtagccctggctctgagaaagaaataggaggcttttcagaagagaaagacagaaggatgtaaggttggagttgtattggctggaatttgaacctccagcagctgtctggacatttgtggaacactctgggataattggggacttctgctcaacatggcagtggcatgttaggcatgttagggcttgaggtggggcattcacattcatctgactgtaaatcccaagggcctccgctcatgctaaattgagaatcttaggggtaaagcaccccctccaggaccgggtttctcagccttggcactagtgctgttctgaccattctctgtgttggggctgtcctgtgtgtggtgggctccacccactagatgccagtggcaccccctcccagagatgacaaacgaaaatgtctctagacattgccaaatgtcccgtgtgaacatcccctattgagacccactgctttagcgagagagggtttacttaggaagaattgggatagaaattcccagctgagagaacttagctgtgggctcctcagctactgacttcttagctcttaatccccttagaatttcatctttctcgatgagcaggctctgcacccactctttttttgccccccgccctcatcctggagtgtgagggtgctcgcccgtactctcagctgcctctcagggactgcactgttcctcttcacccccaggttcctgctaagatcccacgggcgagggcttgctctggactcagtctgtcaagtccccgaagcttcctgcagctccaccttgtaaaaatgctgcctttgggaatcttcgaaatatgtacacagagaaaatcacatgaaggagacctggggtccccacttgtgagtgcaactgcaagtaactctggctagagagacacatgtgtcttgtgtcaaggcaggaggataacctggatgaccttctgaggtctcttcagcccttttcgctagtggtcacccaccaccatggttacttgccagcaacatctctattgctggatggtccctgtctataaccttgggctagtatattttttccaatatgggaccttagtcttactactgatgagttctatgggtctcttgctagggggtaaggatttttattcttgggcttatagagccagttagatcataattcttatgaaatagagagtgtcctaaatatcactgaaataaaaagtaggaaaaagaagcttgaattttaagactgaggctgctctgcagattctagtttggctttcagagttcaagagtggtggcatcttcacctgaattcttcaatgccagggtaataaaccaaaatagtcctaatcagtatatgctagttgagcatcggcataattttctttcctctggctgatcccagccctaaaggaagggtagacccgtgtctttccagccctaaaggaagggtagacccgtgtctttccagccctaaaggaagggcagacccgtgtctttccatgcccgagggccacgacgtcactatgcagggcacacgtggcttggtttaaaaaggtcatcttagatttatcttagtaaatgtaataaattattttttagatcttgaaatttataataaaaatactttacctaccctgatcaccaaaacctgatgttttaaatgtgctttctttttgaaatttatgttttcaaataaaatctccctaaagcaatatttaaaaattgg

SEQ ID NO: 433050 - DNA, 3311 bp, Homo sapiens
acgaaggcacgccggggtgacctcaccctccaacatggcggcggcggtagattagggccgcgggtcggagcactcaccgccgctctttcatctcttctggggcaggggccagggccaggttttacacatccataagtagacctttttggagcctcaccagccaattcaatggcgtcctcttctactgtgcctctgggatttcactatgaaacaaagtatgttgttctcagctacttgggactcctctctcaagagaagctgcaagagcaacatctttcctcaccccaaggggttcaactagatatagcttcacaatctctggatcaagaaattttattaaaagttaaaactgaaattgaagaagagctaaaatctctggacaaagaaatttctgaagccttcaccagcacaggctttgaccgtcacacttctccagtgttcagccctgccaatccagaaagctcaatggaagactgcttggcccatcttggagaaaaagtgtcccaggaactgaaagagcctctccataaagcattgcaaatgctcctgagccagccagtgacatatcaggcatttcgggaatgtacactggagaccacagttcatgccagcggctggaataagattttggtgcctctggttttgctacgacaaatgcttttggaattgacaagacgtggtcaagaacctttgagcgcactgctgcagtttggcgtgacatacctggaggactattcggcagagtacatcattcagcaaggtggctggggcactgtgtttagtcttgagtcagaggaggaggaataccctggaatcactgcagaagatagcaatgacatttacatcctgcccagcgacaactctggacaagtcagtcccccagagtctccaactgtgaccacttcctggcagtctgagagcttacctgtgtcactgtcagctagccagagttggcacacagaaagcctgccagtgtcactaggccctgagtcctggcagcagattgcaatggatcctgaagaagtgaaaagcttagacagcaacggagctggagagaagagtgagaacaactcctctaattctgacattgtgcacgtggagaaagaagaggtgcccgagggcatggaagaggctgctgtggcttctgtggtcttgccagcgcgggagctgcaagaggcacttcctgaagccccagctcccttgcttccacatatcactgccacctccctgctggggacaagggaacctgacacagaagtgatcacagttgagaaatccagccctgctacatctctgtttgtagaacttgatgaagaagaggtgaaagcagcaacaactgaacctactgaagtggaggaggtggtccccgcactggaacccacagaaacgctgctgagtgagaaggagataaacgcaagggaagagagccttgtggaagagctgtcccctgccagcgagaagaagcccgtgccgccgtctgagggcaagtctagactgtcccccgccggtgagatgaagcccatgccgctgtctgagggcaagtctatactgctgtttggaggggctgctgctgttgccatcctggcagtggccatcggggtagccctggctctgagaaagaaataggaggcttttcagaagagaaagacagaaggatgtaaggttggagttgtattggctggaatttgaacctccagcagctgtctggacatttgtggaacactctgggataattggggacttctgctcaacatggcagtggcatgttaggcatgttagggcttgaggtggggcattcacattcatctgactgtaaatcccaagggcctccgctcatgctaaattgagaatcttaggggtaaagcaccccctccaggaccgggtttctcagccttggcactagtgctgttctgaccattctctgtgttggggctgtcctgtgtgtggtgggctccacccactagatgccagtggcaccccctcccagagatgacaaacgaaaatgtctctagacattgccaaatgtcccgtgtgaacatcccctattgagacccactgctttagcgagagagggtttacttaggaagaattgggatagaaattcccagctgagagaacttagctgtgggctcctcagctactgacttcttagctcttaatccccttagaatttcatctttctcgatgagcaggctctgcacccactctttttttgccccccgccctcatcctggagtgtgagggtgctcgcccgtactctcagctgcctctcagggactgcactgttcctcttcacccccaggttcctgctaagatcccacgggcgagggcttgctctggactcagtctgtcaagtccccgaagcttcctgcagctccaccttgtaaaaatgctgcctttgggaatcttcgaaatatgtacacagagaaaatcacatgaaggagacctggggtccccacttgtgagtgcaactgcaagtaactctggctagagagacacatgtgtcttgtgtcaaggcaggaggataacctggatgaccttctgaggtctcttcagcccttttcgctagtggtcacccaccaccatggttacttgccagcaacatctctattgctggatggtccctgtctataaccttgggctagtatattttttccaatatgggaccttagtcttactactgatgagttctatgggtctcttgctagggggtaaggatttttattcttgggcttatagagccagttagatcataattcttatgaaatagagagtgtcctaaatatcactgaaataaaaagtaggaaaaagaagcttgaattttaagactgaggctgctctgcagattctagtttggctttcagagttcaagagtggtggcatcttcacctgaattcttcaatgccagggtaataaaccaaaatagtcctaatcagtatatgctagttgagcatcggcataattttctttcctctggctgatcccagccctaaaggaagggtagacccgtgtctttccagccctaaaggaagggtagacccgtgtctttccagccctaaaggaagggcagacccgtgtctttccatgcccgagggccacgacgtcactatgcagggcacacgtggcttggtttaaaaaggtcatcttagatttatcttagtaaatgtaataaattattttttagatcttgaaatttataataaaaatactttacctaccctgatcaccaaaacctgatgttttaaatgtgctttctttttgaaatttatgttttcaaataaaatctccctaaagcaatatttaaaaattgg

SEQ ID NO: 433051 - DNA, 3914 bp, Homo sapiens
ttctacgtcgctgactcgtgacctgaccggtatcctaaactgggatcttgggtaggaggaagaaaagataaggagttcctctatctgaaattagtcgggctgttttgaggagtactggttagataccttccgatactcctccaaagaactctcggattcaagtaaacaaacatccattaatacaagttaagtatgttccaggcgctgtgtgttccaggtactgttaacaaaagcgggttactagttaagacttccttcatgccctggcgcctctgctcagccagttcccttcgcctaggaggacctctctacaccaccccgctatattccctccccggaattccttcccaaccttcaaggaccatctgccccaactagtggcgaacatcgaggctgtcgtgactgtgtagatacttatttgacctgctcccttggcaaacacttgaaacgcaatacatgtttgtggaactgaacatagcctgtgcatgcagcaaggcttctttccctggaatcgcctgcccttcctccaacacagcgaccagccggtcagaatcccaacccctcgactccggaaatgatctgagagacggaacttccgaacgtcgcaatcagatttgggcgggctaggagggtttgggtcttcaggtcacatctggacggagagacctccggggcctccgttggtcggtccttccgctccggataccgttccggatgtcaggttttacacatccataagtagacctttttggagcctcaccagccaattcaatggcgtcctcttctactgtgcctctgggatttcactatgaaacaaagtatgttgttctcagctacttgggactcctctctcaagagaagctgcaagagcaacatctttcctcaccccaaggggttcaactagatatagcttcacaatctctggatcaagaaattttattaaaagttaaaactgaaattgaagaagagctaaaatctctggacaaagaaatttctgaagccttcaccagcacaggctttgaccgtcacacttctccagtgttcagccctgccaatccagaaagctcaatggaagactgcttggcccatcttggagaaaaagtgtcccaggaactgaaagagcctctccataaagcattgcaaatgctcctgagccagccagtgacatatcaggcatttcgggaatgtacactggagaccacagttcatgccagcggctggaataagattttggtgcctctggttttgctacgacaaatgcttttggaattgacaagacgtggtcaagaacctttgagcgcactgctgcagtttggcgtgacatacctggaggactattcggcagagtacatcattcagcaaggtggctggggcactgtgtttagtcttgagtcagaggaggaggaataccctggaatcactgcagaagatagcaatgacatttacatcctgcccagcgacaactctggacaagtcagtcccccagagtctccaactgtgaccacttcctggcagtctgagagcttacctgtgtcactgtcagctagccagagttggcacacagaaagcctgccagtgtcactaggccctgagtcctggcagcagattgcaatggatcctgaagaagtgaaaagcttagacagcaacggagctggagagaagagtgagaacaactcctctaattctgacattgtgcacgtggagaaagaagaggtgcccgagggcatggaagaggctgctgtggcttctgtggtcttgccagcgcgggagctgcaagaggcacttcctgaagccccagctcccttgcttccacatatcactgccacctccctgctggggacaagggaacctgacacagaagtgatcacagttgagaaatccagccctgctacatctctgtttgtagaacttgatgaagaagaggtgaaagcagcaacaactgaacctactgaagtggaggaggtggtccccgcactggaacccacagaaacgctgctgagtgagaaggagataaacgcaagggaagagagccttgtggaagagctgtcccctgccagcgagaagaagcccgtgccgccgtctgagggcaagtctagactgtcccccgccggtgagatgaagcccatgccgctgtctgagggcaagtctatactgctgtttggaggggctgctgctgttgccatcctggcagtggccatcggggtagccctggctctgagaaagaaataggaggcttttcagaagagaaagacagaaggatgtaaggttggagttgtattggctggaatttgaacctccagcagctgtctggacatttgtggaacactctgggataattggggacttctgctcaacatggcagtggcatgttaggcatgttagggcttgaggtggggcattcacattcatctgactgtaaatcccaagggcctccgctcatgctaaattgagaatcttaggggtaaagcaccccctccaggaccgggtttctcagccttggcactagtgctgttctgaccattctctgtgttggggctgtcctgtgtgtggtgggctccacccactagatgccagtggcaccccctcccagagatgacaaacgaaaatgtctctagacattgccaaatgtcccgtgtgaacatcccctattgagacccactgctttagcgagagagggtttacttaggaagaattgggatagaaattcccagctgagagaacttagctgtgggctcctcagctactgacttcttagctcttaatccccttagaatttcatctttctcgatgagcaggctctgcacccactctttttttgccccccgccctcatcctggagtgtgagggtgctcgcccgtactctcagctgcctctcagggactgcactgttcctcttcacccccaggttcctgctaagatcccacgggcgagggcttgctctggactcagtctgtcaagtccccgaagcttcctgcagctccaccttgtaaaaatgctgcctttgggaatcttcgaaatatgtacacagagaaaatcacatgaaggagacctggggtccccacttgtgagtgcaactgcaagtaactctggctagagagacacatgtgtcttgtgtcaaggcaggaggataacctggatgaccttctgaggtctcttcagcccttttcgctagtggtcacccaccaccatggttacttgccagcaacatctctattgctggatggtccctgtctataaccttgggctagtatattttttccaatatgggaccttagtcttactactgatgagttctatgggtctcttgctagggggtaaggatttttattcttgggcttatagagccagttagatcataattcttatgaaatagagagtgtcctaaatatcactgaaataaaaagtaggaaaaagaagcttgaattttaagactgaggctgctctgcagattctagtttggctttcagagttcaagagtggtggcatcttcacctgaattcttcaatgccagggtaataaaccaaaatagtcctaatcagtatatgctagttgagcatcggcataattttctttcctctggctgatcccagccctaaaggaagggtagacccgtgtctttccagccctaaaggaagggtagacccgtgtctttccagccctaaaggaagggcagacccgtgtctttccatgcccgagggccacgacgtcactatgcagggcacacgtggcttggtttaaaaaggtcatcttagatttatcttagtaaatgtaataaattattttttagatcttgaaatttataataaaaatactttacctaccctgatcaccaaaacctgatgttttaaatgtgctttctttttgaaatttatgttttcaaataaaatctccctaaagcaatatttaaaaattgg

SEQ ID NO: 433052 - DNA, 5040 bp, Homo sapiens
acgaaggcacgccggggtgacctcaccctccaacatggcggcggcggtagattagggccgcgggtcggagcactcaccgccgctgggggaccctgtcggaagcaactgccgccgccgcctctttcatctcttctggggcaggggccagggccaggttttacacatccataagtagacctttttggagcctcaccagccaattcaatggcgtcctcttctactgtgcctctgggatttcactatgaaacaaagtatgttgttctcagctacttgggactcctctctcaagagaagctgcaagagcaacatctttcctcaccccaaggggttcaactagatatagcttcacaatctctggatcaagaaattttattaaaagttaaaactgaaattgaagaagagctaaaatctctggacaaagaaatttctgaagccttcaccagcacaggctttgaccgtcacacttctccagtgttcagccctgccaatccagaaagctcaatggaagactgcttggcccatcttggagaaaaagtgtcccaggaactgaaagagcctctccataaagcattgcaaatgctcctgagccagccagtgacatatcaggcatttcgggaatgtacactggagaccacagttcatgccagcggctggaataagattttggtgcctctggttttgctacgacaaatgcttttggaattgacaagacgtggtcaagaacctttgagcgcactgctgcagtttggcgtgacatacctggaggactattcggcagagtacatcattcagcaaggtggctggggcactgtgtttagtcttgagtcagaggaggaggaataccctggaatcactgcagaagatagcaatgacatttacatcctgcccagcgacaactctggacaagtcagtcccccagagtctccaactgtgaccacttcctggcagtctgagagcttacctgtgtcactgtcagctagccagagttggcacacagaaagcctgccagtgtcactaggccctgagtcctggcagcagattgcaatggatcctgaagaagtgaaaagcttagacagcaacggagctggagagaagagtgagaacaactcctctaattctgacattgtgcacgtggagaaagaagaggtgcccgagggcatggaagaggctgctgtggcttctgtggtcttgccagcgcgggagctgcaagaggcacttcctgaagccccagctcccttgcttccacatatcactgccacctccctgctggggacaagggaacctgacacagaagtgatcacagttgagaaatccagccctgctacatctctgtttgtagaacttgatgaagaagaggtgaaagcagcaacaactgaacctactgaagtggaggaggtggtccccgcactggaacccacagaaacgctgctgagtgagaaggagataaacgcaagggaagagagccttgtggaagagctgtcccctgccagcgagaagaagcccgtgccgccgtctgagggcaagtctagactgtcccccgccggtgagatgaagcccatgccgctgtctgagggcaagtctatactgctgtttggaggggctgctgctgttgccatcctggcagtggccatcggggtagccctggctctgagaaagaaataggaggcttttcagaagagaaagacagaaggatgtaaggttggagttgtattggctggaatttgaacctccagcagctgtctggacatttgtggaacactctgggataattggggacttctgctcaacatggcagtggcatgttaggcatgttagggcttgaggtggggcattcacattcatctgactgtaaatcccaagggcctccgctcatgctaaattgagaatcttaggggtaaagcaccccctccaggaccgggtttctcagccttggcactagtgctgttctgaccattctctgtgttggggctgtcctgtgtgtggtgggctccacccactagatgccagtggcaccccctcccagagatgacaaacgaaaatgtctctagacattgccaaatgtcccgtgtgaacatcccctattgagacccactgctttagcgagagagggtttacttaggaagaattgggatagaaattcccagctgagagaacttagctgtgggctcctcagctactgacttcttagctcttaatccccttagaatttcatctttctcgatgagcaggctctgcacccactctttttttgccccccgccctcatcctggagtgtgagggtgctcgcccgtactctcagctgcctctcagggactgcactgttcctcttcacccccaggttcctgctaagatcccacgggcgagggcttgctctggactcagtctgtcaagtccccgaagcttcctgcagctccaccttgtaaaaatgctgcctttgggaatcttcgaaatatgtacacagagaaaatcacatgaaggagacctggggtccccacttgtgagtgcaactgcaagtaactctggctagagagacacatgtgtcttgtgtcaaggcaggaggataacctggatgaccttctgaggtctcttcagcccttttcgctagtggtcacccaccaccatggttacttgccagcaacatctctattgctggatggtccctgtctataaccttgggctagtatattttttccaatatgggaccttagtcttactactgatgagttctatgggtctcttgctagggggtaaggatttttattcttgggcttatagagccagttagatcataattcttatgaaatagagagtgtcctaaatatcactgaaataaaaagtaggaaaaagaagcttgaattttaagactgaggctgctctgcagattctagtttggctttcagagttcaagagtggtggcatcttcacctgaattcttcaatgccagggtaataaaccaaaatagtcctaatcagtatatgctagttgagcatcggcataattttctttcctctggctgatcccagccctaaaggaagggtagacccgtgtctttccagccctaaaggaagggtagacccgtgtctttccagccctaaaggaagggcagacccgtgtctttccatgcccgagggccacgacgtcactatgcagggcacacgtggcttggtttaaaaaggtcatcttagatttatcttagtaaatgtaataaattattttttagatcttgaaatttataataaaaatactttacctaccctgatcaccaaaacctgatgttttaaatgtgctttctttttgaaatttatgttttcaaataaaatctccctaaagcaatatttaaaaattggtcaaaacaaggtctgggagtatgtttgtgtgtctttccagctttatcctgtagcgtgtctttgttctgtgttttagtgtcccatttagggagtgatgttttaagggtttttgtgtacttggattaagtaattagaggtgagtggggggaatgggattattgaggcaatgatttttttcttcatgggctctgatagttgcattgattgttctgtattctaattgctatatttgtgtttgcataggtgaagagcaaactggtgcgttatcttgatttttaaaaagtaataaatcctatgagttccagtattaacacttgccagttctggatcctcacacccattggctgagcgcattcaagcaccaatcgaagccaggttcatctctgagctgctgaaaggaggtgtgaggcttaggaaattggagcctgtgttgcccacgaaaggaaagaataaggaagaaatgtggtatggaagcggctacttgctgctttattttcccacctgttagacattcctccacagtgatttggccagttgtatttcacggtaatggaactagatagtgttttccattggctttctctggtagctcttggtcagctcctgagttaacaggatgtggcagcatccctgttcttccttcacgtcctcaccctctgcctccagcagtggaagggaacagccctcatgaggactgcttcctactgcagctcctgctttttgctcatacatttaaaaaactatttctcaagcttcccctccttttggggggaggagctgatagtaggaggccattccttccacctccaacttataccctctaagtctaaggtgaaggaaagattcagaataaatccaacttgtttatagaaaagttcttgttagtccttagacctcatctcaactgctctgttgaaggtaatgatttattgggggggaaaaaacaacgccaatttatcctctctgtattaaagtgataattctgggcccacagaaatcagtcagtacctgcggtgtgccttaaggggactctcatgatcatcattcccttctagagaacattctagatgaagaaatgcaactgttgaccttctggttcacccatctccccctcgaggcattcttgataccccttctcacctgcatttctgtcccagggataccagatgcagccactacctaactaggcttgtcctgggggagtgagccgtgaacctggagacatggctttgacccacagctactgttcatttcctcaggctttgcgctgattccctcaataatatgacagtaaggcaagtagtctccttgcctttctcctgaaaggtatgagatgtggacatttcagtgtttgaattattttaagagatgttttatagaaataaaacgttttgtagctaagaattttccctttctcttaatttcttacatctttccacacaaacttatctttccaagaatttgaggtggtgatcatacccatcaagacggccttgtaggctatctgattgctaacagacacgacctagagcttctgcccaaattcccacacaagcattatctcgtttaacatctcagcgacatactggataccagaataatgtttcctcttctctggtgcaccaaaacctgcccttagtgataatctctcaattatgacattcatttgagtttagggtgtataatttttcct

SEQ ID NO: 433053 - DNA, 3265 bp, Homo sapiens
acgaaggcacgccggggtgacctcaccctccaacatggcggcggcggtagattagggccgcgggtcggagcactcaccgccgctgggggaccctgtcggaagcaactgccgccgccgcctctttcatctcttctggggcaggggccagggccaggttttacacatccataagtagacctttttggagcctcaccagccaattcaatggcgtcctcttctactgtgcctctgggatttcactatgaaacaaagtatgttgttctcagctacttgggactcctctctcaagagaagctgcaagagcaacatctttcctcaccccaaggggttcaactagatatagcttcacaatctctggatcaagaaattttattaaaagttaaaactgaaattgaagaagagctaaaatctctggacaaagaaatttctgaagccttcaccagcacaggctttgaccgtcacacttctccagtgttcagccctgccaatccagaaagctcaatggaagactgcttggcccatcttggagaaaaagtgtcccaggaactgaaagagcctctccataaagcattgcaaatgctcctgagccagccagtgacatatcaggcatttcgggaatgtacactggagaccacagttcatgccagcggctggaataagattttggtgcctctggttttgctacgacaaatgcttttggaattgacaagacgtggtcaagaacctttgagcgcactgctgcagtttggcgtgacatacctggaggactattcggcagagtacatcattcagcaaggtggctggggcactgtgtttagtcttgagtcagaggaggaggaataccctggaatcactgcagaagatagcaatgacatttacatcctgcccagcgacaactctggacaagtcagtcccccagagtctccaactgtgaccacttcctggcagtctgagagcttacctgtgtcactgtcagctagccagagttggcacacagaaagcctgccagtgtcactaggccctgagtcctggcagcagattgcaatggatcctgaagaagtgaaaagcttagacagcaacggagctggagagaagagtgagaacaactcctctaattctgacattgtgcacgtggagaaagaagaggtgcccgagggcatggaagaggctgctgtggcttctgtggtcttgccagcgcgggagctgcaagaggcacttcctgaagccccagctcccttgcttccacatatcactgccacctccctgctggggacaagggaacctgacacagaagtgatcacagttgagaaatccagccctgctacatctctgtttgtagaacttgatgaagaagaggtgaaagcagcaacaactgaacctactgaagtggaggaggtggtccccgcactggaacccacagaaacgctgctgagtgagaaggagataaacgcaagggaagagagccttgtggaagagctgtcccctgccagcgagaagaagcccgtgccgccgtctgagggcaagtctagactgtcccccgccggtgagatgaagcccatgccgctgtctgagggcaagtctatactgctgtttggaggggctgctgctgttgccatcctggcagtggccatcggggtagccctggctctgagaaagaaataggaggcttttcagaagagaaagacagaaggatgtaaggttggagttgtattggctggaatttgaacctccagcagctgtctggacatttgtggaacactctgggataattggggacttctgctcaacatggcagtggcatgttaggcatgttagggcttgaggtggggcattcacattcatctgactgtaaatcccaagggcctccgctcatgctaaattgagaatcttaggggtaaagcaccccctccaggaccgggtttctcagccttggcactagtgctgttctgaccattctctgtgttggggctgtcctgtgtgtggtgggctccacccactagatgccagtggcaccccctcccagagatgacaaacgaaaatgtctctagacattgccaaatgtcccgtgtgaacatcccctattgagacccactgctttagcgagagagggtttacttaggaagaattgggatagaaattcccagctgagagaacttagctgtgggctcctcagctactgacttcttagctcttaatccccttagaatttcatctttctcgatgagcaggctctgcacccactctttttttgccccccgccctcatcctggagtgtgagggtgctcgcccgtactctcagctgcctctcagggactgcactgttcctcttcacccccaggttcctgctaagatcccacgggcgagggcttgctctggactcagtctgtcaagtccccgaagcttcctgcagctccaccttgtaaaaatgctgcctttgggaatcttcgaaatatgtacacagagaaaatcacatgaaggagacctggggtccccacttgtgagtgcaactgcaagtaactctggctagagagacacatgtgtcttgtgtcaaggcaggaggataacctggatgaccttctgaggtctcttcagcccttttcgctagtggtcacccaccaccatggttacttgccagcaacatctctattgctggatggtccctgtctataaccttgggctagtatattttttccaatatgggaccttagtcttactactgatgagttctatgggtctcttgctagggggtaaggatttttattcttgggcttatagagccagttagatcataattcttatgaaatagagagtgtcctaaatatcactgaaataaaaagtaggaaaaagaagcttgaattttaagactgaggctgctctgcagattctagtttggctttcagagttcaagagtggtggcatcttcacctgaattcttcaatgccagggtaataaaccaaaatagtcctaatcagtatatgctagttgagcatcggcataattttctttcctctggctgatcccagccctaaaggaagggtagacccgtgtctttccagccctaaaggaagggtagacccgtgtctttccagccctaaaggaagggcagacccgtgtctttccatgcccgagggccacgacgtcactatgcagggcacacgtggcttggtttaaaaaggtcatcttagatttatcttagtaaatgtaataaattattttttagatcttgaaatttataataaaaatactttacctaccctgatcacca

SEQ ID NO: 433054 - DNA, 3190 bp, Homo sapiens
acgaaggcacgccggggtgacctcaccctccaacatggcggcggcggtagattagggccgcgggtcggagcactcaccgccgctgggggaccctgtcggaagcaactgccgccgccgcctctttcatctcttctggggcaggggccagggccaggttttacacatccataagtagacctttttggagcctcaccagccaattcaatggcgtcctcttctactgtgcctctgggatttcactatgaaacaaagtatgttgttctcagctacttgggactcctctctcaagagaagctgcaagagcaacatctttcctcaccccaaggggttcaactagatatagcttcacaatctctggatcaagaaattttattaaaagttaaaactgaaattgaagaagagctaaaatctctggacaaagaaatttctgaaggccagtgacatatcaggcatttcgggaatgtacactggagaccacagttcatgccagcggctggaataagattttggtgcctctggttttgctacgacaaatgcttttggaattgacaagacgtggtcaagaacctttgagcgcactgctgcagtttggcgtgacatacctggaggactattcggcagagtacatcattcagcaaggtggctggggcactgtgtttagtcttgagtcagaggaggaggaataccctggaatcactgcagaagatagcaatgacatttacatcctgcccagcgacaactctggacaagtcagtcccccagagtctccaactgtgaccacttcctggcagtctgagagcttacctgtgtcactgtcagctagccagagttggcacacagaaagcctgccagtgtcactaggccctgagtcctggcagcagattgcaatggatcctgaagaagtgaaaagcttagacagcaacggagctggagagaagagtgagaacaactcctctaattctgacattgtgcacgtggagaaagaagaggtgcccgagggcatggaagaggctgctgtggcttctgtggtcttgccagcgcgggagctgcaagaggcacttcctgaagccccagctcccttgcttccacatatcactgccacctccctgctggggacaagggaacctgacacagaagtgatcacagttgagaaatccagccctgctacatctctgtttgtagaacttgatgaagaagaggtgaaagcagcaacaactgaacctactgaagtggaggaggtggtccccgcactggaacccacagaaacgctgctgagtgagaaggagataaacgcaagggaagagagccttgtggaagagctgtcccctgccagcgagaagaagcccgtgccgccgtctgagggcaagtctagactgtcccccgccggtgagatgaagcccatgccgctgtctgagggcaagtctatactgctgtttggaggggctgctgctgttgccatcctggcagtggccatcggggtagccctggctctgagaaagaaataggaggcttttcagaagagaaagacagaaggatgtaaggttggagttgtattggctggaatttgaacctccagcagctgtctggacatttgtggaacactctgggataattggggacttctgctcaacatggcagtggcatgttaggcatgttagggcttgaggtggggcattcacattcatctgactgtaaatcccaagggcctccgctcatgctaaattgagaatcttaggggtaaagcaccccctccaggaccgggtttctcagccttggcactagtgctgttctgaccattctctgtgttggggctgtcctgtgtgtggtgggctccacccactagatgccagtggcaccccctcccagagatgacaaacgaaaatgtctctagacattgccaaatgtcccgtgtgaacatcccctattgagacccactgctttagcgagagagggtttacttaggaagaattgggatagaaattcccagctgagagaacttagctgtgggctcctcagctactgacttcttagctcttaatccccttagaatttcatctttctcgatgagcaggctctgcacccactctttttttgccccccgccctcatcctggagtgtgagggtgctcgcccgtactctcagctgcctctcagggactgcactgttcctcttcacccccaggttcctgctaagatcccacgggcgagggcttgctctggactcagtctgtcaagtccccgaagcttcctgcagctccaccttgtaaaaatgctgcctttgggaatcttcgaaatatgtacacagagaaaatcacatgaaggagacctggggtccccacttgtgagtgcaactgcaagtaactctggctagagagacacatgtgtcttgtgtcaaggcaggaggataacctggatgaccttctgaggtctcttcagcccttttcgctagtggtcacccaccaccatggttacttgccagcaacatctctattgctggatggtccctgtctataaccttgggctagtatattttttccaatatgggaccttagtcttactactgatgagttctatgggtctcttgctagggggtaaggatttttattcttgggcttatagagccagttagatcataattcttatgaaatagagagtgtcctaaatatcactgaaataaaaagtaggaaaaagaagcttgaattttaagactgaggctgctctgcagattctagtttggctttcagagttcaagagtggtggcatcttcacctgaattcttcaatgccagggtaataaaccaaaatagtcctaatcagtatatgctagttgagcatcggcataattttctttcctctggctgatcccagccctaaaggaagggtagacccgtgtctttccagccctaaaggaagggtagacccgtgtctttccagccctaaaggaagggcagacccgtgtctttccatgcccgagggccacgacgtcactatgcagggcacacgtggcttggtttaaaaaggtcatcttagatttatcttagtaaatgtaataaattattttttagatcttgaaatttataataaaaatactttacctaccctgatcaccaaaacctgatgttttaaatgtgctttctttttgaaatttatgttttcaaataaaatctccctaaagcaatatttaaaaattgg

SEQ ID NO: 433055 - DNA, 4826 bp, Homo sapiens
acgaaggcacgccggggtgacctcaccctccaacatggcggcggcggtagattagggccgcgggtcggagcactcaccgccgctgggggaccctgtcggaagcaactgccgccgccgcctctttcatctcttctggggcaggggccagggccaggttttacacatccataagtagacctttttggagcctcaccagccaattcaatggcgtcctcttctactgtgcctctgggatttcactatgaaacaaagtatgttgttctcagctacttgggactcctctctcaagagaagctgcaagagcaacatctttcctcaccccaaggggttcaactagatatagcttcacaatctctggatcaagaaattttattaaaagttaaaactgaaattgaagaagagctaaaatctctggacaaagaaatttctgaagccttcaccagcacaggctttgaccgtcacacttctccagtgttcagccctgccaatccagaaagctcaatggaagactgcttggcccatcttggagaaaaagtgtcccaggaactgaaagagcctctccataaagcattgcaaatgctcctgagccaggcactgtgtttagtcttgagtcagaggaggaggaataccctggaatcactgcagaagatagcaatgacatttacatcctgcccagcgacaactctggacaagtcagtcccccagagtctccaactgtgaccacttcctggcagtctgagagcttacctgtgtcactgtcagctagccagagttggcacacagaaagcctgccagtgtcactaggccctgagtcctggcagcagattgcaatggatcctgaagaagtgaaaagcttagacagcaacggagctggagagaagagtgagaacaactcctctaattctgacattgtgcacgtggagaaagaagaggtgcccgagggcatggaagaggctgctgtggcttctgtggtcttgccagcgcgggagctgcaagaggcacttcctgaagccccagctcccttgcttccacatatcactgccacctccctgctggggacaagggaacctgacacagaagtgatcacagttgagaaatccagccctgctacatctctgtttgtagaacttgatgaagaagaggtgaaagcagcaacaactgaacctactgaagtggaggaggtggtccccgcactggaacccacagaaacgctgctgagtgagaaggagataaacgcaagggaagagagccttgtggaagagctgtcccctgccagcgagaagaagcccgtgccgccgtctgagggcaagtctagactgtcccccgccggtgagatgaagcccatgccgctgtctgagggcaagtctatactgctgtttggaggggctgctgctgttgccatcctggcagtggccatcggggtagccctggctctgagaaagaaataggaggcttttcagaagagaaagacagaaggatgtaaggttggagttgtattggctggaatttgaacctccagcagctgtctggacatttgtggaacactctgggataattggggacttctgctcaacatggcagtggcatgttaggcatgttagggcttgaggtggggcattcacattcatctgactgtaaatcccaagggcctccgctcatgctaaattgagaatcttaggggtaaagcaccccctccaggaccgggtttctcagccttggcactagtgctgttctgaccattctctgtgttggggctgtcctgtgtgtggtgggctccacccactagatgccagtggcaccccctcccagagatgacaaacgaaaatgtctctagacattgccaaatgtcccgtgtgaacatcccctattgagacccactgctttagcgagagagggtttacttaggaagaattgggatagaaattcccagctgagagaacttagctgtgggctcctcagctactgacttcttagctcttaatccccttagaatttcatctttctcgatgagcaggctctgcacccactctttttttgccccccgccctcatcctggagtgtgagggtgctcgcccgtactctcagctgcctctcagggactgcactgttcctcttcacccccaggttcctgctaagatcccacgggcgagggcttgctctggactcagtctgtcaagtccccgaagcttcctgcagctccaccttgtaaaaatgctgcctttgggaatcttcgaaatatgtacacagagaaaatcacatgaaggagacctggggtccccacttgtgagtgcaactgcaagtaactctggctagagagacacatgtgtcttgtgtcaaggcaggaggataacctggatgaccttctgaggtctcttcagcccttttcgctagtggtcacccaccaccatggttacttgccagcaacatctctattgctggatggtccctgtctataaccttgggctagtatattttttccaatatgggaccttagtcttactactgatgagttctatgggtctcttgctagggggtaaggatttttattcttgggcttatagagccagttagatcataattcttatgaaatagagagtgtcctaaatatcactgaaataaaaagtaggaaaaagaagcttgaattttaagactgaggctgctctgcagattctagtttggctttcagagttcaagagtggtggcatcttcacctgaattcttcaatgccagggtaataaaccaaaatagtcctaatcagtatatgctagttgagcatcggcataattttctttcctctggctgatcccagccctaaaggaagggtagacccgtgtctttccagccctaaaggaagggtagacccgtgtctttccagccctaaaggaagggcagacccgtgtctttccatgcccgagggccacgacgtcactatgcagggcacacgtggcttggtttaaaaaggtcatcttagatttatcttagtaaatgtaataaattattttttagatcttgaaatttataataaaaatactttacctaccctgatcaccaaaacctgatgttttaaatgtgctttctttttgaaatttatgttttcaaataaaatctccctaaagcaatatttaaaaattggtcaaaacaaggtctgggagtatgtttgtgtgtctttccagctttatcctgtagcgtgtctttgttctgtgttttagtgtcccatttagggagtgatgttttaagggtttttgtgtacttggattaagtaattagaggtgagtggggggaatgggattattgaggcaatgatttttttcttcatgggctctgatagttgcattgattgttctgtattctaattgctatatttgtgtttgcataggtgaagagcaaactggtgcgttatcttgatttttaaaaagtaataaatcctatgagttccagtattaacacttgccagttctggatcctcacacccattggctgagcgcattcaagcaccaatcgaagccaggttcatctctgagctgctgaaaggaggtgtgaggcttaggaaattggagcctgtgttgcccacgaaaggaaagaataaggaagaaatgtggtatggaagcggctacttgctgctttattttcccacctgttagacattcctccacagtgatttggccagttgtatttcacggtaatggaactagatagtgttttccattggctttctctggtagctcttggtcagctcctgagttaacaggatgtggcagcatccctgttcttccttcacgtcctcaccctctgcctccagcagtggaagggaacagccctcatgaggactgcttcctactgcagctcctgctttttgctcatacatttaaaaaactatttctcaagcttcccctccttttggggggaggagctgatagtaggaggccattccttccacctccaacttataccctctaagtctaaggtgaaggaaagattcagaataaatccaacttgtttatagaaaagttcttgttagtccttagacctcatctcaactgctctgttgaaggtaatgatttattgggggggaaaaaacaacgccaatttatcctctctgtattaaagtgataattctgggcccacagaaatcagtcagtacctgcggtgtgccttaaggggactctcatgatcatcattcccttctagagaacattctagatgaagaaatgcaactgttgaccttctggttcacccatctccccctcgaggcattcttgataccccttctcacctgcatttctgtcccagggataccagatgcagccactacctaactaggcttgtcctgggggagtgagccgtgaacctggagacatggctttgacccacagctactgttcatttcctcaggctttgcgctgattccctcaataatatgacagtaaggcaagtagtctccttgcctttctcctgaaaggtatgagatgtggacatttcagtgtttgaattattttaagagatgttttatagaaataaaacgttttgtagctaagaattttccctttctcttaatttcttacatctttccacacaaacttatctttccaagaatttgaggtggtgatcatacccatcaagacggccttgtaggctatctgattgctaacagacacgacctagagcttctgcccaaattcccacacaagcattatctcgtttaacatctcagcgacatactggataccagaataatgtttcctcttctctggtgcaccaaaacctgcccttagtgataatctctcaattatgacattcatttgagtttagggtgtataatttttcct

SEQ ID NO: 433056 - DNA, 4571 bp, Homo sapiens
acgaaggcacgccggggtgacctcaccctccaacatggcggcggcggtagattagggccgcgggtcggagcactcaccgccgctgggggaccctgtcggaagcaactgccgccgccgcctctttcatctcttctggggcaggggccagggccaggttttacacatccataagtagacctttttggagcctcaccagccaattcaatggcgtcctcttctactgtgcctctgggatttcactatgaaacaaagtatgttgttctcagctacttgggactcctctctcaagagaagctgcaagagcaacatctttcctcaccccaaggggttcaactagatatagcttcacaatctctggatcaagaaattttattaaaagttaaaactgaaattgaagaagagctaaaatctctggacaaagaaatttctgaagccttcaccagcacaggctttgaccgtcacacttctccagtgttcagccctgccaatccagaaagctcaatggaagactgcttggcccatcttggagaaaaagtgtcccaggaactgaaagagcctctccataaagcattgcaatggatcctgaagaagtgaaaagcttagacagcaacggagctggagagaagagtgagaacaactcctctaattctgacattgtgcacgtggagaaagaagaggtgcccgagggcatggaagaggctgctgtggcttctgtggtcttgccagcgcgggagctgcaagaggcacttcctgaagccccagctcccttgcttccacatatcactgccacctccctgctggggacaagggaacctgacacagaagtgatcacagttgagaaatccagccctgctacatctctgtttgtagaacttgatgaagaagaggtgaaagcagcaacaactgaacctactgaagtggaggaggtggtccccgcactggaacccacagaaacgctgctgagtgagaaggagataaacgcaagggaagagagccttgtggaagagctgtcccctgccagcgagaagaagcccgtgccgccgtctgagggcaagtctagactgtcccccgccggtgagatgaagcccatgccgctgtctgagggcaagtctatactgctgtttggaggggctgctgctgttgccatcctggcagtggccatcggggtagccctggctctgagaaagaaataggaggcttttcagaagagaaagacagaaggatgtaaggttggagttgtattggctggaatttgaacctccagcagctgtctggacatttgtggaacactctgggataattggggacttctgctcaacatggcagtggcatgttaggcatgttagggcttgaggtggggcattcacattcatctgactgtaaatcccaagggcctccgctcatgctaaattgagaatcttaggggtaaagcaccccctccaggaccgggtttctcagccttggcactagtgctgttctgaccattctctgtgttggggctgtcctgtgtgtggtgggctccacccactagatgccagtggcaccccctcccagagatgacaaacgaaaatgtctctagacattgccaaatgtcccgtgtgaacatcccctattgagacccactgctttagcgagagagggtttacttaggaagaattgggatagaaattcccagctgagagaacttagctgtgggctcctcagctactgacttcttagctcttaatccccttagaatttcatctttctcgatgagcaggctctgcacccactctttttttgccccccgccctcatcctggagtgtgagggtgctcgcccgtactctcagctgcctctcagggactgcactgttcctcttcacccccaggttcctgctaagatcccacgggcgagggcttgctctggactcagtctgtcaagtccccgaagcttcctgcagctccaccttgtaaaaatgctgcctttgggaatcttcgaaatatgtacacagagaaaatcacatgaaggagacctggggtccccacttgtgagtgcaactgcaagtaactctggctagagagacacatgtgtcttgtgtcaaggcaggaggataacctggatgaccttctgaggtctcttcagcccttttcgctagtggtcacccaccaccatggttacttgccagcaacatctctattgctggatggtccctgtctataaccttgggctagtatattttttccaatatgggaccttagtcttactactgatgagttctatgggtctcttgctagggggtaaggatttttattcttgggcttatagagccagttagatcataattcttatgaaatagagagtgtcctaaatatcactgaaataaaaagtaggaaaaagaagcttgaattttaagactgaggctgctctgcagattctagtttggctttcagagttcaagagtggtggcatcttcacctgaattcttcaatgccagggtaataaaccaaaatagtcctaatcagtatatgctagttgagcatcggcataattttctttcctctggctgatcccagccctaaaggaagggtagacccgtgtctttccagccctaaaggaagggtagacccgtgtctttccagccctaaaggaagggcagacccgtgtctttccatgcccgagggccacgacgtcactatgcagggcacacgtggcttggtttaaaaaggtcatcttagatttatcttagtaaatgtaataaattattttttagatcttgaaatttataataaaaatactttacctaccctgatcaccaaaacctgatgttttaaatgtgctttctttttgaaatttatgttttcaaataaaatctccctaaagcaatatttaaaaattggtcaaaacaaggtctgggagtatgtttgtgtgtctttccagctttatcctgtagcgtgtctttgttctgtgttttagtgtcccatttagggagtgatgttttaagggtttttgtgtacttggattaagtaattagaggtgagtggggggaatgggattattgaggcaatgatttttttcttcatgggctctgatagttgcattgattgttctgtattctaattgctatatttgtgtttgcataggtgaagagcaaactggtgcgttatcttgatttttaaaaagtaataaatcctatgagttccagtattaacacttgccagttctggatcctcacacccattggctgagcgcattcaagcaccaatcgaagccaggttcatctctgagctgctgaaaggaggtgtgaggcttaggaaattggagcctgtgttgcccacgaaaggaaagaataaggaagaaatgtggtatggaagcggctacttgctgctttattttcccacctgttagacattcctccacagtgatttggccagttgtatttcacggtaatggaactagatagtgttttccattggctttctctggtagctcttggtcagctcctgagttaacaggatgtggcagcatccctgttcttccttcacgtcctcaccctctgcctccagcagtggaagggaacagccctcatgaggactgcttcctactgcagctcctgctttttgctcatacatttaaaaaactatttctcaagcttcccctccttttggggggaggagctgatagtaggaggccattccttccacctccaacttataccctctaagtctaaggtgaaggaaagattcagaataaatccaacttgtttatagaaaagttcttgttagtccttagacctcatctcaactgctctgttgaaggtaatgatttattgggggggaaaaaacaacgccaatttatcctctctgtattaaagtgataattctgggcccacagaaatcagtcagtacctgcggtgtgccttaaggggactctcatgatcatcattcccttctagagaacattctagatgaagaaatgcaactgttgaccttctggttcacccatctccccctcgaggcattcttgataccccttctcacctgcatttctgtcccagggataccagatgcagccactacctaactaggcttgtcctgggggagtgagccgtgaacctggagacatggctttgacccacagctactgttcatttcctcaggctttgcgctgattccctcaataatatgacagtaaggcaagtagtctccttgcctttctcctgaaaggtatgagatgtggacatttcagtgtttgaattattttaagagatgttttatagaaataaaacgttttgtagctaagaattttccctttctcttaatttcttacatctttccacacaaacttatctttccaagaatttgaggtggtgatcatacccatcaagacggccttgtaggctatctgattgctaacagacacgacctagagcttctgcccaaattcccacacaagcattatctcgtttaacatctcagcgacatactggataccagaataatgtttcctcttctctggtgcaccaaaacctgcccttagtgataatctctcaattatgacattcatttgagtttagggtgtataatttttcct

SEQ ID NO: 433057 - DNA, 4293 bp, Homo sapiens
gagacaagtgttgctcagtcgcccaggctggagtacatcattcagcaaggtggctggggcactgtgtttagtcttgagtcagaggaggaggaataccctggaatcactgcagaagatagcaatgacatttacatcctgcccagcgacaactctggacaagtcagtcccccagagtctccaactgtgaccacttcctggcagtctgagagcttacctgtgtcactgtcagctagccagagttggcacacagaaagcctgccagtgtcactaggccctgagtcctggcagcagattgcaatggatcctgaagaagtgaaaagcttagacagcaacggagctggagagaagagtgagaacaactcctctaattctgacattgtgcacgtggagaaagaagaggtgcccgagggcatggaagaggctgctgtggcttctgtggtcttgccagcgcgggagctgcaagaggcacttcctgaagccccagctcccttgcttccacatatcactgccacctccctgctggggacaagggaacctgacacagaagtgatcacagttgagaaatccagccctgctacatctctgtttgtagaacttgatgaagaagaggtgaaagcagcaacaactgaacctactgaagtggaggaggtggtccccgcactggaacccacagaaacgctgctgagtgagaaggagataaacgcaagggaagagagccttgtggaagagctgtcccctgccagcgagaagaagcccgtgccgccgtctgagggcaagtctagactgtcccccgccggtgagatgaagcccatgccgctgtctgagggcaagtctatactgctgtttggaggggctgctgctgttgccatcctggcagtggccatcggggtagccctggctctgagaaagaaataggaggcttttcagaagagaaagacagaaggatgtaaggttggagttgtattggctggaatttgaacctccagcagctgtctggacatttgtggaacactctgggataattggggacttctgctcaacatggcagtggcatgttaggcatgttagggcttgaggtggggcattcacattcatctgactgtaaatcccaagggcctccgctcatgctaaattgagaatcttaggggtaaagcaccccctccaggaccgggtttctcagccttggcactagtgctgttctgaccattctctgtgttggggctgtcctgtgtgtggtgggctccacccactagatgccagtggcaccccctcccagagatgacaaacgaaaatgtctctagacattgccaaatgtcccgtgtgaacatcccctattgagacccactgctttagcgagagagggtttacttaggaagaattgggatagaaattcccagctgagagaacttagctgtgggctcctcagctactgacttcttagctcttaatccccttagaatttcatctttctcgatgagcaggctctgcacccactctttttttgccccccgccctcatcctggagtgtgagggtgctcgcccgtactctcagctgcctctcagggactgcactgttcctcttcacccccaggttcctgctaagatcccacgggcgagggcttgctctggactcagtctgtcaagtccccgaagcttcctgcagctccaccttgtaaaaatgctgcctttgggaatcttcgaaatatgtacacagagaaaatcacatgaaggagacctggggtccccacttgtgagtgcaactgcaagtaactctggctagagagacacatgtgtcttgtgtcaaggcaggaggataacctggatgaccttctgaggtctcttcagcccttttcgctagtggtcacccaccaccatggttacttgccagcaacatctctattgctggatggtccctgtctataaccttgggctagtatattttttccaatatgggaccttagtcttactactgatgagttctatgggtctcttgctagggggtaaggatttttattcttgggcttatagagccagttagatcataattcttatgaaatagagagtgtcctaaatatcactgaaataaaaagtaggaaaaagaagcttgaattttaagactgaggctgctctgcagattctagtttggctttcagagttcaagagtggtggcatcttcacctgaattcttcaatgccagggtaataaaccaaaatagtcctaatcagtatatgctagttgagcatcggcataattttctttcctctggctgatcccagccctaaaggaagggtagacccgtgtctttccagccctaaaggaagggtagacccgtgtctttccagccctaaaggaagggcagacccgtgtctttccatgcccgagggccacgacgtcactatgcagggcacacgtggcttggtttaaaaaggtcatcttagatttatcttagtaaatgtaataaattattttttagatcttgaaatttataataaaaatactttacctaccctgatcaccaaaacctgatgttttaaatgtgctttctttttgaaatttatgttttcaaataaaatctccctaaagcaatatttaaaaattggtcaaaacaaggtctgggagtatgtttgtgtgtctttccagctttatcctgtagcgtgtctttgttctgtgttttagtgtcccatttagggagtgatgttttaagggtttttgtgtacttggattaagtaattagaggtgagtggggggaatgggattattgaggcaatgatttttttcttcatgggctctgatagttgcattgattgttctgtattctaattgctatatttgtgtttgcataggtgaagagcaaactggtgcgttatcttgatttttaaaaagtaataaatcctatgagttccagtattaacacttgccagttctggatcctcacacccattggctgagcgcattcaagcaccaatcgaagccaggttcatctctgagctgctgaaaggaggtgtgaggcttaggaaattggagcctgtgttgcccacgaaaggaaagaataaggaagaaatgtggtatggaagcggctacttgctgctttattttcccacctgttagacattcctccacagtgatttggccagttgtatttcacggtaatggaactagatagtgttttccattggctttctctggtagctcttggtcagctcctgagttaacaggatgtggcagcatccctgttcttccttcacgtcctcaccctctgcctccagcagtggaagggaacagccctcatgaggactgcttcctactgcagctcctgctttttgctcatacatttaaaaaactatttctcaagcttcccctccttttggggggaggagctgatagtaggaggccattccttccacctccaacttataccctctaagtctaaggtgaaggaaagattcagaataaatccaacttgtttatagaaaagttcttgttagtccttagacctcatctcaactgctctgttgaaggtaatgatttattgggggggaaaaaacaacgccaatttatcctctctgtattaaagtgataattctgggcccacagaaatcagtcagtacctgcggtgtgccttaaggggactctcatgatcatcattcccttctagagaacattctagatgaagaaatgcaactgttgaccttctggttcacccatctccccctcgaggcattcttgataccccttctcacctgcatttctgtcccagggataccagatgcagccactacctaactaggcttgtcctgggggagtgagccgtgaacctggagacatggctttgacccacagctactgttcatttcctcaggctttgcgctgattccctcaataatatgacagtaaggcaagtagtctccttgcctttctcctgaaaggtatgagatgtggacatttcagtgtttgaattattttaagagatgttttatagaaataaaacgttttgtagctaagaattttccctttctcttaatttcttacatctttccacacaaacttatctttccaagaatttgaggtggtgatcatacccatcaagacggccttgtaggctatctgattgctaacagacacgacctagagcttctgcccaaattcccacacaagcattatctcgtttaacatctcagcgacatactggataccagaataatgtttcctcttctctggtgcaccaaaacctgcccttagtgataatctctcaattatgacattcatttgagtttagggtgtataatttttcct

SEQ ID NO: 433058 - DNA, 3912 bp, Homo sapiens
ctgctttagcgagagagggtttacttaggaagaattgggataggaattcccagctgagagaacttagctgtgggctcctcagctactgacttcttagctcttactcccttgcttccacatatcactgccacctccctgctggggacaagggaacctgacacagaagtgatcacagttgagaaatccagccctgctacatctctgtttgtagaacttgatgaagaagaggtgaaagcagcaacaactgaacctactgaagtggaggaggtggtccccgcactggaacccacagaaacgctgctgagtgagaaggagataaacgcaagggaagagagccttgtggaagagctgtcccctgccagcgagaagaagcccgtgccgccgtctgagggcaagtctagactgtcccccgccggtgagatgaagcccatgccgctgtctgagggcaagtctatactgctgtttggaggggctgctgctgttgccatcctggcagtggccatcggggtagccctggctctgagaaagaaataggaggcttttcagaagagaaagacagaaggatgtaaggttggagttgtattggctggaatttgaacctccagcagctgtctggacatttgtggaacactctgggataattggggacttctgctcaacatggcagtggcatgttaggcatgttagggcttgaggtggggcattcacattcatctgactgtaaatcccaagggcctccgctcatgctaaattgagaatcttaggggtaaagcaccccctccaggaccgggtttctcagccttggcactagtgctgttctgaccattctctgtgttggggctgtcctgtgtgtggtgggctccacccactagatgccagtggcaccccctcccagagatgacaaacgaaaatgtctctagacattgccaaatgtcccgtgtgaacatcccctattgagacccactgctttagcgagagagggtttacttaggaagaattgggatagaaattcccagctgagagaacttagctgtgggctcctcagctactgacttcttagctcttaatccccttagaatttcatctttctcgatgagcaggctctgcacccactctttttttgccccccgccctcatcctggagtgtgagggtgctcgcccgtactctcagctgcctctcagggactgcactgttcctcttcacccccaggttcctgctaagatcccacgggcgagggcttgctctggactcagtctgtcaagtccccgaagcttcctgcagctccaccttgtaaaaatgctgcctttgggaatcttcgaaatatgtacacagagaaaatcacatgaaggagacctggggtccccacttgtgagtgcaactgcaagtaactctggctagagagacacatgtgtcttgtgtcaaggcaggaggataacctggatgaccttctgaggtctcttcagcccttttcgctagtggtcacccaccaccatggttacttgccagcaacatctctattgctggatggtccctgtctataaccttgggctagtatattttttccaatatgggaccttagtcttactactgatgagttctatgggtctcttgctagggggtaaggatttttattcttgggcttatagagccagttagatcataattcttatgaaatagagagtgtcctaaatatcactgaaataaaaagtaggaaaaagaagcttgaattttaagactgaggctgctctgcagattctagtttggctttcagagttcaagagtggtggcatcttcacctgaattcttcaatgccagggtaataaaccaaaatagtcctaatcagtatatgctagttgagcatcggcataattttctttcctctggctgatcccagccctaaaggaagggtagacccgtgtctttccagccctaaaggaagggtagacccgtgtctttccagccctaaaggaagggcagacccgtgtctttccatgcccgagggccacgacgtcactatgcagggcacacgtggcttggtttaaaaaggtcatcttagatttatcttagtaaatgtaataaattattttttagatcttgaaatttataataaaaatactttacctaccctgatcaccaaaacctgatgttttaaatgtgctttctttttgaaatttatgttttcaaataaaatctccctaaagcaatatttaaaaattggtcaaaacaaggtctgggagtatgtttgtgtgtctttccagctttatcctgtagcgtgtctttgttctgtgttttagtgtcccatttagggagtgatgttttaagggtttttgtgtacttggattaagtaattagaggtgagtggggggaatgggattattgaggcaatgatttttttcttcatgggctctgatagttgcattgattgttctgtattctaattgctatatttgtgtttgcataggtgaagagcaaactggtgcgttatcttgatttttaaaaagtaataaatcctatgagttccagtattaacacttgccagttctggatcctcacacccattggctgagcgcattcaagcaccaatcgaagccaggttcatctctgagctgctgaaaggaggtgtgaggcttaggaaattggagcctgtgttgcccacgaaaggaaagaataaggaagaaatgtggtatggaagcggctacttgctgctttattttcccacctgttagacattcctccacagtgatttggccagttgtatttcacggtaatggaactagatagtgttttccattggctttctctggtagctcttggtcagctcctgagttaacaggatgtggcagcatccctgttcttccttcacgtcctcaccctctgcctccagcagtggaagggaacagccctcatgaggactgcttcctactgcagctcctgctttttgctcatacatttaaaaaactatttctcaagcttcccctccttttggggggaggagctgatagtaggaggccattccttccacctccaacttataccctctaagtctaaggtgaaggaaagattcagaataaatccaacttgtttatagaaaagttcttgttagtccttagacctcatctcaactgctctgttgaaggtaatgatttattgggggggaaaaaacaacgccaatttatcctctctgtattaaagtgataattctgggcccacagaaatcagtcagtacctgcggtgtgccttaaggggactctcatgatcatcattcccttctagagaacattctagatgaagaaatgcaactgttgaccttctggttcacccatctccccctcgaggcattcttgataccccttctcacctgcatttctgtcccagggataccagatgcagccactacctaactaggcttgtcctgggggagtgagccgtgaacctggagacatggctttgacccacagctactgttcatttcctcaggctttgcgctgattccctcaataatatgacagtaaggcaagtagtctccttgcctttctcctgaaaggtatgagatgtggacatttcagtgtttgaattattttaagagatgttttatagaaataaaacgttttgtagctaagaattttccctttctcttaatttcttacatctttccacacaaacttatctttccaagaatttgaggtggtgatcatacccatcaagacggccttgtaggctatctgattgctaacagacacgacctagagcttctgcccaaattcccacacaagcattatctcgtttaacatctcagcgacatactggataccagaataatgtttcctcttctctggtgcaccaaaacctgcccttagtgataatctctcaattatgacattcatttgagtttagggtgtataatttttcct

SEQ ID NO: 433059 - DNA, 2635 bp, Homo sapiens
ttcctacatagaccatcacctaaagactagaacgaaccacgcgttacactcgacacgagggatatcctgacgccttcaccagcacaggctttgaccgtcacacttctccagtgttcagccctgccaatccagaaagctcaatggaagactgcttggcccatcttggagaaaaagtgtcccaggaactgaaagagcctctccataaagcattgcaaatgctcctgagccaattttggtgcctctggttttgctacgacaaatgcttttggaattgacaagacgtggtcaagaacctttgagcgcactgctgcagtttggcgtgacatacctggaggactattcggcagagtacatcattcagcaaggtggctggggcactgtgtttagtcttgagtcagaggaggaggaataccctggaatcactgcagaagatagcaatgacatttacatcctgcccagcgacaactctggacaagtcagtcccccagagtctccaactgtgaccacttcctggcagtctgagagcttacctgtgtcactgtcagctagccagagttggcacacagaaagcctgccagtgtcactaggccctgagtcctggcagcagattgcaatggatcctgaagaagtgaaaagcttagacagcaacggagctggagagaagagtgagaacaactcctctaattctgacattgtgcacgtggagaaagaagaggtgcccgagggccacgacgtcactatgcagggcacacgtggcttggtttaaaaaggtcatcttagatttatcttagtaaatgtaataaattattttttagatcttgaaatttataataaaaatactttacctaccctgatcaccaaaacctgatgttttaaatgtgctttctttttgaaatttatgttttcaaataaaatctccctaaagcaatatttaaaaattggtcaaaacaaggtctgggagtatgtttgtgtgtctttccagctttatcctgtagcgtgtctttgttctgtgttttagtgtcccatttagggagtgatgttttaagggtttttgtgtacttggattaagtaattagaggtgagtggggggaatgggattattgaggcaatgatttttttcttcatgggctctgatagttgcattgattgttctgtattctaattgctatatttgtgtttgcataggtgaagagcaaactggtgcgttatcttgatttttaaaaagtaataaatcctatgagttccagtattaacacttgccagttctggatcctcacacccattggctgagcgcattcaagcaccaatcgaagccaggttcatctctgagctgctgaaaggaggtgtgaggcttaggaaattggagcctgtgttgcccacgaaaggaaagaataaggaagaaatgtggtatggaagcggctacttgctgctttattttcccacctgttagacattcctccacagtgatttggccagttgtatttcacggtaatggaactagatagtgttttccattggctttctctggtagctcttggtcagctcctgagttaacaggatgtggcagcatccctgttcttccttcacgtcctcaccctctgcctccagcagtggaagggaacagccctcatgaggactgcttcctactgcagctcctgctttttgctcatacatttaaaaaactatttctcaagcttcccctccttttggggggaggagctgatagtaggaggccattccttccacctccaacttataccctctaagtctaaggtgaaggaaagattcagaataaatccaacttgtttatagaaaagttcttgttagtccttagacctcatctcaactgctctgttgaaggtaatgatttattgggggggaaaaaacaacgccaatttatcctctctgtattaaagtgataattctgggcccacagaaatcagtcagtacctgcggtgtgccttaaggggactctcatgatcatcattcccttctagagaacattctagatgaagaaatgcaactgttgaccttctggttcacccatctccccctcgaggcattcttgataccccttctcacctgcatttctgtcccagggataccagatgcagccactacctaactaggcttgtcctgggggagtgagccgtgaacctggagacatggctttgacccacagctactgttcatttcctcaggctttgcgctgattccctcaataatatgacagtaaggcaagtagtctccttgcctttctcctgaaaggtatgagatgtggacatttcagtgtttgaattattttaagagatgttttatagaaataaaacgttttgtagctaagaattttccctttctcttaatttcttacatctttccacacaaacttatctttccaagaatttgaggtggtgatcatacccatcaagacggccttgtaggctatctgattgctaacagacacgacctagagcttctgcccaaattcccacacaagcattatctcgtttaacatctcagcgacatactggataccagaataatgtttcctcttctctggtgcaccaaaacctgcccttagtgataatctctcaattatgacattcatttgagtttagggtgtataatttttcct

SEQ ID NO: 433060 - DNA, 1203 bp, Homo sapiens
acgaaggcacgccggggtgacctcaccctccaacatggcggcggcggtagattagggccgcgggtcggagcactcaccgccgctgggggaccctgtcggaagcaactgccgccgccgcctctttcatctcttctggggcaggggccagggccaggttttacacatccataagtagacctttttggagcctcaccagccaattcaatggcgtcctcttctactgtgcctctgggatttcactatgaaacaaagtatgttgttctcagctacttgggactcctctctcaagagaagctgcaagagcaacatctttcctcaccccaaggggttcaactagatatagcttcacaatctctggatcaagaaattttattaaaagttaaaactgaaattgaagaagagctaaaatctctggacaaagaaatttctgaagccttcaccagcacaggctttgaccgtcacacttctccagtgttcagccctgccaatccagaaagctcaatggaagactgcttggcccatcttggagaaaaagtgtcccaggaactgaaagagcctctccataaagcattgcaaatgctcctgagccaattttggtgcctctggttttgctacgacaaatgcttttggaattgacaagacgtggtcaagaacctttgagcgcactgctgcagtttggcgtgacatacctggaggactattcggcagagtacatcattcagcaaggtggctggggcactgtgtttagtcttgagtcagaggaggaggaataccctggaatcactgcagaagatagcaatgacatttacatcctgcccagcgacaactctggacaagtcagtcccccagagtctccaactgtgaccacttcctggcagtctgagagcttacctgtgtcactgtcagctagccagagttggcacacagaaagcctgccagtgtcactaggccctgagtcctggcagcagattgcaatggatcctgaagaagtgaaaagcttagacagcaacggagctggagagaagagtgagaacaactcctctaattctgacattgtgcacgtggagggccacgacgtcactatgcagggcacacgtggcttggtttaaaaaggtcatcttagatttatcttagtaaatgtaataaattattttttagatcttgaaatttataataaaaatactttacctaccctgatcacca

SEQ ID NO: 433061 - DNA, 348 bp, Homo sapiens
aaaaaaaaaaaaaaaagtgctattatattctaatggtttctctctccctctttcaataataaccttttttgttgctttcaggggttcaactagatatagcttcacaatctctggatcaagaaattttattaaaagttaaaactgaaattgaagaagagctaaaatctctggacaaagaaatttctgaaggtctgtttattcttatttttctagttaataagcagattgtgtttgttatggtttactgttggtttaatttgatttttacagtggggtattctcaacagttaacaacttacaccaattatacattggtagaagtttataagggtaaaactagaaggtagc

SEQ ID NO: 433062 - DNA, 3426 bp, Homo sapiens
acgaaggcacgccggggtgacctcaccctccaacatggcggcggcggtagattagggccgcgggtcggagcactcaccgccgctctttcatctcttctggggcaggggccagggccaggttttacacatccataagtagacctttttggagcctcaccagccaattcaatggcgtcctcttctactgtgcctctgggatttcactatgaaacaaagtatgttgttctcagctacttgggactcctctctcaagagaagctgcaagagcaacatctttcctcaccccaagagtctctctcttgcccaggctggtgtgcagtgttgagaacacagctccctacagcctctacctgttgggctcaagcaattctcccatctcagcttcctgagtagctggaccacaggggttcaactagatatagcttcacaatctctggatcaagaaattttattaaaagttaaaactgaaattgaagaagagctaaaatctctggacaaagaaatttctgaagccttcaccagcacaggctttgaccgtcacacttctccagtgttcagccctgccaatccagaaagctcaatggaagactgcttggcccatcttggagaaaaagtgtcccaggaactgaaagagcctctccataaagcattgcaaatgctcctgagccagccagtgacatatcaggcatttcgggaatgtacactggagaccacagttcatgccagcggctggaataagattttggtgcctctggttttgctacgacaaatgcttttggaattgacaagacgtggtcaagaacctttgagcgcactgctgcagtttggcgtgacatacctggaggactattcggcagagtacatcattcagcaaggtggctggggcactgtgtttagtcttgagtcagaggaggaggaataccctggaatcactgcagaagatagcaatgacatttacatcctgcccagcgacaactctggacaagtcagtcccccagagtctccaactgtgaccacttcctggcagtctgagagcttacctgtgtcactgtcagctagccagagttggcacacagaaagcctgccagtgtcactaggccctgagtcctggcagcagattgcaatggatcctgaagaagtgaaaagcttagacagcaacggagctggagagaagagtgagaacaactcctctaattctgacattgtgcacgtggagaaagaagaggtgcccgagggcatggaagaggctgctgtggcttctgtggtcttgccagcgcgggagctgcaagaggcacttcctgaagccccagctcccttgcttccacatatcactgccacctccctgctggggacaagggaacctgacacagaagtgatcacagttgagaaatccagccctgctacatctctgtttgtagaacttgatgaagaagaggtgaaagcagcaacaactgaacctactgaagtggaggaggtggtccccgcactggaacccacagaaacgctgctgagtgagaaggagataaacgcaagggaagagagccttgtggaagagctgtcccctgccagcgagaagaagcccgtgccgccgtctgagggcaagtctagactgtcccccgccggtgagatgaagcccatgccgctgtctgagggcaagtctatactgctgtttggaggggctgctgctgttgccatcctggcagtggccatcggggtagccctggctctgagaaagaaataggaggcttttcagaagagaaagacagaaggatgtaaggttggagttgtattggctggaatttgaacctccagcagctgtctggacatttgtggaacactctgggataattggggacttctgctcaacatggcagtggcatgttaggcatgttagggcttgaggtggggcattcacattcatctgactgtaaatcccaagggcctccgctcatgctaaattgagaatcttaggggtaaagcaccccctccaggaccgggtttctcagccttggcactagtgctgttctgaccattctctgtgttggggctgtcctgtgtgtggtgggctccacccactagatgccagtggcaccccctcccagagatgacaaacgaaaatgtctctagacattgccaaatgtcccgtgtgaacatcccctattgagacccactgctttagcgagagagggtttacttaggaagaattgggatagaaattcccagctgagagaacttagctgtgggctcctcagctactgacttcttagctcttaatccccttagaatttcatctttctcgatgagcaggctctgcacccactctttttttgccccccgccctcatcctggagtgtgagggtgctcgcccgtactctcagctgcctctcagggactgcactgttcctcttcacccccaggttcctgctaagatcccacgggcgagggcttgctctggactcagtctgtcaagtccccgaagcttcctgcagctccaccttgtaaaaatgctgcctttgggaatcttcgaaatatgtacacagagaaaatcacatgaaggagacctggggtccccacttgtgagtgcaactgcaagtaactctggctagagagacacatgtgtcttgtgtcaaggcaggaggataacctggatgaccttctgaggtctcttcagcccttttcgctagtggtcacccaccaccatggttacttgccagcaacatctctattgctggatggtccctgtctataaccttgggctagtatattttttccaatatgggaccttagtcttactactgatgagttctatgggtctcttgctagggggtaaggatttttattcttgggcttatagagccagttagatcataattcttatgaaatagagagtgtcctaaatatcactgaaataaaaagtaggaaaaagaagcttgaattttaagactgaggctgctctgcagattctagtttggctttcagagttcaagagtggtggcatcttcacctgaattcttcaatgccagggtaataaaccaaaatagtcctaatcagtatatgctagttgagcatcggcataattttctttcctctggctgatcccagccctaaaggaagggtagacccgtgtctttccagccctaaaggaagggtagacccgtgtctttccagccctaaaggaagggcagacccgtgtctttccatgcccgagggccacgacgtcactatgcagggcacacgtggcttggtttaaaaaggtcatcttagatttatcttagtaaatgtaataaattattttttagatcttgaaatttataataaaaatactttacctaccctgatcaccaaaacctgatgttttaaatgtgctttctttttgaaatttatgttttcaaataaaatctccctaaagcaatatttaaaaattgg

SEQ ID NO: 433063 - DNA, 4771 bp, Homo sapiens
aaaccccacagcctaattcctcctcaacctgggaaattcctatccccaatccttccctaaattaaacccctcctcctcgctaaagcagtgggtcctccaataggggatgttccacacgggacatttggccaatgtctagagacattttcgtttgtcatctctgggagggggtccactggcatctagtgggtggagcccaccacacacaggacagccccaacacagagaatggtcagaacagcactagtgccaaggctgagaaacccggtcctggagggggtgctttacccctaagattctcaatttagcatgagcggaggcccttgggatttacagtcagatgaatgtgaatgccccacctcaagccctaacatgcctaacatgccactgccatgttgagcagaagtccccaattatcccagagtgttccacaaatgtccagacagctgctggaggttcaaattccagccaatacaactccaaccttacaatccgtctgtctgtctcctggaaagggcagagcaagtccactgtgggcactgtgtttagtcttgagtcagaggaggaggaataccctggaatcactgcagaagatagcaatgacatttacatcctgcccagcgacaactctggacaagtcagtcccccagagtctccaactgtgaccacttcctggcagtctgagagcttacctgtgtcactgtcagctagccagagttggcacacagaaagcctgccagtgtcactaggccctgagtcctggcagcagattgcaatggatcctgaagaagtgaaaagcttagacagcaacggagctggagagaagagtgagaacaactcctctaattctgacattgtgcacgtggagaaagaagaggtgcccgagggcatggaagaggctgctgtggcttctgtggtcttgccagcgcgggagctgcaagaggcacttcctgaagccccagctcccttgcttccacatatcactgccacctccctgctggggacaagggaacctgacacagaagtgatcacagttgagaaatccagccctgctacatctctgtttgtagaacttgatgaagaagaggtgaaagcagcaacaactgaacctactgaagtggaggaggtggtccccgcactggaacccacagaaacgctgctgagtgagaaggagataaacgcaagggaagagagccttgtggaagagctgtcccctgccagcgagaagaagcccgtgccgccgtctgagggcaagtctagactgtcccccgccggtgagatgaagcccatgccgctgtctgagggcaagtctatactgctgtttggaggggctgctgctgttgccatcctggcagtggccatcggggtagccctggctctgagaaagaaataggaggcttttcagaagagaaagacagaaggatgtaaggttggagttgtattggctggaatttgaacctccagcagctgtctggacatttgtggaacactctgggataattggggacttctgctcaacatggcagtggcatgttaggcatgttagggcttgaggtggggcattcacattcatctgactgtaaatcccaagggcctccgctcatgctaaattgagaatcttaggggtaaagcaccccctccaggaccgggtttctcagccttggcactagtgctgttctgaccattctctgtgttggggctgtcctgtgtgtggtgggctccacccactagatgccagtggcaccccctcccagagatgacaaacgaaaatgtctctagacattgccaaatgtcccgtgtgaacatcccctattgagacccactgctttagcgagagagggtttacttaggaagaattgggatagaaattcccagctgagagaacttagctgtgggctcctcagctactgacttcttagctcttaatccccttagaatttcatctttctcgatgagcaggctctgcacccactctttttttgccccccgccctcatcctggagtgtgagggtgctcgcccgtactctcagctgcctctcagggactgcactgttcctcttcacccccaggttcctgctaagatcccacgggcgagggcttgctctggactcagtctgtcaagtccccgaagcttcctgcagctccaccttgtaaaaatgctgcctttgggaatcttcgaaatatgtacacagagaaaatcacatgaaggagacctggggtccccacttgtgagtgcaactgcaagtaactctggctagagagacacatgtgtcttgtgtcaaggcaggaggataacctggatgaccttctgaggtctcttcagcccttttcgctagtggtcacccaccaccatggttacttgccagcaacatctctattgctggatggtccctgtctataaccttgggctagtatattttttccaatatgggaccttagtcttactactgatgagttctatgggtctcttgctagggggtaaggatttttattcttgggcttatagagccagttagatcataattcttatgaaatagagagtgtcctaaatatcactgaaataaaaagtaggaaaaagaagcttgaattttaagactgaggctgctctgcagattctagtttggctttcagagttcaagagtggtggcatcttcacctgaattcttcaatgccagggtaataaaccaaaatagtcctaatcagtatatgctagttgagcatcggcataattttctttcctctggctgatcccagccctaaaggaagggtagacccgtgtctttccagccctaaaggaagggtagacccgtgtctttccagccctaaaggaagggcagacccgtgtctttccatgcccgagggccacgacgtcactatgcagggcacacgtggcttggtttaaaaaggtcatcttagatttatcttagtaaatgtaataaattattttttagatcttgaaatttataataaaaatactttacctaccctgatcaccaaaacctgatgttttaaatgtgctttctttttgaaatttatgttttcaaataaaatctccctaaagcaatatttaaaaattggtcaaaacaaggtctgggagtatgtttgtgtgtctttccagctttatcctgtagcgtgtctttgttctgtgttttagtgtcccatttagggagtgatgttttaagggtttttgtgtacttggattaagtaattagaggtgagtggggggaatgggattattgaggcaatgatttttttcttcatgggctctgatagttgcattgattgttctgtattctaattgctatatttgtgtttgcataggtgaagagcaaactggtgcgttatcttgatttttaaaaagtaataaatcctatgagttccagtattaacacttgccagttctggatcctcacacccattggctgagcgcattcaagcaccaatcgaagccaggttcatctctgagctgctgaaaggaggtgtgaggcttaggaaattggagcctgtgttgcccacgaaaggaaagaataaggaagaaatgtggtatggaagcggctacttgctgctttattttcccacctgttagacattcctccacagtgatttggccagttgtatttcacggtaatggaactagatagtgttttccattggctttctctggtagctcttggtcagctcctgagttaacaggatgtggcagcatccctgttcttccttcacgtcctcaccctctgcctccagcagtggaagggaacagccctcatgaggactgcttcctactgcagctcctgctttttgctcatacatttaaaaaactatttctcaagcttcccctccttttggggggaggagctgatagtaggaggccattccttccacctccaacttataccctctaagtctaaggtgaaggaaagattcagaataaatccaacttgtttatagaaaagttcttgttagtccttagacctcatctcaactgctctgttgaaggtaatgatttattgggggggaaaaaacaacgccaatttatcctctctgtattaaagtgataattctgggcccacagaaatcagtcagtacctgcggtgtgccttaaggggactctcatgatcatcattcccttctagagaacattctagatgaagaaatgcaactgttgaccttctggttcacccatctccccctcgaggcattcttgataccccttctcacctgcatttctgtcccagggataccagatgcagccactacctaactaggcttgtcctgggggagtgagccgtgaacctggagacatggctttgacccacagctactgttcatttcctcaggctttgcgctgattccctcaataatatgacagtaaggcaagtagtctccttgcctttctcctgaaaggtatgagatgtggacatttcagtgtttgaattattttaagagatgttttatagaaataaaacgttttgtagctaagaattttccctttctcttaatttcttacatctttccacacaaacttatctttccaagaatttgaggtggtgatcatacccatcaagacggccttgtaggctatctgattgctaacagacacgacctagagcttctgcccaaattcccacacaagcattatctcgtttaacatctcagcgacatactggataccagaataatgtttcctcttctctggtgcaccaaaacctgcccttagtgataatctctcaattatgacattcatttgagtttagggtgtataatttttcct

SEQ ID NO: 433064 - DNA, 3277 bp, Homo sapiens
acgaaggcacgccggggtgacctcaccctccaacatggcggcggcggtagattagggccgcgggtcggagcactcaccgccgctgggggaccctgtcggaagcaactgccgccgccgcctctttcatctcttctggggcaggggccagggccaggttttacacatccataagtagacctttttggagcctcaccagccaattcaatggcgtcctcttctactgtgcctctgggatttcactatgaaacaaagtatgttgttctcagctacttgggactcctctctcaagagaagctgcaagagcaacatctttcctcaccccaaggggttcaactagatatagcttcacaatctctggatcaagaaattttattaaaagttaaaactgaaattgaagaagagctaaaatctctggacaaagaaatttctgaagccttcaccagcacaggctttgaccgtcacacttctccagtgttcagccctgccaatccagaaagctcaatggaagactgcttggcccatcttggagaaaaagtgtcccaggaactgaaagagcctctccataaagcattgcaaatgctcctgagccaattttggtgcctctggttttgctacgacaaatgcttttggaattgacaagacgtggtcaagaacctttgagcgcactgctgcagtttggcgtgacatacctggaggactattcggcagagtacatcattcagcaaggtggctggggcactgtgtttagtcttgagtcagaggaggaggaataccctggaatcactgcagaagatagcaatgacatttacatcctgcccagcgacaactctggacaagtcagtcccccagagtctccaactgtgaccacttcctggcagtctgagagcttacctgtgtcactgtcagctagccagagttggcacacagaaagcctgccagtgtcactaggccctgagtcctggcagcagattgcaatggatcctgaagaagtgaaaagcttagacagcaacggagctggagagaagagtgagaacaactcctctaattctgacattgtgcacgtggagaaagaagaggtgcccgagggcatggaagaggctgctgtggcttctgtggtcttgccagcgcgggagctgcaagaggcacttcctgaagccccagctcccttgcttccacatatcactgccacctccctgctggggacaagggaacctgacacagaagtgatcacagttgagaaatccagccctgctacatctctgtttgtagaacttgatgaagaagaggtgaaagcagcaacaactgaacctactgaagtggaggaggtggtccccgcactggaacccacagaaacgctgctgagtgagaaggagataaacgcaagggaagagagccttgtggaagagctgtcccctgccagcgagaagaagcccgtgccgccgtctgagggcaagtctagactgtcccccgccggtgagatgaagcccatgccgctgtctgagggcaagtctatactgctgtttggaggggctgctgctgttgccatcctggcagtggccatcggggtagccctggctctgagaaagaaataggaggcttttcagaagagaaagacagaaggatgtaaggttggagttgtattggctggaatttgaacctccagcagctgtctggacatttgtggaacactctgggataattggggacttctgctcaacatggcagtggcatgttaggcatgttagggcttgaggtggggcattcacattcatctgactgtaaatcccaagggcctccgctcatgctaaattgagaatcttaggggtaaagcaccccctccaggaccgggtttctcagccttggcactagtgctgttctgaccattctctgtgttggggctgtcctgtgtgtggtgggctccacccactagatgccagtggcaccccctcccagagatgacaaacgaaaatgtctctagacattgccaaatgtcccgtgtgaacatcccctattgagacccactgctttagcgagagagggtttacttaggaagaattgggatagaaattcccagctgagagaacttagctgtgggctcctcagctactgacttcttagctcttaatccccttagaatttcatctttctcgatgagcaggctctgcacccactctttttttgccccccgccctcatcctggagtgtgagggtgctcgcccgtactctcagctgcctctcagggactgcactgttcctcttcacccccaggttcctgctaagatcccacgggcgagggcttgctctggactcagtctgtcaagtccccgaagcttcctgcagctccaccttgtaaaaatgctgcctttgggaatcttcgaaatatgtacacagagaaaatcacatgaaggagacctggggtccccacttgtgagtgcaactgcaagtaactctggctagagagacacatgtgtcttgtgtcaaggcaggaggataacctggatgaccttctgaggtctcttcagcccttttcgctagtggtcacccaccaccatggttacttgccagcaacatctctattgctggatggtccctgtctataaccttgggctagtatattttttccaatatgggaccttagtcttactactgatgagttctatgggtctcttgctagggggtaaggatttttattcttgggcttatagagccagttagatcataattcttatgaaatagagagtgtcctaaatatcactgaaataaaaagtaggaaaaagaagcttgaattttaagactgaggctgctctgcagattctagtttggctttcagagttcaagagtggtggcatcttcacctgaattcttcaatgccagggtaataaaccaaaatagtcctaatcagtatatgctagttgagcatcggcataattttctttcctctggctgatcccagccctaaaggaagggtagacccgtgtctttccagccctaaaggaagggtagacccgtgtctttccagccctaaaggaagggcagacccgtgtctttccatgcccgagggccacgacgtcactatgcagggcacacgtggcttggtttaaaaaggtcatcttagatttatcttagtaaatgtaataaattattttttagatcttgaaatttataataaaaatactttacctaccctgatcaccaaaacctgatgttttaaatgtgctttctttttgaaatttatgttttcaaataaaatctccctaaagcaatatttaaaaattgg

SEQ ID NO: 433065 - DNA, 3120 bp, Homo sapiens
acgaaggcacgccggggtgacctcaccctccaacatggcggcggcggtagattagggccgcgggtcggagcactcaccgccgctgggggaccctgtcggaagcaactgccgccgccgcctctttcatctcttctggggcaggggccagggccaggttttacacatccataagtagacctttttggagcctcaccagccaattcaatggcgtcctcttctactgtgcctctgggatttcactatgaaacaaagtatgttgttctcagctacttgggactcctctctcaagagaagctgcaagagcaacatctttcctcaccccaaggggttcaactagatatagcttcacaatctctggatcaagaaattttattaaaagttaaaactgaaattgaagaagagctaaaatctctggacaaagaaatttctgaagattttggtgcctctggttttgctacgacaaatgcttttggaattgacaagacgtggtcaagaacctttgagcgcactgctgcagtttggcgtgacatacctggaggactattcggcagagtacatcattcagcaaggtggctggggcactgtgtttagtcttgagtcagaggaggaggaataccctggaatcactgcagaagatagcaatgacatttacatcctgcccagcgacaactctggacaagtcagtcccccagagtctccaactgtgaccacttcctggcagtctgagagcttacctgtgtcactgtcagctagccagagttggcacacagaaagcctgccagtgtcactaggccctgagtcctggcagcagattgcaatggatcctgaagaagtgaaaagcttagacagcaacggagctggagagaagagtgagaacaactcctctaattctgacattgtgcacgtggagaaagaagaggtgcccgagggcatggaagaggctgctgtggcttctgtggtcttgccagcgcgggagctgcaagaggcacttcctgaagccccagctcccttgcttccacatatcactgccacctccctgctggggacaagggaacctgacacagaagtgatcacagttgagaaatccagccctgctacatctctgtttgtagaacttgatgaagaagaggtgaaagcagcaacaactgaacctactgaagtggaggaggtggtccccgcactggaacccacagaaacgctgctgagtgagaaggagataaacgcaagggaagagagccttgtggaagagctgtcccctgccagcgagaagaagcccgtgccgccgtctgagggcaagtctagactgtcccccgccggtgagatgaagcccatgccgctgtctgagggcaagtctatactgctgtttggaggggctgctgctgttgccatcctggcagtggccatcggggtagccctggctctgagaaagaaataggaggcttttcagaagagaaagacagaaggatgtaaggttggagttgtattggctggaatttgaacctccagcagctgtctggacatttgtggaacactctgggataattggggacttctgctcaacatggcagtggcatgttaggcatgttagggcttgaggtggggcattcacattcatctgactgtaaatcccaagggcctccgctcatgctaaattgagaatcttaggggtaaagcaccccctccaggaccgggtttctcagccttggcactagtgctgttctgaccattctctgtgttggggctgtcctgtgtgtggtgggctccacccactagatgccagtggcaccccctcccagagatgacaaacgaaaatgtctctagacattgccaaatgtcccgtgtgaacatcccctattgagacccactgctttagcgagagagggtttacttaggaagaattgggatagaaattcccagctgagagaacttagctgtgggctcctcagctactgacttcttagctcttaatccccttagaatttcatctttctcgatgagcaggctctgcacccactctttttttgccccccgccctcatcctggagtgtgagggtgctcgcccgtactctcagctgcctctcagggactgcactgttcctcttcacccccaggttcctgctaagatcccacgggcgagggcttgctctggactcagtctgtcaagtccccgaagcttcctgcagctccaccttgtaaaaatgctgcctttgggaatcttcgaaatatgtacacagagaaaatcacatgaaggagacctggggtccccacttgtgagtgcaactgcaagtaactctggctagagagacacatgtgtcttgtgtcaaggcaggaggataacctggatgaccttctgaggtctcttcagcccttttcgctagtggtcacccaccaccatggttacttgccagcaacatctctattgctggatggtccctgtctataaccttgggctagtatattttttccaatatgggaccttagtcttactactgatgagttctatgggtctcttgctagggggtaaggatttttattcttgggcttatagagccagttagatcataattcttatgaaatagagagtgtcctaaatatcactgaaataaaaagtaggaaaaagaagcttgaattttaagactgaggctgctctgcagattctagtttggctttcagagttcaagagtggtggcatcttcacctgaattcttcaatgccagggtaataaaccaaaatagtcctaatcagtatatgctagttgagcatcggcataattttctttcctctggctgatcccagccctaaaggaagggtagacccgtgtctttccagccctaaaggaagggtagacccgtgtctttccagccctaaaggaagggcagacccgtgtctttccatgcccgagggccacgacgtcactatgcagggcacacgtggcttggtttaaaaaggtcatcttagatttatcttagtaaatgtaataaattattttttagatcttgaaatttataataaaaatactttacctaccctgatcaccaaaacctgatgttttaaatgtgctttctttttgaaatttatgttttcaaataaaatctccctaaagcaatatttaaaaattgg

SEQ ID NO: 433066 - DNA, 3233 bp, Homo sapiens
acgaaggcacgccggggtgacctcaccctccaacatggcggcggcggtagattagggccgcgggtcggagcactcaccgccgctgggggaccctgtcggaagcaactgccgccgccgcctctttcatctcttctggggcaggggccagggccaggttttacacatccataagtagacctttttggagcctcaccagccaattcaatggcgtcctcttctactgtgcctctgggatttcactatgaaacaaagtatgttgttctcagctacttgggactcctctctcaagagaagctgcaagagcaacatctttcctcaccccaaggggttcaactagatatagcttcacaatctctggatcaagaaattttattaaaagttaaaactgaaattgaagaagagctaaaatctctggacaaagaaatttctgaagccttcaccagcacaggctttgaccgtcacacttctccagtgttcagccctgccaatccagaaagctcaatggaagactgcttggcccatcttggagaaaaagtgtcccaggaactgaaagagcctctccataaagcattgcaaatgctcctgagccagccagtgacatatcaggcatttcgggaatgtacactggagaccacagttcatgccagcggctggaataagattttggtgcctctggttttgctacgacaaatgcttttggaattgacaagacgtggtcaagaacctttgagcgcactgctgcagtttggcgtgacatacctggaggactattcggcagagtacatcattcagcaaggtggctggggcactgtgtttagtcttgagtcagaggaggaggaataccctggaatcactgcagaagatagcaatgacatttacatcctgcccagcgacaactctggacaagtcagtcccccagagtctccaactgtgaccacttcctggcagtctgagagcttacctgtgtcactgtcagctagccagagttggcacacagaaagcctgccagtgtcactaggccctgagtcctggcagcagattgcaatggatcctgaagaagtgaaaagcttagacagcaacggagctggagagaagagtgagaacaactcctctaattctgacattgtgcacgtggagaaagaagaggtgcccgagggcatggaagaggctgctgtggcttctgtggtcttgccagcgcgggagctgcaagaggcacttcctgaagccccagctcccttgcttccacatatcactgccacctccctgctggggacaagggaacctgacacagaagtgatcacagttgagaaatccagccctgctacatctctgtttgtagaacttgatgaagaagaggtgaaagcagcaacaactgaacctactgaagtggaggaggtggtccccgcactggaacccacagaaacgctgctgagtgagaaggagataaacgcaagggaagagagccttgtggaagagctgtcccctgccagcgagaagaagcccgtgccgccgtctgagggcaagtctagactgtcccccgccggtgagatgaagcccatgccgctgtctgagggcaagtctatactgctgtttggaggggctgctgctgttgccatcctggcagtggccatcggggtagccctggctctgagaaagaaataggaggcttttcagaagagaaagacagaaggatgtaaggttggagttgtattggctggaatttgaacctccagcagctgtctggacatttgtggaacactctgggataattggggacttctgctcaacatggcagtggcatgttaggcatgttagggcttgaggtggggcattcacattcatctgactgtaaatcccaagggcctccgctcatgctaaattgagaatcttaggggtaaagcaccccctccaggaccgggtttctcagccttggcactagtgctgttctgaccattctctgtgttggggctgtcctgtgtgtggtgggctccacccactagatgccagtggcaccccctcccagagatgacaaacgaaaatgtctctagacattgccaaatgtcccgtgtgaacatcccctattgagacccactgctttagcgagagagggtttacttaggaagaattgggatagaaattcccagctgagagaacttagctgtgggctcctcagctactgacttcttagctcttaatccccttagaatttcatctttctcgatgagcaggctctgcacccactctttttttgccccccgccctcatcctggagtgtgagggtgctcgcccgtactctcagctgcctctcagggactgcactgttcctcttcacccccaggttcctgctaagatcccacgggcgagggcttgctctggactcagtctgtcaagtccccgaagcttcctgcagctccaccttgtaaaaatgctgcctttgggaatcttcgaaatatgtacacagagaaaatcacatgaaggagacctggggtccccacttgtgagtgcaactgcaagtaactctggctagagagacacatgtgtcttgtgtcaaggcaggaggataacctggatgaccttctgaggtctcttcagcccttttcgctagtggtcacccaccaccatggttacttgccagcaacatctctattgctggatggtccctgtctataaccttgggctagtatattttttccaatatgggaccttagtcttactactgatgagttctatgggtctcttgctagggggtaaggatttttattcttgggcttatagagccagttagatcataattcttatgaaatagagagtgtcctaaatatcactgaaataaaaagtaggaaaaagaagcttgaattttaagactgaggctgctctgcagattctagtttggctttcagagttcaagagtggtggcatcttcacctgaattcttcaatgccagggtaataaaccaaaatagtcctaatcagtatatgctagttgagcatcggcataattttctttcctctggctgatcccagccctaaaggaagggtagacccgtgtctttccagccctaaaggaaggggcagacccgtgtctttccatgcccgagggccacgacgtcactatgcagggcacacgtggcttggtttaaaaaggtcatcttagatttatcttagtaaatgtaataaattattttttagatcttgaaatttataataaaaatactttacctaccctgatcacca

SEQ ID NO: 433067 - DNA, 4717 bp, Homo sapiens
aaaccccacagcctaattcctcctcaacctgggaaattcctatccccaatccttccctaaattaaacccctcctcctcgctaaagcagtgggtcctccaataggggatgttccacacgggacatttggccaatgtctagagacattttcgtttgtcatctctgggagggggtccactggcatctagtgggtggagcccaccacacacaggacagccccaacacagagaatggtcagaacagcactagtgccaaggctgagaaacccggtcctggagggggtgctttacccctaagattctcaatttagcatgagcggaggcccttgggatttacagtcagatgaatgtgaatgccccacctcaagccctaacatgcctaacatgccactgccatgttgagcagaagtccccaattatcccagagtgttccacaaatgtccagacagctgctggaggttcaaattccagccaatacaactccaaccttacaatccgtctgtctgtctcctggaaagggcagagcaagtccactgtgggcactgtgtttagtcttgagtcagaggaggaggaataccctggaatcactgcagaagatagcaatgacatttacatcctgcccagcgacaactctggacaagtcagtcccccagagtctccaactgtgaccacttcctggcagtctgagagcttacctgtgtcactgtcagctagccagagttggcacacagaaagcctgccagtgtcactaggccctgagtcctggcagcagattgcaatggatcctgaagaagtgtctgacattgtgcacgtggagaaagaagaggtgcccgagggcatggaagaggctgctgtggcttctgtggtcttgccagcgcgggagctgcaagaggcacttcctgaagccccagctcccttgcttccacatatcactgccacctccctgctggggacaagggaacctgacacagaagtgatcacagttgagaaatccagccctgctacatctctgtttgtagaacttgatgaagaagaggtgaaagcagcaacaactgaacctactgaagtggaggaggtggtccccgcactggaacccacagaaacgctgctgagtgagaaggagataaacgcaagggaagagagccttgtggaagagctgtcccctgccagcgagaagaagcccgtgccgccgtctgagggcaagtctagactgtcccccgccggtgagatgaagcccatgccgctgtctgagggcaagtctatactgctgtttggaggggctgctgctgttgccatcctggcagtggccatcggggtagccctggctctgagaaagaaataggaggcttttcagaagagaaagacagaaggatgtaaggttggagttgtattggctggaatttgaacctccagcagctgtctggacatttgtggaacactctgggataattggggacttctgctcaacatggcagtggcatgttaggcatgttagggcttgaggtggggcattcacattcatctgactgtaaatcccaagggcctccgctcatgctaaattgagaatcttaggggtaaagcaccccctccaggaccgggtttctcagccttggcactagtgctgttctgaccattctctgtgttggggctgtcctgtgtgtggtgggctccacccactagatgccagtggcaccccctcccagagatgacaaacgaaaatgtctctagacattgccaaatgtcccgtgtgaacatcccctattgagacccactgctttagcgagagagggtttacttaggaagaattgggatagaaattcccagctgagagaacttagctgtgggctcctcagctactgacttcttagctcttaatccccttagaatttcatctttctcgatgagcaggctctgcacccactctttttttgccccccgccctcatcctggagtgtgagggtgctcgcccgtactctcagctgcctctcagggactgcactgttcctcttcacccccaggttcctgctaagatcccacgggcgagggcttgctctggactcagtctgtcaagtccccgaagcttcctgcagctccaccttgtaaaaatgctgcctttgggaatcttcgaaatatgtacacagagaaaatcacatgaaggagacctggggtccccacttgtgagtgcaactgcaagtaactctggctagagagacacatgtgtcttgtgtcaaggcaggaggataacctggatgaccttctgaggtctcttcagcccttttcgctagtggtcacccaccaccatggttacttgccagcaacatctctattgctggatggtccctgtctataaccttgggctagtatattttttccaatatgggaccttagtcttactactgatgagttctatgggtctcttgctagggggtaaggatttttattcttgggcttatagagccagttagatcataattcttatgaaatagagagtgtcctaaatatcactgaaataaaaagtaggaaaaagaagcttgaattttaagactgaggctgctctgcagattctagtttggctttcagagttcaagagtggtggcatcttcacctgaattcttcaatgccagggtaataaaccaaaatagtcctaatcagtatatgctagttgagcatcggcataattttctttcctctggctgatcccagccctaaaggaagggtagacccgtgtctttccagccctaaaggaagggtagacccgtgtctttccagccctaaaggaagggcagacccgtgtctttccatgcccgagggccacgacgtcactatgcagggcacacgtggcttggtttaaaaaggtcatcttagatttatcttagtaaatgtaataaattattttttagatcttgaaatttataataaaaatactttacctaccctgatcaccaaaacctgatgttttaaatgtgctttctttttgaaatttatgttttcaaataaaatctccctaaagcaatatttaaaaattggtcaaaacaaggtctgggagtatgtttgtgtgtctttccagctttatcctgtagcgtgtctttgttctgtgttttagtgtcccatttagggagtgatgttttaagggtttttgtgtacttggattaagtaattagaggtgagtggggggaatgggattattgaggcaatgatttttttcttcatgggctctgatagttgcattgattgttctgtattctaattgctatatttgtgtttgcataggtgaagagcaaactggtgcgttatcttgatttttaaaaagtaataaatcctatgagttccagtattaacacttgccagttctggatcctcacacccattggctgagcgcattcaagcaccaatcgaagccaggttcatctctgagctgctgaaaggaggtgtgaggcttaggaaattggagcctgtgttgcccacgaaaggaaagaataaggaagaaatgtggtatggaagcggctacttgctgctttattttcccacctgttagacattcctccacagtgatttggccagttgtatttcacggtaatggaactagatagtgttttccattggctttctctggtagctcttggtcagctcctgagttaacaggatgtggcagcatccctgttcttccttcacgtcctcaccctctgcctccagcagtggaagggaacagccctcatgaggactgcttcctactgcagctcctgctttttgctcatacatttaaaaaactatttctcaagcttcccctccttttggggggaggagctgatagtaggaggccattccttccacctccaacttataccctctaagtctaaggtgaaggaaagattcagaataaatccaacttgtttatagaaaagttcttgttagtccttagacctcatctcaactgctctgttgaaggtaatgatttattgggggggaaaaaacaacgccaatttatcctctctgtattaaagtgataattctgggcccacagaaatcagtcagtacctgcggtgtgccttaaggggactctcatgatcatcattcccttctagagaacattctagatgaagaaatgcaactgttgaccttctggttcacccatctccccctcgaggcattcttgataccccttctcacctgcatttctgtcccagggataccagatgcagccactacctaactaggcttgtcctgggggagtgagccgtgaacctggagacatggctttgacccacagctactgttcatttcctcaggctttgcgctgattccctcaataatatgacagtaaggcaagtagtctccttgcctttctcctgaaaggtatgagatgtggacatttcagtgtttgaattattttaagagatgttttatagaaataaaacgttttgtagctaagaattttccctttctcttaatttcttacatctttccacacaaacttatctttccaagaatttgaggtggtgatcatacccatcaagacggccttgtaggctatctgattgctaacagacacgacctagagcttctgcccaaattcccacacaagcattatctcgtttaacatctcagcgacatactggataccagaataatgtttcctcttctctggtgcaccaaaacctgcccttagtgataatctctcaattatgacattcatttgagtttagggtgtataatttttcct

SEQ ID NO: 433068 - DNA, 1400 bp, Homo sapiens
acgaaggcacgccggggtgacctcaccctccaacatggcggcggcggtagattagggccgcgggtcggagcactcaccgccgctgggggaccctgtcggaagcaactgccgccgccgcctctttcatctcttctggggcaggggccagggccaggttttacacatccataagtagacctttttggagcctcaccagccaattcaatggcgtcctcttctactgtgcctctgggatttcactatgaaacaaagtatgttgttctcagctacttgggactcctctctcaagagaagctgcaagagcaacatctttcctcaccccaaggggttcaactagatatagcttcacaatctctggatcaagaaattttattaaaagttaaaactgaaattgaagaagagctaaaatctctggacaaagaaatttctgaagccttcaccagcacaggctttgaccgtcacacttctccagtgttcagccctgccaatccagaaagctcaatggaagactgcttggcccatcttggagaaaaagtgtcccaggaactgaaagagcctctccataaagcattgcaaatgctcctgagccagccagtgacatatcaggcatttcgggaatgtacactggagaccacagttcatgccagcggctggaataagattttggtgcctctggttttgctacgacaaatgcttttggaattgacaagacgtggtcaagaacctttgagcgcactgctgcagtttggcgtgacatacctggaggactattcggcagagtacatcattcagcaaggtggctgggtatgagctgttatatattaaaaatattttcttgaaaaaaaattaggtttgttgtttttcttaagagatgggttcttgctgtgttacccgggctggagtgcagtgtctaattgctggcactatcatggcaggcttcggtctcaaactcctgggctcaagtgatcctgcctcaggtcctgaatagccaagagcacaggctgggactataggtgcccaccactgtgccgtgctctatcccgtactttttgatatgtaattattattattattcagttggttcagttgtttataaattttccttatatgttctttgacccttgaattacttagaaatgtattttttaatttctaaatacttacaggtttaaaaattttgttttcaattactaatttaattctgtttcatcagaaagcacgaccatcgtggcattgaaacttgagttatagcctactatcatgatcaatttaaaaaatatatatatagggctgggtgcagtggtgcacatctgtaatcccagtgctttgggaggctgaggtggggtgaatcacctggaggtccggaggttcaagaccagcctggtcaatgtgaaaaaccc

SEQ ID NO: 433069 - DNA, 1221 bp, Homo sapiens
acgaaggcacgccggggtgacctcaccctccaacatggcggcggcggtagattagggccgcgggtcggagcactcaccgccgctgggggaccctgtcggaagcaactgccgccgccgcctctttcatctcttctggggcaggggccagggccaggttttacacatccataagtagacctttttggagcctcaccagccaattcaatggcgtcctcttctactgtgcctctgggatttcactatgaaacaaagtatgttgttctcagctacttgggactcctctctcaagagaagctgcaagagcaacatctttcctcaccccaaggggttcaactagatatagcttcacaatctctggatcaagaaattttattaaaagttaaaactgaaattgaagaagagctaaaatctctggacaaagaaatttctgaagccttcaccagcacaggctttgaccgtcacacttctccagtgttcagccctgccaatccagaaagctcaatggaagactgcttggcccatcttggagaaaaagtgtcccaggaactgaaagagcctctccataaagcattgcaaatgctcctgagccaattttggtgcctctggttttgctacgacaaatgcttttggaattgacaagacgtggtcaagaacctttgagcgcactgctgcagtttggcgtgacatacctggaggactattcggcagagtacatcattcagcaaggtggctggggcactgtgtttagtcttgagtcagaggaggaggaataccctggaatcactgcagaagatagcaatgacatttacatcctgcccagcgacaactctggacaagtcagtcccccagagtctccaactgtgaccacttcctggcagtctgagagcttacctgtgtcactgtcagctagccagagttggcacacagaaagcctgccagtgtcactaggccctgagtcctggcagcagattgcaatggatcctgaagaagtgaaaagcttagacagcaacggagctggagagaagagtgagaacaactcctctaattctgacattgtgcacgtggagaaagaagaggtgcccgagggccacgacgtcactatgcagggcacacgtggcttggtttaaaaaggtcatcttagatttatcttagtaaatgtaataaattattttttagatcttgaaatttataataaaaatactttacctaccctgatcacca

SEQ ID NO: 433070 - DNA, 578 bp, Homo sapiens
ttaatttttcttgcgcacatatagaaatgaatagaaatattcccatttcaatatgcaaattcagccactatatagtttgtttctttttggtagctaataataataaatttttaagtaagatctgattttgaaatatgaaaagaagtttatcctttcctgttttaataccacctgatacccgtttaacttactgtgtttgattcttggggacatttatgttcaaggttctgtcaaagcaatctattattcttgtttttacctgatggatcatggagaaaaataatggattcagttatgagaaacagtaatagatttttttaactgccataaatttctctccctgtattaaataaaaggatcaggaaaagataagttgaattttcctacaatgagccagctcttcttaaatttacctcccataaattgtagcaaagcacttttcatataatgttttatttatgtaattcagttatttggagatggtggtgagggatgtgagtacatcatttcatgttgtatttcaaatctcttttgacagaaaccctaagaatttgcaataaagaaaattcaatgttcca

SEQ ID NO: 433071 - DNA, 1247 bp, Homo sapiens
gcacccgcgctcggggctggcggctcctccccgcccggccgggcccagcagcccctaggagcccagcgccgccgccatgtcctccggggctagcgcgagcgccctgcagcgcttggtagagcagctcaagttggaggctggcgtggagaggatcaaggtctctcaggcagctgcagagcttcaacagtactgtatgcagaatgcctgcaaggatgccctgctggtgggtgttccagctggaagtaaccccttccgggagcctagatcctgtgctttactctgaagactctaggagagaagtttgctgaggaatgccttcaagcacaaagtgatgaatgactgccttcaagtctcaagaaaacacttttccctaacttttagagatatttcagccctttcctgtggcctggtcctatagccaaaatcacagatattcatgagtttctacttgagtgagaaaactgggtgaaggaatagaattttaaatagtaataactgcttgttttttttgtgcaagtacttttatacataagataaacaaaaaccttaccaccaaacataccaaaatgcacctctttcataagtgagttactaagatttctatacctggaatatcatgtatgtttcatttactggatgtttacattttaggaaggaaaatagttctgtttatttaaacaactgaatacttataaactgttgttcctggaagttatttattccataaaaaatttgttcttttctcatgaatttataattcctaaatgaagaccagaaagtacaaattgctgggaggaagaataggctttattaatcaactgatgtcttgatttttctaaatgggaagattgctttatttttaacactaattatgggagcagattcttagcaaacttctttggaaaagttaatgttatgatgtgcattaggctgccccatcgtgtatataaatgaagcagatttgatttttgtattcttacgtttctctgctttgtagttgtggctgtacttaaagaaatacagaatttcatatatttaaaaatgtttaaaatgtgacccacagaacattgtaaatgattaaaaactaacatgaaaatattacaacctaaaagaattcttaacttcacaagtgttttacttcgacgatgtgcctttgatttaatttgggacacttttttagaaggatacattattcgtgtttgcaacggtctttgaagagcttggaaataaaatttctgcttaattaa

SEQ ID NO: 433072 - DNA, 1108 bp, Homo sapiens
gcacccgcgctcggggctggcggctcctccccgcccggccgggcccagcagcccctaggagcccagcgccgccgccatgtcctccggggctagcgcgagcgccctgcagcgcttggtagagcagctcaagttggaggctggcgtggagaggatcaaggtctctcaggcagctgcagagcttcaacagtactgtatgcagaatgcctgcaaggatgccctgctggtgggtgttccagctggaagtaaccccttccgggagcctagatcctgtgctttactctgaagactctaggagagaagtttgctgaggaatgccttcaagcacaaagtgatgaatgactgccttcaagtctcaagaaaacacttttccctaacttttagagatatttcagccctttcctgtggcctggtcctatagccaaaatcacagatattcatgagtttctacttgagtgagaaaactgggtgaaggaatagaattttaaatagtaataactgcttgttttttttgtgcaagtacttttatacataagataaacaaaaaccttaccaccaaacataccaaaatgcacctctttcataagtgagttactaagatttctatacctggaatatcatgtatgtttcatttactggatgtttacattttaggaaggaaaatagttctgtttatttaaacaactgaatacttataaactgttgttcctggaagttatttattccataaaaaatttgttcttttctcatgaatttataattcctaaatgaagaccagaaagtacaaattgctgggaggaagaataggctttattaatcaactgatgtcttgatttttctaaatgggaagattgctttatttttaacactaattatgggagcagattcttagcaaacttctttggaaaagttaatgttatgatgtgcattaggctgccccatcgtgtatataaatgaagcagatttgatttttgtattcttacgtttctctgctttgtagttgtggctgtacttaaagaaatacagaatttcatatatttaaaaatgtttaaaatgtgacccacagaacattgtaaatgattaaaaactaacatgaaaatattacaaccta

SEQ ID NO: 433073 - DNA, 1452 bp, Homo sapiens
tggcagagccgccagcgaggctggggatgggggcgccgctgctctctcccggctggggagccggggctgccggccggcgctggtggatgctgctggcgcccctgctgccggcgctgctgctggtgcggcccgcgggggccctggtggaggggctctactgcggcacgcgggactgctacgaggtgctgggcgtgagccgctcggcgggcaaggcggagatcgcgcgggcctaccgccagctggcccggcgctaccaccctgaccgctaccggccccagcccggagacgagggccccgggcggacgccgcagagcgccgaggaggctttcctgctggtggcaaccgcctacgagacactcaaggtctctcaggcagctgcagagcttcaacagtactgtatgcagaatgcctgcaaggatgccctgctggtgggtgttccagctggaagtaaccccttccgggagcctagatcctgtgctttactctgaagactctaggagagaagtttgctgaggaatgccttcaagcacaaagtgatgaatgactgccttcaagtctcaagaaaacacttttccctaacttttagagatatttcagccctttcctgtggcctggtcctatagccaaaatcacagatattcatgagtttctacttgagtgagaaaactgggtgaaggaatagaattttaaatagtaataactgcttgttttttttgtgcaagtacttttatacataagataaacaaaaaccttaccaccaaacataccaaaatgcacctctttcataagtgagttactaagatttctatacctggaatatcatgtatgtttcatttactggatgtttacattttaggaaggaaaatagttctgtttatttaaacaactgaatacttataaactgttgttcctggaagttatttattccataaaaaatttgttcttttctcatgaatttataattcctaaatgaagaccagaaagtacaaattgctgggaggaagaataggctttattaatcaactgatgtcttgatttttctaaatgggaagattgctttatttttaacactaattatgggagcagattcttagcaaacttctttggaaaagttaatgttatgatgtgcattaggctgccccatcgtgtatataaatgaagcagatttgatttttgtattcttacgtttctctgctttgtagttgtggctgtacttaaagaaatacagaatttcatatatttaaaaatgtttaaaatgtgacccacagaacattgtaaatgattaaaaactaacatgaaaatattacaacctaaaagaattcttaacttcacaagtgttttacttcgacgatgtgcctttgatttaatttgggacacttttttagaaggatacattattcgtgtttgcaacggtctttgaagagcttggaaataaaatttctgcttaattaa

SEQ ID NO: 433074 - DNA, 971 bp, Homo sapiens
  misc_feature (792)..(792): n is a, c, g, or t
  misc_feature (798)..(798): n is a, c, g, or t
  misc_feature (802)..(802): n is a, c, g, or t
  misc_feature (811)..(811): n is a, c, g, or t
gcacccgcgctcggggctggcggctcctccccgcccggccgggcccagcagcccctaggagcccagcgccgccgccatgtcctccggggctagcgcgagcgccctgcagcgcttggtagagcagctcaagttggaggctggcgtggagaggatcaaggtctctcaggcagctgcagagcttcaacagtactgtatgcagaatgcctgcaaggatgccctgctggtgggtgttccagctggaagtaaccccttccgggagcctagatcctgtgctttactctgaagactctaggagagaagtttgctgaggaatgccttcaagcacaaagtgatgaatgactgccttcaagtctcaagaaaacacttttccctaacttttagagatatttcagccctttcctgtggcctggtcctatagccaaaatcacagatattcatgagtttctacttgagtgagaaaactgggtgaaggaatagaattttaaatagtaataactgcttgttttttttgtgcaagtacttttatacataagataaacaaaaaccttaccaccaaacataccaaaatgcacctctttcataagtgagttactaagatttctatacctggaatatcatgtatgtttcatttactggatgtttacattttaggaaggaaaatagttctgtttatttaaacaactgaatacttataaactgttgttcctggaagttatttattccataaaaaatttgttcttttctcatgaatttataattcctaaatgaagaccagaaagtacattggggggnagaaangggntttaaacanggggtggttctaaagagagaaagcgtgttttaaccaaattgggggggctttcacctgggaggattgttgtgtgtttggcgccacggtatataagaggagtgttactcttgggcggggagaacaatatataatggcggcgagaaaacgaacatttgtgcgg

SEQ ID NO: 433075 - DNA, 1498 bp, Homo sapiens
tatacaggttgttctttcatgtttaacactgaatgttaaaatggtaaattgcaaataaataaataaataaataaataaaatgcttaattgtttagtattttaggtgaatggttatcaatacattcactggaaactttttacctaacattatgttagaaaaatgtaaatatgccataaagctaatggcaaatgttcctctttggattgtgaagtcatctagttatttatacttacaggtctacaagcaagaacaagaggaagaattaaagaaaaagttggcaaatgaccccagatggaagagatacaggagatggatgaagaatgaagggcctgggcggttaacatttgtggatgactgaagattgatggaatgctactatgccaaaccttaattgtgatattattttcataactgaattattttagaaatgtatcaattgactgctgctcagcagtaactaaaattcctcaagtatttgattaaacagaataatgtcaaaatttaaaccttcccttaaaactttatacataagacatttatgattgttcaatttttataatctatttgtggattttgttaaaagatttcacatgaagatttattagttgccatttaaaatttttatatgtttagttaaaagatttgacatgaaaatttattagataccatttaaaaattttatgtgttatgtgtttattctttgagaatgttaccttactgtttgtaatagtgctacatttttctgctttcatggcctctgtattttcacaaaacaccaaaaacagcatttaattatattatcatgagtgtgtttctggacacaaacttctgcagtagaatgacctaacatgtcgttttcattgcagtcattataggattgaaatacgttcaaaataacctctctaggaaagtcttctgctagaatttctcccctctattcattataatattctttgtttttaaagccagtcaaatataatagtcttaataagatcagaaactctccaggagagtgagtctaccctcacgtccttgtaggatgatcttgattatagtcttattataggactataactgtattctcaacatttctccagaaaggaccttgtaaaaaggtcttttgtaccacagtattggttttttcccctctctcttcacttaaaaaaaaaaatagcaaggcagaaatagtgtattgaaaagttgttcatctattatgaagtccttgagtggtgaaaaatccgttgtacatgagaacatttctatgcatttaagccagaaacgaggtacatggctgtgtgctcttctgtcaaccaatgaaatgtgttttcacatgtgtggcagtgcaagtaaataacacattatttgactgaatcaggcatgatactgcaccaaagtgttggtacatattcacggtagtaaatcagtacccctgttaaaggatttatcccattgcttcatattaataaaatggttacaatatatcacaaaaaaaaaata

SEQ ID NO: 433076 - DNA, 893 bp, Homo sapiens
tcagaggatccccctgatattctggttagttaaaagatttgacatgaaaatttattagataccatttaaaaattttatgtgttatgtgtttattctttgagaatgttaccttactgtttgtaatagtgctacatttttctgctttcatggcctctgtattttcacaaaacaccaaaaacagcatttaattatattatcatgagtgtgtttctggacacaaacttctgcagtagaatgacctaacatgtcgttttcattgcagtcattataggattgaaatacgttcaaaataacctctctaggaaagtcttctgctagaatttctcccctctattcattataatattctttgtttttaaagccagtcaaatataatagtcttaataagatcagaaactctccaggagagtgagtctaccctcacgtccttgtaggatgatcttgattatagtcttattataggactataactgtattctcaacatttctccagaaaggaccttgtaaaaaggtcttttgtaccacagtattggttttttcccctctctcttcacttaaaaaaaaaaatagcaaggcagaaatagtgtattgaaaagttgttcatctattatgaagtccttgagtggtgaaaaatccgttgtacatgagaacatttctatgcatttaagccagaaacgaggtacatggctgtgtgctcttctgtcaaccaatgaaatgtgttttcacatgtgtggcagtgcaagtaaataacacattatttgactgaatcaggcatgatactgcaccaaagtgttggtacatattcacggtagtaaatcagtacccctgttaaaggatttatcccattgcttcatattaataaaatggttacaatatatcacaaaaaaaaaata

SEQ ID NO: 433077 - DNA, 1006 bp, Homo sapiens
  misc_feature (547)..(548): n is a, c, g, or t
  misc_feature (554)..(554): n is a, c, g, or t
  misc_feature (560)..(560): n is a, c, g, or t
  misc_feature (577)..(577): n is a, c, g, or t
  misc_feature (581)..(581): n is a, c, g, or t
  misc_feature (585)..(585): n is a, c, g, or t
  misc_feature (598)..(599): n is a, c, g, or t
  misc_feature (602)..(602): n is a, c, g, or t
  misc_feature (604)..(604): n is a, c, g, or t
  misc_feature (607)..(608): n is a, c, g, or t
  misc_feature (613)..(613): n is a, c, g, or t
  misc_feature (615)..(615): n is a, c, g, or t
  misc_feature (618)..(618): n is a, c, g, or t
  misc_feature (620)..(620): n is a, c, g, or t
  misc_feature (622)..(622): n is a, c, g, or t
  misc_feature (624)..(624): n is a, c, g, or t
  misc_feature (626)..(626): n is a, c, g, or t
  misc_feature (630)..(630): n is a, c, g, or t
  misc_feature (633)..(633): n is a, c, g, or t
  misc_feature (641)..(641): n is a, c, g, or t
  misc_feature (661)..(661): n is a, c, g, or t
  misc_feature (669)..(669): n is a, c, g, or t
  misc_feature (690)..(691): n is a, c, g, or t
  misc_feature (697)..(697): n is a, c, g, or t
  misc_feature (706)..(707): n is a, c, g, or t
  misc_feature (717)..(717): n is a, c, g, or t
  misc_feature (720)..(720): n is a, c, g, or t
  misc_feature (728)..(728): n is a, c, g, or t
  misc_feature (738)..(738): n is a, c, g, or t
  misc_feature (743)..(743): n is a, c, g, or t
  misc_feature (745)..(745): n is a, c, g, or t
  misc_feature (762)..(762): n is a, c, g, or t
  misc_feature (771)..(771): n is a, c, g, or t
  misc_feature (774)..(774): n is a, c, g, or t
  misc_feature (782)..(782): n is a, c, g, or t
  misc_feature (784)..(784): n is a, c, g, or t
  misc_feature (790)..(791): n is a, c, g, or t
  misc_feature (799)..(799): n is a, c, g, or t
  misc_feature (802)..(802): n is a, c, g, or t
  misc_feature (805)..(805): n is a, c, g, or t
  misc_feature (816)..(816): n is a, c, g, or t
  misc_feature (847)..(847): n is a, c, g, or t
  misc_feature (862)..(862): n is a, c, g, or t
  misc_feature (868)..(869): n is a, c, g, or t
  misc_feature (872)..(873): n is a, c, g, or t
  misc_feature (881)..(881): n is a, c, g, or t
  misc_feature (896)..(896): n is a, c, g, or t
  misc_feature (924)..(924): n is a, c, g, or t
  misc_feature (944)..(944): n is a, c, g, or t
  misc_feature (1001)..(1001): n is a, c, g, or t
gcacccgcgctcggggctggcggctcctccccgcccggccgggcccagcagcccctaggagcccagcgccgccgccatgtcctccggggctagcgcgagcgccctgcagcgcttggtagagcagctcaagttggaggctggcgtggagaggatcaaggtctctcaggcagctgcagagcttcaacagtactgtatgcagaatgcctgcaaggatgccctgctggtgggtgttccagctggaagtaaccccttccgggagcctagatcctgtgctttactctgaagactctaggagagaagtttgctgaggaatgccttcaagcacaaagtgatgaatgactgccttcaagtctcaagaaaacacttttccctaacttttagagatatttcagccctttcctgtggcctggtcctatagccaaaatcacagatattcatgagtttctacttgagtgagaaaactgggtgaaggaatagaattttaaatagtaataactgcttgttttttttgtgcaagtacttttatacataagataaacaaaaaaannaaaaanaaaaanaaaaaaagcaaaatatngaanaacncactgaagatctnntananaannccaanancancnancngnaatngangccagcgngacaggggaccaaccaaaanacggcgcnggagggaaacaacgcaagacnnagaaangcggcggcnnccaacggagngangacagaanaaagggcggnggggngnagcaagggagaaggccnaaagcaacnccncaaacgananatgccnnggaggaanaanagncgggaggaatnaaaagcagcgaggcagggggagaaagcccancaggcagggaggggnaaatannagnngcccacancaggaggagcaaaangagggctcaaatcggaagcggagcagcncatgaccagcaaatgacgcnatagaaagcatcacagggcaggggcgagatgaacggcgcgccggtcacgctgccgcncggaa

SEQ ID NO: 433078 - DNA, 1501 bp, Homo sapiens
gcacccgcgctcggggctggcggctcctccccgcccggccgggcccagcagcccctaggagcccagcgccgccgccatgtcctccggggctagcgcgagcgccctgcagcgcttggtagagcagctcaagttggaggctggcgtggagaggatcaaggtctctcaggcagctgcagagcttcaacagtactgtatgcagaatgcctgcaaggatgccctgctggtgggtgttccagctggaagtaaccccttccgggagcctagatcctgtgctttactctgaagactctaggagagaagtttgctgaggaatgccttcaagcacaaagtgatgaatgactgccttcaagtctcaagaaaacacttttccctaacttttagagatatttcagccctttcctgtggcctggtcctatagccaaaatcacagatattcatgagtttctacttgagtgagaaaactgggtgaaggaatagaattttaaatagtaataactgcttgttttttttgtgcaagtacttttatacataagataaacaaaaaccttaccaccaaacataccaaaatgcacctctttcataagtgagttactaagatttctatacctggaatatcatgtatgtttcatttactggatgtttacattttaggaaggaaaatagttctgtttatttaaacaactgaatacttataaactgttgttcctggaagttatttattccataaaaaatttgttcttttctcatgaatttataattcctaaatgaagaccagaaagtacaaattgctgggaggaagaataggctttattaatcaactgatgtcttgatttttctaaatgggaagattgctttatttttaacactaattatgggagcagattcttagcaaacttctttggaaaagttaatgttatgatgtgcattaggctgccccatcgtgtatataaatgaagcagatttgatttttgtattcttacgtttctctgctttgtagttgtggctgtacttaaagaaatacagaatttcatatatttaaaaatgtttaaaatgtgacccacagaacattgtaaatgattaaaaactaacatgaaaatattacaacctaaaagaattcttaacttcacaagtgttttacttcgacgatgtgcctttgatttaatttgggacacttttttagaaggatacattattcgtgtttgcaacggtctttgaagagcttggaaataaaatttctgcttaattaatcatttttctatgacagcaaaaaaaaaggaaacaaaagaaaaaaaaaaaaatttgtgggggcgcccgggcacgaaaaagtcttcaaaaacccacttccggtgggcgcggggcccaggtgtgtatgtgaccttgggcataacggggtccaaagagaacaccgggccagagacatgtgtggtttctccccaaaaaaaacccggggcaccgggtgttgacaacccaggggggtcgggctacggtacacagggccgcg

SEQ ID NO: 433079 - DNA, 1141 bp, Homo sapiens
ggacgcgtgggtcgacccacgcgtcgggaggctggcgtggagaggatcaaggtctctcaggcagctgcagagcttcaacagtactgtatgcagaatgcctgcaaggatgccctgctggtgggtgttccagctggaagtaaccccttccgggagcctagatcctgtgctttactctgaagactctaggagagaagtttgctgaggaatgccttcaagcacaaagtgatgaatgactgccttcaagtctcaagaaaacacttttccctaacttttagagatatttcagccctttcctgtggcctggtcctatagccaaaatcacagatattcatgagtttctacttgagtgagaaaactgggtgaaggaatagaattttaaatagtaataactgcttgttttttttgtgcaagtacttttatacataagataaacaaaaaccttaccaccaaacataccaaaatgcacctctttcataagtgagttactaagatttctatacctggaatatcatgtatgtttcatttactggatgtttacattttaggaaggaaaatagttctgtttatttaaacaactgaatacttataaactgttgttcctggaagttatttattccataaaaaatttgttcttttctcatgaatttataattcctaaatgaagaccagaaagtacaaattgctgggaggaagaataggctttattaatcaactgatgtcttgatttttctaaatgggaagattgctttatttttaacactaattatgggagcagattcttagcaaacttctttggaaaagttaatgttatgatgtgcattaggctgccccatcgtgtatataaatgaagcagatttgatttttgtattcttacgtttctctgctttgtagttgtggctgtacttaaagaaatacagaatttcatatatttaaaaatgtttaaaatgtgacccacagaacattgtaaatgattaaaaactaacatgaaaatattacaacctaaaagaattcttaacttcacaagtgttttacttcgacgatgtgcctttgatttaatttgggacacttttttagaaggatacattattcgtgtttgcaacggtctttgaagagcttggaaataaaatttctgcttaattaa

SEQ ID NO: 433080 - DNA, 1073 bp, Homo sapiens
  misc_feature (4)..(4): n is a, c, g, or t
  misc_feature (76)..(76): n is a, c, g, or t
  misc_feature (79)..(79): n is a, c, g, or t
  misc_feature (82)..(82): n is a, c, g, or t
  misc_feature (84)..(84): n is a, c, g, or t
  misc_feature (92)..(92): n is a, c, g, or t
  misc_feature (94)..(94): n is a, c, g, or t
  misc_feature (105)..(105): n is a, c, g, or t
  misc_feature (113)..(113): n is a, c, g, or t
gttnagttttcagcgctgaggctcacagacttatgcaaatcccgcaagatgcctgctgtggtgtccagctgaagtnacnctncnggagcctngncctgtgcttantctgagantctaggagagaagtttgctgaggaatgccttcaagcacaaagtgatgaatgactgccttcaagtctcaagaaaacacttttccctaacttttagagatatttcagccctttcctgtggcctggtcctatagccaaaatcacagatattcatgagtttctacttgagtgagaaaactgggtgaaggaatagaattttaaatagtaataactgcttgttttttttgtgcaagtacttttatacataagataaacaaaaaccttaccaccaaacataccaaaatgcacctctttcataagtgagttactaagatttctatacctggaatatcatgtatgtttcatttactggatgtttacattttaggaaggaaaatagttctgtttatttaaacaactgaatacttataaactgttgttcctggaagttatttattccataaaaaatttgttcttttctcatgaatttataattcctaaatgaagaccagaaagtacaaattgctgggaggaagaataggctttattaatcaactgatgtcttgatttttctaaatgggaagattgctttatttttaacactaattatgggagcagattcttagcaaacttctttggaaaagttaatgttatgatgtgcattaggctgccccatcgtgtatataaatgaagcagatttgatttttgtattcttacgtttctctgctttgtagttgtggctgtacttaaagaaatacagaatttcatatatttaaaaatgtttaaaatgtgacccacagaacattgtaaatgattaaaaactaacatgaaaatattacaacctaaaagaattcttaacttcacaagtgttttacttcgacgatgtgcctttgatttaatttgggacacttttttagaaggatacattattcgtgtttgcaacggtctttgaagagcttggaaataaaatttctgcttaattaa

SEQ ID NO: 433081 - DNA, 764 bp, Homo sapiens
ttagctaataaaatattcagtacaaatatatgtttggatttatgcattaaaaaactaataaaattatttccaactttaaaaaaaaaaaaaaaaaagcattgcggccgcaatgatttttctaaatgggaagattgctttatttttaacactaattatgggagcagattcttagcaaacttctttggaaaagttaatgttatgatgtgcattaggctgccccatcgtgtatataaatgaagcagatttgatttttgtattcttacgtttctctgctttgtagttgtggctgtacttaaagaaatacagaatttcatatatttaaaaatgtttaaaatgtgacccacagaacattgtaaatgattaaaaactaacatgaaaatattacaacctaaaagaattcttaacttcacaagtgttttacttcgacgatgtgcctttgatttaatttgggacacttttttagaaggatacattattcgtgtttgcaacggtctttgaagagcttggaaataaaatttctgcttaattaatcatttttctatgacagcaatattttgtgtctgattttgtattaaggactcaaggatttctgtttgcctgtgagattgagtgctggaatgagagagtgaaattgttgtttttaagtctttgtagaattttgcaaatgtcctgaaaaatagataactgtataacatgaagaaaatatctctattaatggcaacatttgttctctgaaatagctatatataaactcataaataaac

SEQ ID NO: 433082 - DNA, 1900 bp, Homo sapiens
tggcagagccgccagcgaggctggggatgggggcgccgctgctctctcccggctggggagccggggctgccggccggcgctggtggatgctgctggcgcccctgctgccggcgctgctgctggtgcggcccgcgggggccctggtggaggggctctactgcggcacgcgggactgctacgaggtgctgggcgtgagccgctcggcgggcaaggcggagatcgcgcgggcctaccgccagctggcccggcgctaccaccctgaccgctaccggccccagcccggagacgagggccccgggcggacgccgcagagcgccgaggaggctttcctgctggtggcaaccgcctacgagacactcaagtcctcctgcatatgcccaagaggattgggagtggaatggacaccagcagaagcaccacagttattcctgtagagattagaaacaaggagcttattgccctgcttgtcaaggctcaggacagacaggaggaagaaacaagtataaaggttttggttttggaaagaagttggaatctccagaccctgggaccttaagatccacaaaattgctgaaagaaaaagtactaccttattgaaaggatgaagaaacacgaaaagattatgattacatgctggatcatccagaagagtactacagccattactaccactactatagcaggcgcttggcccctaaggtggatgttagagtagtgattttggtcagcgtgtgtgctatttcggtgtttcagtttttcagctggtggaatagctacaataaggcaatcagctacctagccacagtgcccaagtaccgtatccaagctacagagattgccaagcagcagggactgctcaaaaaagccaaagaaaaaggcaaaaacaaaaagtccaaagaagaaattcgtgacgaggaggagaacatcataaagaacattataaaaagtaaaatagatataaaggggggctatcagaaaccccaaatctgtgatcttctcctgtttcaaattatcttagctccttttcacctatgctcatatatagtttggtattgtcggtggatctataattttaacatcaaaggcaaagaatatggagaggaagagagattatacattatacgtaaatctatgaagatgtcaaagtctcaatttgatagtctagaagatcatcagaaagaaacttttcttaaacgagagctctggatcaaggagaattatgaggtgagtagtcaccctgctgtgatttaagtgtcatccacctgaccaagttaaaatcaggtgtattataatgagggatcacagaagtgtgctcacatttctgaaatcctagagttaaacaattagtaaagaccttttattgaaagtaggactctatttggtagtgagacggtgggtttttaacctgtaatttctctttttagaggatgaacttcaaatactttaatcaacaaattatgaaaacgttttaagaatgttaaactgcattggaatgatatgcatgtttgcaagggtgttacaacaacttttgggtaactgcactaaaatttggcccttcccaagttttcttccaatactgtaaacctagccacagagacttaaaaaaaaaaaaaaacaacagagtaagacgtggaaattttgttgagatgacttcatttcaaaataattgagcacaagatattctgcgtaataactgacatctatagaaagttacttttgttttacttttaaattaaatcgaattactgtaatgcctctaaactttcaggcattttaataaatgctttatgctacagttgtcacctacaaaaattacttcgaggtgatccgctacctagccatcatgttaaagggattagcagtctcattatcataatgacactgttttagattcaggata

SEQ ID NO: 433083 - DNA, 766 bp, Homo sapiens
ctaaattgacgttcatggaaattgtaaccttttctctttgtagttcaagtattagaactttcagcagaaagagacttttggaggtcacaaaaagttgatatttaccaagttggatgatcgttttcagaatatccttgactgccgggtggcttggctgtgagcagggtgccatgttgctgtccctttgtttcaggtctctcaggcagctgcagagcttcaacagtactgtatgcagaatgcctgcaaggatgccctgctggtgggtgttccagctggaagtaaccccttccgggagcctagatcctgtgctttactctgaagactcgtgagtaatgatacaccatgatgtcttgggcccatagcattatcacagggcttcccaaaggacttgagcaactgagttttgaatgtctcctattcttggggaaattaaaacaagagccagcaaaatgcacaactttccctgaagtgtgattctagtgtatatttaccttgcctgtagaatacatctaatcaggacagtctgaagtctctctggcactaagtcatgagatgccaacatccttctgtacttgagctctttgagttggctggtagtaatttcttcctttctttctttcttttttttgagacagtctcgctctgtcacccaggctggagtacagtggcatgatcttggctcactgcaacctccatctcccaggttcaagcaattctcttgtctcagcctcccgagtagctgggactacaggtgcctgccaccacg

SEQ ID NO: 433084 - DNA, 2486 bp, Homo sapiens
tggcagagccgccagcgaggctggggatgggggcgccgctgctctctcccggctggggagccggggctgccggccggcgctggtggatgctgctggcgcccctgctgccggcgctgctgctggtgcggcccgcgggggccctggtggaggggctctactgcggcacgcgggactgctacgaggtgctgggcgtgagccgctcggcgggcaaggcggagatcgcgcgggcctaccgccagctggcccggcgctaccaccctgaccgctaccggccccagcccggagacgagggccccgggcggacgccgcagagcgccgaggaggctttcctgctggtggcaaccgcctacgagacactcaagtcctcctgcatatgcccaagaggattgggagtggaatggacaccagcagaagcaccacagttattcctgtagagattagaaacaaggagcttattgccctgcttgtcaaggctcaggacagacaggaggaagaaacaagtataaaggttttggttttggaaagaagttggaatctccagaccctgggaccttaagatccacaaaattgctgaaagaaaaagtactaccttattgaaaggatgaagaaacacgaaaagattatgattacatgctggatcatccagaagagtactacagccattactaccactactatagcaggcgcttggcccctaaggtggatgttagagtagtgattttggtcagcgtgtgtgctatttcggtgtttcagtttttcagctggtggaatagctacaataaggcaatcagctacctagccacagtgcccaagtaccgtatccaagctacagagattgccaagcagcagggactgctcaaaaaagccaaagaaaaaggcaaaaacaaaaagtccaaagaagaaattcgtgacgaggaggagaacatcataaagaacattataaaaagtaaaatagatataaaggggggctatcagaaaccccaaatctgtgatcttctcctgtttcaaattatcttagctccttttcacctatgctcatatatagtttggtattgtcggtggatctataattttaacatcaaaggcaaagaatatggagaggaagagagattatacattatacgtaaatctatgaagatgtcaaagtctcaatttgatagtctagaagatcatcagaaagaaacttttcttaaacgagagctctggatcaaggagaattatgaggtctacaagcaagaacaagaggaagaattaaagaaaaagttggcaaatgaccccagatggaagagatacaggagatggatgaagaatgaagggcctgggcggttaacatttgtggatgactgaagattgatggaatgctactatgccaaaccttaattgtgatattattttcataactgaattattttagaaatgtatcaattgactgctgctcagcagtaactaaaattcctcaagtatttgattaaacagaataatgtcaaaatttaaaccttcccttaaaactttatacataagacatttatgattgttcaatttttataatctatttgtggattttgttaaaagatttcacatgaagatttattagttgccatttaaaatttttatatgtttagttaaaagatttgacatgaaaatttattagataccatttaaaaattttatgtgttatgtgtttattctttgagaatgttaccttactgtttgtaatagtgctacatttttctgctttcatggcctctgtattttcacaaaacaccaaaaacagcatttaattatattatcatgagtgtgtttctggacacaaacttctgcagtagaatgacctaacatgtcgttttcattgcagtcattataggattgaaatacgttcaaaataacctctctaggaaagtcttctgctagaatttctcccctctattcattataatattctttgtttttaaagccagtcaaatataatagtcttaataagatcagaaactctccaggagagtgagtctaccctcacgtccttgtaggatgatcttgattatagtcttattataggactataactgtattctcaacatttctccagaaaggaccttgtaaaaaggtcttttgtaccacagtattggttttttcccctctctcttcacttaaaaaaaaaaatagcaaggcagaaatagtgtattgaaaagttgttcatctattatgaagtccttgagtggtgaaaaatccgttgtacatgagaacatttctatgcatttaagccagaaacgaggtacatggctgtgtgctcttctgtcaaccaatgaaatgtgttttcacatgtgtggcagtgcaagtaaataacacattatttgactgaatcaggcatgatactgcaccaaagtgttggtacatattcacggtagtaaatcagtacccctgttaaaggatttatcccattgcttcatattaataaaatggttacaatatatcacaaaaaaaaaata

SEQ ID NO: 433085 - DNA, 1481 bp, Homo sapiens
gcacccgcgctcggggctggcggctcctccccgcccggccgggcccagcagcccctaggagcccagcgccgccgccatgtcctccggggctagcgcgagcgccctgcagcgcttggtagagcagctcaagttggaggctggcgtggagaggatcaaggtctctcaggcagctgcagagcttcaacagtactgtatgcagaatgcctgcaaggatgccctgctggtgggtgttccagctggaagtaaccccttccgggagcctagatcctgtgctttactctgaagactctaggagagaagtttgctgaggaatgccttcaagcacaaagtgatgaatgactgccttcaagtctcaagaaaacacttttccctaacttttagagatatttcagccctttcctgtggcctggtcctatagccaaaatcacagatattcatgagtttctacttgagtgagaaaactgggtgaaggaatagaattttaaatagtaataactgcttgttttttttgtgcaagtacttttatacataagataaacaaaaaccttaccaccaaacataccaaaatgcacctctttcataagtgagttactaagatttctatacctggaatatcatgtatgtttcatttactggatgtttacattttaggaaggaaaatagttctgtttatttaaacaactgaatacttataaactgttgttcctggaagttatttattccataaaaaatttgttcttttctcatgaatttataattcctaaatgaagaccagaaagtacaaattgctgggaggaagaataggctttattaatcaactgatgtcttgatttttctaaatgggaagattgctttatttttaacactaattatgggagcagattcttagcaaacttctttggaaaagttaatgttatgatgtgcattaggctgccccatcgtgtatataaatgaagcagatttgatttttgtattcttacgtttctctgctttgtagttgtggctgtacttaaagaaatacagaatttcatatatttaaaaatgtttaaaatgtgacccacagaacattgtaaatgattaaaaactaacatgaaaatattacaacctaaaagaattcttaacttcacaagtgttttacttcgacgatgtgcctttgatttaatttgggacacttttttagaaggatacattattcgtgtttgcaacggtctttgaagagcttggaaataaaatttctgcttaattaatcatttttctatgacagcaatattttgtgtctgattttgtattaaggactcaaggatttctgtttgcctgtgagattgagtgctggaatgagagagtgaaattgttgtttttaagtctttgtagaattttgcaaatgtcctgaaaaatagataactgtataacatgaagaaaatatctctattaatggcaacatttgttctctgaaatagctatatataaactcataaataaac

SEQ ID NO: 433086 - DNA, 1405 bp, Homo sapiens
gcacccgcgctcggggctggcggctcctccccgcccggccgggcccagcagcccctaggagcccagcgccgccgccatgtcctccggggctagcgcgagcgccctgcagcgcttggtagagcagctcaagttggaggctggcgtggagaggatcaaggtctctcaggcagctgcagagcttcaacagtactgtatgcagaatgcctgcaaggatgccctgctggtgggtgttccagctggaagtaaccccttccgggagcctagatcctgtgctttactctgaagactctaggagagaagtttgctgaggaatgccttcaagcacaaagtgatgaatgactgccttcaagtctcaagaaaacacttttccctaacttttagagatatttcagccctttcctgtggcctggtcctatagccaaaatcacagatattcatgagtttctacttgagtgagaaaactgggtgaaggaatagaattttaaatagtaataactgcttgttttttttgtgcaagtacttttatacataagataaacaaaaaccttaccaccaaacataccaaaatgcacctctttcataagtgagttactaagatttctatacctggaatatcatgtatgtttcatttactggatgtttacattttaggaaggaaaatagttctgtttatttaaacaactgaatacttataaactgttgttcctggaagttatttattccataaaaaatttgttcttttctcatgaatttataattcctaaatgaagaccagaaagtacaaattgctgggaggaagaataggctttattaatcaactgatgtcttgatttttctaaatgggaagattgctttatttttaacactaattatgggagcagattcttagcaaacttctttggaaaagttaatgttatgatgtgcattaggctgccccatcgtgtatataaatgaagcagatttgatttttgtattcttacgtttctctgctttgtagttgtggctgtacttaaagaaatacagaatttcatatatttaaaaatgtttaaaatgtgacccacagaacattgtaaatgattaaaaactaacatgaaaatattacaacctaaaagaattcttaacttcacaagtgttttacttcgacgatgtgcctttgatttaatttgggacacttttttagaaggatacattattcgtgtttgcaacggtctttgaagagcttggaaataaaatttctgcttaattaaaaaaaaaaaagacaaaaagaaaacattttgtgggccggccttaggcctgagaaaagtttttacagaccctttgttggggggacgggccccagaggttacgcgaccggggccaaagcgggaccaaaaagaaccgggcaagaaaagcggggtttctcaca

SEQ ID NO: 433087 - DNA, 2266 bp, Homo sapiens
cgcggagggggcggggcctgggcgcgccgagctccggctgggtccctgcaggtcttggggcccgggactcttcctggagacaccgccatggccgggctatcccgcgggtccgcgcgcgcactgctcgccgccctgctggcgtcgacgctgttggcgctgctcgtgtcgcccgcgcggggtcgcggcggccgggaccacggggactgggacgaggcctcccggctgccgccgctaccaccccgcgaggacgcggcgcgcgtggcccgcttcgtgacgcacgtctccgactggggcgctctggccaccatctccacgctggaggcggtgcgcggccggcccttcgccgacgtcctctcgctcagcgacgggcccccgggcgcgggcagcggcgtgccctatttctacctgagcccgctgcagctctccgtgagcaacctgcaggagaatccatatgctacactgaccatgactttggcacagaccaacttctgcaagaaacatggatttgatccacaaagtcccctttgtgttcacataatgctgtcaggaactgtgaccaaggtgaatgaaacagaaatggatattgcaaagcattcgttattcattcgacaccctgagatgaaaacctggccttccagccataattggttctttgctaagttgaatataaccaatatctgggtcctggactactttggtggaccaaaaatcgtgacaccagaagaatattataatgtcacagttcagtgaagcagactgtggtgaatttagcaacacttatgaagtttcttaaagtggctcatacacacttaaaaggcttaatgtttctctggaaagcgtcccagaatattagccagttttctgtcacatgctggtttgtttgcttgcttgtttacttgcttgtttaccaatagagttgacctgttattggatttcctggaagatgtggtagctacttttttcctattttgaagccattttcgtagagaaatatccttcactataatcaaataagttttgtcccatcaattccaaagatgtttccagtggtgctcttgaagaggaatgagtaccagttttaaattgcccattggcatttgaaggtagttgagtatgtgttctttattcctagaagccactgtgcttggtagagtgcatcactcaccacagctgcctcctgagctgcctgagcctggtgcaaaaggattggcccccattatggtgcttctgaataaatcttgccaagatagacaaacaatgatgaaactcagatggagcttcctactcatgttgatttatgtctcacaatcctgggtattgttaattcaacatagggtgaaactatttctgataaagaacttttgaaaaactttttatactctaaagtgatactcagaacaaaagaaagtcataaaactcctgaatttaatttccccacctaagtcgagacagtattatcaaaacacatgtgcacacagattattttttggctccaaaactggattgcaaaagaaagaggagaagaatattttgtgtgttcctggtattcttttataagtaaagtttacccaggcatggaccagcttcagccagggacaaaatcccctcccaaaccactctccacagctttttaaaaatacttctactcttaacaattacctaaggcttcctcaactgccccaaatctcttaatagcttctagtgctgctacaatctaagtcaggtcaccagagggaagagaacatggcattaaaagaatcacatcttcagaagagaagacactaatattattacccatatacatgatttcagaagatgacataagattcctcttaaagaggaaatgtcaggaatcaagccactgaatccttaaagagaaaagttgaatatgagtcattgtgtctgaaaactgcaaagtgaacttaactgagatccagcaaacaggttctgtttaagaaaaataatttatactaaatttagtaaaatggacttcttattcaaagcatcaataattaaaagaattattttaatgaaaaaaaagaaagataaagagaaacaaaagaagcagaaaaggaaaaaagaaaaagcaaaaaagaagagagaaacgaacagaaaaagaaagacaaggaggaagacgaaagaagcaagaaagcaacagagagacacagagagagcgcgacgaagaagaaaaaaaaaagaagagggcgcagagagagagagagtaagagaagagaggcgaagcaacacataaagaaggggcaaacag

SEQ ID NO: 433088 - DNA, 2626 bp, Homo sapiens
cgcggagggggcggggcctgggcgcgccgagctccggctgggtccctgcaggtcttggggcccgggactcttcctggagacaccgccatggccgggctatcccgcgggtccgcgcgcgcactgctcgccgccctgctggcgtcgacgctgttggcgctgctcgtgtcgcccgcgcggggtcgcggcggccgggaccacggggactgggacgaggcctcccggctgccgccgctaccaccccgcgaggacgcggcgcgcgtggcccgcttcgtgacgcacgtctccgactggggcgctctggccaccatctccacgctggaggcggtgcgcggccggcccttcgccgacgtcctctcgctcagcgacgggcccccgggcgcgggcagcggcgtgccctatttctacctgagcccgctgcagctctccgtgagcaacctgcaggagaatccatatgctacactgaccatgactttggcacagaccaacttctgcaagaaacatggatttgatccacaaagtcccctttgtgttcacataatgctgtcaggaactgtgaccaaggtgaatgaaacagaaatggatattgcaaagcattcgttattcattcgacaccctgagatgaaaacctggccttccagccataattggttctttgctaagttgaatataaccaatatctgggtcctggactactttggtggaccaaaaatcgtgacaccagaagaatattataatgtcacagttcagtgaagcagactgtggtgaatttagcaacacttatgaagtttcttaaagtggctcatacacacttaaaaggcttaatgtttctctggaaagcgtcccagaatattagccagttttctgtcacatgctggtttgtttgcttgcttgtttacttgcttgtttaccaatagagttgacctgttattggatttcctggaagatgtggtagctacttttttcctattttgaagccattttcgtagagaaatatccttcactataatcaaataagttttgtcccatcaattccaaagatgtttccagtggtgctcttgaagaggaatgagtaccagttttaaattgcccattggcatttgaaggtagttgagtatgtgttctttattcctagaagccactgtgcttggtagagtgcatcactcaccacagctgcctcctgagctgcctgagcctggtgcaaaaggattggcccccattatggtgcttctgaataaatcttgccaagatagacaaacaatgatgaaactcagatggagcttcctactcatgttgatttatgtctcacaatcctgggtattgttaattcaacatagggtgaaactatttctgataaagaacttttgaaaaactttttatactctaaagtgatactcagaacaaaagaaagtcataaaactcctgaatttaatttccccacctaagtcgagacagtattatcaaaacacatgtgcacacagattattttttggctccaaaactggattgcaaaagaaagaggagaagaatattttgtgtgttcctggtattcttttataagtaaagtttacccaggcatggaccagcttcagccagggacaaaatcccctcccaaaccactctccacagctttttaaaaatacttctactcttaacaattacctaaggcttcctcaactgccccaaatctcttaatagcttctagtgctgctacaatctaagtcaggtcaccagagggaagagaacatggcattaaaagaatcacatcttcagaagagaagacactaatattattacccatatacatgatttcagaagatgacataagattcctcttaaagaggaaatgtcaggaatcaagccactgaatccttaaagagaaaagttgaatatgagtcattgtgtctgaaaactgcaaagtgaacttaactgagatccagcaaacaggttctgtttaagaaaaataatttatactaaatttagtaaaatggacttcttattcaaagcatcaataattaaaagaattattttaatgaaaaaaaaaaaaaaaaagagaaaaaaaaaaaagaaaagaacaaaaaaaaaaaaggaaaaacaagaaagaaaaaaagaaacaatagactaaaaaaagcttatgaaagatcaaaacaaaaaaaagcagcttagccaaatatgccaagaaaaagaccacaactgaaaaacattcagcggccgacctgctccgctaaaactacagaaggccatgaaggcagtgcatcaggttcacctgcagtacatttctttgaagctcagcatctttcacgtgcaagatttgaggggacaggacgagattatagcatttgaggatatctgaaatgagccgtcacacagcgaagtcatgggagagccacacttgatggtggaatattgaccaggcagactgtaatcagcgcactgtgccgtaaaccgaaggttgcatatcgatagtggcatctacggccagagcttgatggcagaacattttgggacaggagcctgaacgaacgtcgtttccaccgtgaacgggctggtcggcccgcttatctcgggaccgacccacaaccggagccgattatgcaatgcgggccccaatgggggctagcggccctcc

SEQ ID NO: 433089 - DNA, 1981 bp, Homo sapiens
cgcggagggggcggggcctgggcgcgccgagctccggctgggtccctgcaggtcttggggcccgggactcttcctggagacaccgccatggccgggctatcccgcgggtccgcgcgcgcactgctcgccgccctgctggcgtcgacgctgttggcgctgctcgtgtcgcccgcgcggggtcgcggcggccgggaccacggggactgggacgaggcctcccggctgccgccgctaccaccccgcgaggacgcggcgcgcgtggcccgcttcgtgacgcacgtctccgactggggcgctctggccaccatctccacgctggaggcggtgcgcggccggcccttcgccgacgtcctctcgctcagcgacgggcccccgggcgcgggcagcggcgtgccctatttctacctgagcccgctgcagctctccgtgagcaacctgcaggagaatccatatgctacactgaccatgactttggcacagaccaacttctgcaagaaacatggatttgatccacaaagtcccctttgtgttcacataatgctgtcaggaactgtgaccaaggtgaatgaaacagaaatggatattgcaaagcattcgttattcattcgacaccctgagatgaaaacctggccttccagccataattggttctttgctaagttgaatataaccaatatctgggtcctggactactttggtggaccaaaaatcgtgacaccagaagaatattataatgtcacagttcagtgaagcagactgtggtgaatttagcaacacttatgaagtttcttaaagtggctcatacacacttaaaaggcttaatgtttctctggaaagcgtcccagaatattagccagttttctgtcacatgctggtttgtttgcttgcttgtttacttgcttgtttaccaatagagttgacctgttattggatttcctggaagatgtggtagctacttttttcctattttgaagccattttcgtagagaaatatccttcactataatcaaataagttttgtcccatcaattccaaagatgtttccagtggtgctcttgaagaggaatgagtaccagttttaaattgcccattggcatttgaaggtagttgagtatgtgttctttattcctagaagccactgtgcttggtagagtgcatcactcaccacagctgcctcctgagctgcctgagcctggtgcaacaatgatgaaactcagatggagcttcctactcatgttgatttatgtctcacaatcctgggtattgttaattcaacatagggtgaaactatttctgataaagaacttttgaaaaactttttatactctaaagtgatactcagaacaaaagaaagtcataaaactcctgaatttaatttccccacctaagtcgagacagtattatcaaaacacatgtgcacacagattattttttggctccaaaactggattgcaaaagaaagaggagaagaatattttgtgtgttcctggtattcttttataagtaaagtttacccaggcatggaccagcttcagccagggacaaaatcccctcccaaaccactctccacagctttttaaaaatacttctactcttaacaattacctaaggcttcctcaactgccccaaatctcttaatagcttctagtgctgctacaatctaagtcaggtcaccagagggaagagaacatggcattaaaagaatcacatcttcagaagagaagacactaatattattacccatatacatgatttcagaagatgacataagattcctcttaaagaggaaatgtcaggaatcaagccactgaatccttaaagagaaaagttgaatatgagtcattgtgtctgaaaactgcaaagtgaacttaactgagatccagcaaacaggttctgtttaagaaaaataatttatactaaatttagtaaaatggacttcttattcaaagcatcaataattaaaagaattattttaatgaaa

SEQ ID NO: 433090 - DNA, 2102 bp, Homo sapiens
ccaccacgcctggctaattttttgtatttttagtagaggcagggtttcatcatgtcagccaggatggtctcaatctcctgacctcgtgatctgcccgcctcggcctcccaaaatgctgggattataggtgtgagccaccgcgcccgcccaacaagcagttcttataagcataagcattgcttttgaccactgttaagtctgggcagcagcatgtttgtgctaagcctcattttatctcctctggcgcacatccggatatttcctagcaaacacacaggtaacaaaaggtcatggattacagacttgcccagtcttgatacctagagatggattccctggttggtggcagcagaaagggggaaagttcacctcccagctgtggtcactatcactgggcaatggctaatcactgctcttctgccctgatgttcaggaccccttctgttctcaactatttttgtcttttaagccttcagatactcttaaatgagataacaacagcagccacggcagtggcctgcttcttgctacatcctagtagcgtttatcagtgtgtcagaatcatacttggagaggagggttattgctaaaatgaggattcctaggccccaccctcaacctattgaaaccgaaactcaggagtctgcattttaacaaacccaagtggttatttagtatattctagtggttgaaatgaactgaaaatcttaatttagatcagaaattttatctagtccttccctagaatgaattaatttttaagatttgttaacccagtttaacaaaataattcttctctgttcccctttctaggtgaagcagactgtggtgaatttagcaacacttatgaagtttcttaaagtggctcatacacacttaaaaggcttaatgtttctctggaaagcgtcccagaatattagccagttttctgtcacatgctggtttgtttgcttgcttgtttacttgcttgtttaccaatagagttgacctgttattggatttcctggaagatgtggtagctacttttttcctattttgaagccattttcgtagagaaatatccttcactataatcaaataagttttgtcccatcaattccaaagatgtttccagtggtgctcttgaagaggaatgagtaccagttttaaattgcccattggcatttgaaggtagttgagtatgtgttctttattcctagaagccactgtgcttggtagagtgcatcactcaccacagctgcctcctgagctgcctgagcctggtgcaaaaggattggcccccattatggtgcttctgaataaatcttgccaagatagacaaacaatgatgaaactcagatggagcttcctactcatgttgatttatgtctcacaatcctgggtattgttaattcaacatagggtgaaactatttctgataaagaacttttgaaaaactttttatactctaaagtgatactcagaacaaaagaaagtcataaaactcctgaatttaatttccccacctaagtcgagacagtattatcaaaacacatgtgcacacagattattttttggctccaaaactggattgcaaaagaaagaggagaagaatattttgtgtgttcctggtattcttttataagtaaagtttacccaggcatggaccagcttcagccagggacaaaatcccctcccaaaccactctccacagctttttaaaaatacttctactcttaacaattacctaaggcttcctcaactgccccaaatctcttaatagcttctagtgctgctacaatctaagtcaggtcaccagagggaagagaacatggcattaaaagaatcacatcttcagaagagaagacactaatattattacccatatacatgatttcagaagatgacataagattcctcttaaagaggaaatgtcaggaatcaagccactgaatccttaaagagaaaagttgaatatgagtcattgtgtctgaaaactgcaaagtgaacttaactgagatccagcaaacaggttctgtttaagaaaaataatttatactaaatttagtaaaatggacttcttattcaaagcatcaataattaaaagaattattttaatgaaa

SEQ ID NO: 433091 - DNA, 1850 bp, Homo sapiens
cgcggagggggcggggcctgggcgcgccgagctccggctgggtccctgcaggtcttggggcccgggactcttcctggagacaccgccatggccgggctatcccgcgggtccgcgcgcgcactgctcgccgccctgctggcgtcgacgctgttggcgctgctcgtgtcgcccgcgcggggtcgcggcggccgggaccacggggactgggacgaggcctcccggctgccgccgctaccaccccgcgaggacgcggcgcgcgtggcccgcttcgtgacgcacgtctccgactggggcgctctggccaccatctccacgctggaggcggtgcgcggccggcccttcgccgacgtcctctcgctcagcgacgggcccccgggcgcgggcagcggcgtgccctatttctacctgagcccgctgcagctctccgtgagcaacctgcaggagaatccatatgctacactgaccatgactttggcacagaccaacttctgcaagaaacatggatttgatccacaaagtcccctttgtgttcacataatgctgtcaggaactgtgaccaaggtgaagcagactgtggtgaatttagcaacacttatgaagtttcttaaagtggctcatacacacttaaaaggcttaatgtttctctggaaagcgtcccagaatattagccagttttctgtcacatgctggtttgtttgcttgcttgtttacttgcttgtttaccaatagagttgacctgttattggatttcctggaagatgtggtagctacttttttcctattttgaagccattttcgtagagaaatatccttcactataatcaaataagttttgtcccatcaattccaaagatgtttccagtggtgctcttgaagaggaatgagtaccagttttaaattgcccattggcatttgaaggtagttgagtatgtgttctttattcctagaagccactgtgcttggtagagtgcatcactcaccacagctgcctcctgagctgcctgagcctggtgcaaaaggattggcccccattatggtgcttctgaataaatcttgccaagatagacaaacaatgatgaaactcagatggagcttcctactcatgttgatttatgtctcacaatcctgggtattgttaattcaacatagggtgaaactatttctgataaagaacttttgaaaaactttttatactctaaagtgatactcagaacaaaagaaagtcataaaactcctgaatttaatttccccacctaagtcgagacagtattatcaaaacacatgtgcacacagattattttttggctccaaaactggattgcaaaagaaagaggagaagaatattttgtgtgttcctggtattcttttataagtaaagtttacccaggcatggaccagcttcagccagggacaaaatcccctcccaaaccactctccacagctttttaaaaatacttctactcttaacaattacctaaggcttcctcaactgccccaaatctcttaatagcttctagtgctgctacaatctaagtcaggtcaccagagggaagagaacatggcattaaaagaatcacatcttcagaagagaagacactaatattattacccatatacatgatttcagaagatgacataagattcctcttaaagaggaaatgtcaggaatcaagccactgaatccttaaagagaaaagttgaatatgagtcattgtgtctgaaaactgcaaagtgaacttaactgagatccagcaaacaggttctgtttaagaaaaataatttatactaaatttagtaaaatggacttcttattcaaagcatcaataattaaaagaattattttaatgaaa

SEQ ID NO: 433092 - DNA, 1348 bp, Homo sapiens
ggagctcggcccctatttttatttctttttgcgaagactattataatgtcacagattcagtgaagcagactgtggtgaatttagcaacacttatgaagtttcttaaagtggctcatacacacttaaaaggcttaatgtttctctggaaagcgtcccagaatattagccagttttctgtcacatgctggtttgtttgcttgcttgtttacttgcttgtttaccaatagagttgacctgttattggatttcctggaagatgtggtagctacttttttcctattttgaagccattttcgtagagaaatatccttcactataatcaaataagttttgtcccatcaattccaaagatgtttccagtggtgctcttgaagaggaatgagtaccagttttaaattgcccattggcatttgaaggtagttgagtatgtgttctttattcctagaagccactgtgcttggtagagtgcatcactcaccacagctgcctcctgagctgcctgagcctggtgcaaaaggattggcccccattatggtgcttctgaataaatcttgccaagatagacaaacaatgatgaaactcagatggagcttcctactcatgttgatttatgtctcacaatcctgggtattgttaattcaacatagggtgaaactatttctgataaagaacttttgaaaaactttttatactctaaagtgatactcagaacaaaagaaagtcataaaactcctgaatttaatttccccacctaagtcgagacagtattatcaaaacacatgtgcacacagattattttttggctccaaaactggattgcaaaagaaagaggagaagaatattttgtgtgttcctggtattcttttataagtaaagtttacccaggcatggaccagcttcagccagggacaaaatcccctcccaaaccactctccacagctttttaaaaatacttctactcttaacaattacctaaggcttcctcaactgccccaaatctcttaatagcttctagtgctgctacaatctaagtcaggtcaccagagggaagagaacatggcattaaaagaatcacatcttcagaagagaagacactaatattattacccatatacatgatttcagaagatgacataagattcctcttaaagaggaaatgtcaggaatcaagccactgaatccttaaagagaaaagttgaatatgagtcattgtgtctgaaaactgcaaagtgaacttaactgagatccagcaaacaggttctgtttaagaaaaataatttatactaaatttagtaaaatggacttcttattcaaagcatcaataattaaaagaattattttaatgaaa

SEQ ID NO: 433093 - DNA, 1109 bp, Homo sapiens
ttagaagagagagttcaagagggcgtgaaaccgttaagaggtaaacgggagcgggcgtagagaaatatccttcactataatcaaataagttttgtcccatcaattccaaagatgtttccagtggtgctcttgaagaggaatgagtaccagttttaaattgcccattggcatttgaaggtagttgagtatgtgttctttattcctagaagccactgtgcttggtagagtgcatcactcaccacagctgcctcctgagctgcctgagcctggtgcaaaaggattggcccccattatggtgcttctgaataaatcttgccaagatagacaaacaatgatgaaactcagatggagcttcctactcatgttgatttatgtctcacaatcctgggtattgttaattcaacatagggtgaaactatttctgataaagaacttttgaaaaactttttatactctaaagtgatactcagaacaaaagaaagtcataaaactcctgaatttaatttccccacctaagtcgagacagtattatcaaaacacatgtgcacacagattattttttggctccaaaactggattgcaaaagaaagaggagaagaatattttgtgtgttcctggtattcttttataagtaaagtttacccaggcatggaccagcttcagccagggacaaaatcccctcccaaaccactctccacagctttttaaaaatacttctactcttaacaattacctaaggcttcctcaactgccccaaatctcttaatagcttctagtgctgctacaatctaagtcaggtcaccagagggaagagaacatggcattaaaagaatcacatcttcagaagagaagacactaatattattacccatatacatgatttcagaagatgacataagattcctcttaaagaggaaatgtcaggaatcaagccactgaatccttaaagagaaaagttgaatatgagtcattgtgtctgaaaactgcaaagtgaacttaactgagatccagcaaacaggttctgtttaagaaaaataatttatactaaatttagtaaaatggacttcttattcaaagcatcaataattaaaagaattattttaatgaaa

SEQ ID NO: 433094 - DNA, 1529 bp, Homo sapiens
cgcggagggggcggggcctgggcgcgccgagctccggctgggtccctgcaggtcttggggcccgggactcttcctggagacaccgccatggccgggctatcccgcgggtccgcgcgcgcactgctcgccgccctgctggcgtcgacgctgttggcgctgctcgtgtcgcccgcgcggggtcgcggcggccgggaccacggggactgggacgaggcctcccggctgccgccgctaccaccccgcgaggacgcggcgcgcgtggcccgcttcgtgacgcacgtctccgactggggcgctctggccaccatctccacgctggaggcggtgcgcggccggcccttcgccgacgtcctctcgctcagcgacgggcccccgggcgcgggcagcggcgtgccctatttctacctgagcccgctgcagctctccgtgagcaacctgcaggagaatccatatgctacactgaccatgactttggcacagaccaacttctgcaagaaacatggatttgatccacaaagtcccctttgtgttcacataatgctgtcaggaactgtgaccaaggtgaatgaaacagaaatggatattgcaaagcattcgttattcattcgacaccctgagatgaaaacctggccttccagccataattggttctttgctaagttgaatataaccaatatctgggtcctggactactttggtggaccaaaaatcgtgacaccagaagaatattataatgtcacagttcactggaagacatcttgtggagaccatctagttcagcttcttcattgtatagctgaggacacccaggcccagagaggggaagtgatttggtcaaagtcacacagcaagtaaaggacaaagctgagagcagatcccaggcaagcttcttccatctggtgaaaaagatgaacaccaggcgtgtctgatcttcccagaggaagaagggagcatctttttgaacagcatttctgtgagaaatgggatcctaaggtggcctccaagattgacacgccatggtacaatcttcgtgatcgtaagaagaacctgtgaatacgatgagctatcactcctgtgcttttgcggttttatgtggcaaagggagagtgttctgggtgggcctgacctgatcaggcatatcctctaaaatcagagttttctccagctggttccagaagactaagtcagagagatgctctgtgtttgggccagaagcaagcaaacatccacattgtgaactgcctatgggggccacctggcaaggaactgcaggtgttttctgggacctgagagcattccctggccaatcattagcaggaaaacaggaactcactcctataactgagaggaaataaaatttaccaacaaccaatgagcctggaagaagaccctgagcctcaaatgagaactgcagccccagccaacactgatttcagccttgtaagtacctgagcagagaactcagccatgctatatcaggacttctgacctacattactgtaagatcataaatgtgttgttttaagcca

SEQ ID NO: 433095 - DNA, 831 bp, Homo sapiens
cgcggagggggcggggcctgggcgcgccgagctccggctgggtccctgcaggtcttggggcccgggactcttcctggagacaccgccatggccgggctatcccgcgggtccgcgcgcgcactgctcgccgccctgctggcgtcgacgctgttggcgctgctcgtgtcgcccgcgcggggtcgcggcggccgggaccacggggactgggacgaggcctcccggctgccgccgctaccaccccgcgaggacgcggcgcgcgtggcccgcttcgtgacgcacgtctccgactggggcgctctggccaccatctccacgctggaggcggtgcgcggccggcccttcgccgacgtcctctcgctcagcgacgggcccccgggcgcgggcagcggcgtgccctatttctacctgagcccgctgcagctctccgtgagcaacctgcaggagaatccatatgctacactgaccatgactttggcacagaccaacttctgcaagaaacatggatttgatccacaaagtcccctttgtgttcacataatgctgtcaggaactgtgaccaaggtgaatgaaacagaaatggatattgcaaagcattcgttattcattcgacaccctgagatgaaaacctggccttccagccataattggttctttgctaagttgaatataaccaatatctgggtcctggactactttggtggaccaaaaatcgtgacaccagaagaatattataatgtcacagttcaaagtacttacacatctttcacctaagattgccgcccttacagccatcctcagccttctaaggcaaggggggtttaaccgtttcat

SEQ ID NO: 433096 - DNA, 2035 bp, Homo sapiens
cgcggagggggcggggcctgggcgcgccgagctccggctgggtccctgcaggtcttggggcccgggactcttcctggagacaccgccatggccgggctatcccgcgggtccgcgcgcgcactgctcgccgccctgctggcgtcgacgctgttggcgctgctcgtgtcgcccgcgcggggtcgcggcggccgggaccacggggactgggacgaggcctcccggctgccgccgctaccaccccgcgaggacgcggcgcgcgtggcccgcttcgtgacgcacgtctccgactggggcgctctggccaccatctccacgctggaggcggtgcgcggccggcccttcgccgacgtcctctcgctcagcgacgggcccccgggcgcgggcagcggcgtgccctatttctacctgagcccgctgcagctctccgtgagcaacctgcaggagaatccatatgctacactgaccatgactttggcacagaccaacttctgcaagaaacatggatttgatccacaaagtcccctttgtgttcacataatgctgtcaggaactgtgaccaaggtgaatgaaacagaaatggatattgcaaagcattcgttattcattcgacaccctgagatgaaaacctggccttccagccataattggttctttgctaagttgaatataaccaatatctgggtcctggactactttggtggaccaaaaatcgtgacaccagaagaatattataatgtcacagttcagtgaagcagactgtggtgaatttagcaacacttatgaagtttcttaaagtggctcatacacacttaaaaggcttaatgtttctctggaaagcgtcccagaatattagccagttttctgtcacatgctggtttgtttgcttgcttgtttacttgcttgtttaccaatagagttgacctgttattggatttcctggaagatgtggtagctacttttttcctattttgaagccattttcgtagagaaatatccttcactataatcaaataagttttgtcccatcaattccaaagatgtttccagtggtgctcttgaagaggaatgagtaccagttttaaattgcccattggcatttgaaggtagttgagtatgtgttctttattcctagaagccactgtgcttggtagagtgcatcactcaccacagctgcctcctgagctgcctgagcctggtgcaaaaggattggcccccattatggtgcttctgaataaatcttgccaagatagacaaacaatgatgaaactcagatggagcttcctactcatgttgatttatgtctcacaatcctgggtattgttaattcaacatagggtgaaactatttctgataaagaacttttgaaaaactttttatactctaaagtgatactcagaacaaaagaaagtcataaaactcctgaatttaatttccccacctaagtcgagacagtattatcaaaacacatgtgcacacagattattttttggctccaaaactggattgcaaaagaaagaggagaagaatattttgtgtgttcctggtattcttttataagtaaagtttacccaggcatggaccagcttcagccagggacaaaatcccctcccaaaccactctccacagctttttaaaaatacttctactcttaacaattacctaaggcttcctcaactgccccaaatctcttaatagcttctagtgctgctacaatctaagtcaggtcaccagagggaagagaacatggcattaaaagaatcacatcttcagaagagaagacactaatattattacccatatacatgatttcagaagatgacataagattcctcttaaagaggaaatgtcaggaatcaagccactgaatccttaaagagaaaagttgaatatgagtcattgtgtctgaaaactgcaaagtgaacttaactgagatccagcaaacaggttctgtttaagaaaaataatttatactaaatttagtaaaatggacttcttattcaaagcatcaataattaaaagaattattttaatgaaa

SEQ ID NO: 433097 - DNA, 1980 bp, Homo sapiens
cgcggagggggcggggcctgggcgcgccgagctccggctgggtccctgcaggtcttggggcccgggactcttcctggagacaccgccatggccgggctatcccgcgggtccgcgcgcgcactgctcgccgccctgctggcgtcgacgctgttggcgctgctcgtgtcgcccgcgcggggtcgcggcggccgggaccacggggactgggacgaggcctcccggctgccgccgctaccaccccgcgaggacgcggcgcgcgtggcccgcttcgtgacgcacgtctccgactggggcgctctggccaccatctccacgctggaggcggtgcgcggccggcccttcgccgacgtcctctcgctcagcgacgggcccccgggcgcgggcagcggcgtgccctatttctacctgagcccgctgcagctctccgtgagcaacctgcaggagaatccatatgctacactgaccatgactttggcacagaccaacttctgcaagaaacatggatttgatccacaaagtcccctttgtgttcacataatgctgtcaggaactgtgaccaaggtgaatgaaacagaaatggatattgcaaagcattcgttattcattcgacaccctgagatgaaaacctggccttccagccataattggttctttgctaagttgaatataaccaatatctgggtcctggactactttggtggaccaaaaatcgtgacaccagaagaatattataatgtcacagttcagtgaagcagactgtggtgaatttagcaacacttatgaagtttcttaaagtggctcatacacacttaaaaggcttaatgtttctctggaaagcgtcccagaatattagccagttttctgtcacatgctggtttgtttgcttgcttgtttacttgcttgtttaccaatagagttgacctgttattggatttcctggaagatgtggtagctacttttttcctattttgaagccattttcgtagagaaatatccttcactataatcaaataagttttgtcccatcaattccaaagatgtttccagtggtgctcttgaagaggaatgagtaccagttttaaattgcccattggcatttgaaggtagttgagtatgtgttctttattcctagaagccactgtgcttggtagagtgcatcactcaccacagctgcctcctgagctgcctgagcctggtgcaaaaggattggcccccattatggtgcttctgaataaatcttgccaagatagacaaacaatgatgaaactcagatggagcttcctactcatgttgatttatgtctcacaatcctgggtattgttaattcaacatagggtgaaactatttctgataaagaacttttgaaaaactttttatactctaaagtgatactcagaacaaaagaaagtcataaaactcctgaatttaatttccccacctaagtcgagacagtattatcaaaacacatgtgcacacagattattttttggctccaaaactggattgcaaaagaaagaggagaagaatattttgtgtgttcctggtattcttttataagtaaagtttacccaggcatggaccagcttcagccagggacaaattacctaaggcttcctcaactgccccaaatctcttaatagcttctagtgctgctacaatctaagtcaggtcaccagagggaagagaacatggcattaaaagaatcacatcttcagaagagaagacactaatattattacccatatacatgatttcagaagatgacataagattcctcttaaagaggaaatgtcaggaatcaagccactgaatccttaaagagaaaagttgaatatgagtcattgtgtctgaaaactgcaaagtgaacttaactgagatccagcaaacaggttctgtttaagaaaaataatttatactaaatttagtaaaatggacttcttattcaaagcatcaataattaaaagaattattttaatgaaa

SEQ ID NO: 433098 - DNA, 1903 bp, Homo sapiens
  misc_feature (1567)..(1567): n is a, c, g, or t
  misc_feature (1571)..(1571): n is a, c, g, or t
  misc_feature (1575)..(1575): n is a, c, g, or t
  misc_feature (1579)..(1579): n is a, c, g, or t
  misc_feature (1582)..(1582): n is a, c, g, or t
  misc_feature (1599)..(1601): n is a, c, g, or t
  misc_feature (1608)..(1608): n is a, c, g, or t
  misc_feature (1613)..(1614): n is a, c, g, or t
  misc_feature (1617)..(1617): n is a, c, g, or t
  misc_feature (1619)..(1619): n is a, c, g, or t
  misc_feature (1634)..(1640): n is a, c, g, or t
  misc_feature (1644)..(1644): n is a, c, g, or t
  misc_feature (1646)..(1647): n is a, c, g, or t
  misc_feature (1649)..(1649): n is a, c, g, or t
  misc_feature (1651)..(1653): n is a, c, g, or t
  misc_feature (1655)..(1656): n is a, c, g, or t
  misc_feature (1659)..(1659): n is a, c, g, or t
  misc_feature (1663)..(1664): n is a, c, g, or t
  misc_feature (1670)..(1671): n is a, c, g, or t
  misc_feature (1674)..(1676): n is a, c, g, or t
  misc_feature (1683)..(1685): n is a, c, g, or t
  misc_feature (1687)..(1687): n is a, c, g, or t
  misc_feature (1692)..(1693): n is a, c, g, or t
  misc_feature (1695)..(1695): n is a, c, g, or t
  misc_feature (1700)..(1700): n is a, c, g, or t
  misc_feature (1702)..(1702): n is a, c, g, or t
  misc_feature (1706)..(1706): n is a, c, g, or t
  misc_feature (1711)..(1714): n is a, c, g, or t
  misc_feature (1716)..(1716): n is a, c, g, or t
  misc_feature (1718)..(1719): n is a, c, g, or t
  misc_feature (1723)..(1723): n is a, c, g, or t
  misc_feature (1727)..(1729): n is a, c, g, or t
  misc_feature (1731)..(1731): n is a, c, g, or t
  misc_feature (1733)..(1733): n is a, c, g, or t
  misc_feature (1737)..(1738): n is a, c, g, or t
  misc_feature (1763)..(1763): n is a, c, g, or t
  misc_feature (1775)..(1775): n is a, c, g, or t
  misc_feature (1778)..(1778): n is a, c, g, or t
  misc_feature (1780)..(1782): n is a, c, g, or t
  misc_feature (1785)..(1786): n is a, c, g, or t
  misc_feature (1788)..(1788): n is a, c, g, or t
  misc_feature (1791)..(1791): n is a, c, g, or t
  misc_feature (1794)..(1798): n is a, c, g, or t
  misc_feature (1800)..(1800): n is a, c, g, or t
  misc_feature (1802)..(1802): n is a, c, g, or t
  misc_feature (1804)..(1804): n is a, c, g, or t
  misc_feature (1807)..(1807): n is a, c, g, or t
  misc_feature (1811)..(1811): n is a, c, g, or t
  misc_feature (1833)..(1833): n is a, c, g, or t
  misc_feature (1856)..(1856): n is a, c, g, or t
cgcggagggggcggggcctgggcgcgccgagctccggctgggtccctgcaggtcttggggcccgggactcttcctggagacaccgccatggccgggctatcccgcgggtccgcgcgcgcactgctcgccgccctgctggcgtcgacgctgttggcgctgctcgtgtcgcccgcgcggggtcgcggcggccgggaccacggggactgggacgaggcctcccggctgccgccgctaccaccccgcgaggacgcggcgcgcgtggcccgcttcgtgacgcacgtctccgactggggcgctctggccaccatctccacgctggaggcggtgcgcggccggcccttcgccgacgtcctctcgctcagcgacgggcccccgggcgcgggcagcggcgtgccctatttctacctgagcccgctgcagctctccgtgagcaacctgcaggagaatccatatgctacactgaccatgactttggcacagaccaacttctgcaagaaacatggatttgatccacaaagtcccctttgtgttcacataatgctgtcaggaactgtgaccaaggtgaatgaaacagaaatggatattgcaaagcattcgttattcattcgacaccctgagatgaaaacctggccttccagccataattggttctttgctaagttgaatataaccaatatctgggtcctggactactttggtggaccaaaaatcgtgacaccagaagaatattataatgtcacagttcagtgaagcagactgtggtgaatttagcaacacttatgaagtttcttaaagtggctcatacacacttaaaaggcttaatgtttctctggaaagcgtcccagaatattagccagttttctgtcacatgctggtttgtttgcttgcttgtttacttgcttgtttaccaatagagttgacctgttattggatttcctggaagatgtggtagctacttttttcctattttgaagccattttcgtagagaaatatccttcactataatcaaataagttttgtcccatcaattccaaagatgtttccagtggtgctcttgaagaggaatgagtaccagttttaaattgcccattggcatttgaaggtagttgagtatgtgttctttattcctagaagccactgtgcttggtagagtgcatcactcaccacagctgcctcctgagctgcctgagcctggtgcaaaaggattggcccccattatggtgcttctgaataaatcttgccaagatagacaaacaatgatgaaactcagatggagcttcctactcatgttgatttatgtctcacaatcctgggtattgttaattcaacatagggtgaaactatttctgataaagaacttttgaaaaactttttatactctaaagtgatactcagaacaaaagaaagtcataaaactcctgaatttaatttccccacctaagtcgagacagtattatcaaaacacatgtgcacacagattattttttggctccaaaactggattgcaaaagaaagaggagaagaatattttgtgtgttcctggtattcttttataagtaaagtttntgtngggntggnagnggttgagtgagggatannntcgggtngcccnngcntntggcccggtcttttnnnnnnngttntnntntnnngnnttnggtnngggttnntgnnntgggggnnntntgttnntnggttntngtgntgttnnnntntnngtgnggtnnntngngggnngcgcccctggtcttccccgcctccnctgttgcgccgngcngnnngtnntnttnttnnnnntntncntgntttncgccgctgctctccgcttggtnttcccgcggccctgtgcggcctnccggtcctgccttcttcccgcgccccgttgcctctgcgttcttgtgt

SEQ ID NO: 433099 - DNA, 1324 bp, Homo sapiens
cgcggagggggcggggcctgggcgcgccgagctccggctgggtccctgcaggtcttggggcccgggactcttcctggagacaccgccatggccgggctatcccgcgggtccgcgcgcgcactgctcgccgccctgctggcgtcgacgctgttggcgctgctcgtgtcgcccgcgcggggtcgcggcggccgggaccacggggactgggacgaggcctcccggctgccgccgctaccaccccgcgaggacgcggcgcgcgtggcccgcttcgtgacgcacgtctccgactggggcgctctggccaccatctccacgctggaggcggtgcgcggccggcccttcgccgacgtcctctcgctcagcgacgggcccccgggcgcgggcagcggcgtgccctatttctacctgagcccgctgcagctctccgtgagcaacctgcaggagaatccatatgctacactgaccatgactttggcacagaccaacttctgcaagaaacatggatttgatccacaaagtcccctttgtgttcacataatgctgtcaggaactgtgaccaaggtgaatgaaacagaaatggatattgcaaagcattcgttattcattcgacaccctgagatgaaaacctggccttccagccataattggttctttgctaagttgaatataaccaatatctgggtcctggactactttggtggaccaaaaatcgtgacaccagaagaatattataatgtcacagttcacatctttttgaacagcatttctgtgagaaatgggatcctaaggtggcctccaagattgacacgccatggtacaatcttcgtgatcgtaagaagaacctgtgaatacgatgagctatcactcctgtgcttttgcggttttatgtggcaaagggagagtgttctgggtgggcctgacctgatcaggcatatcctctaaaatcagagttttctccagctggttccagaagactaagtcagagagatgctctgtgtttgggccagaagcaagcaaacatccacattgtgaactgcctatgggggccacctggcaaggaactgcaggtgttttctgggacctgagagcattccctggccaatcattagcaggaaaacaggaactcactcctataactgagaggaaataaaatttaccaacaaccaatgagcctggaagaagaccctgagcctcaaatgagaactgcagccccagccaacactgatttcagccttgtaagtacctgagcagagaactcagccatgctatatcaggacttctgacctacattactgtaagatcataaatgtgttgttttaagcca

SEQ ID NO: 433100 - DNA, 717 bp, Homo sapiens
cgtgcccccagagcacaagtactcagtgtggatatgctgttccattcctggcctcatgtccaccttcaagccagatgtgattagcaagcagaagtacgacgagtcgggcccctccatcgtccaccgcaaatgcttctaaacggactcagcagatgcgtagcatttgctgcatgggttaattgagaatagaaatttgcccctggcaaatgcacacacctcatgctagcctcacgaaactggaataagccttcgaaaagaaattgtccttgaagcttgtatctgatatcagcactggattgtagaacttgttgctgattttgaccttgtattgaagttaactgttccccttggtattaacgtgtcagggctgagtgttctgggatttctctagaggctggcaagaaccagttgttttgtcttgcgggtctgtcagggttggaaagtccaagccgtaggacccagtttcctttcttagctgatgtctttggccagaacaccgtgggctgttacttgctttgagttggaagcggtttgcatttacgcctgtaaatgtattcattcttaatttatgtaaggttttttttgtacgcaattctcgattctttgaagagatgacaacaaattttggttttctactgttatgtgagaacattaggccccagcaacacgtcattgtgtaaggaaaaataaaagtgctgccgtaaccaaaaaaaaaaa

SEQ ID NO: 433101 - DNA, 618 bp, Homo sapiens
gattgcgagctcgtaccccacacaccttgtccttgaagcttgtatctgatatcagcactggattgtagaacttgttgctgattttgaccttgtattgaagttaactgttccccttggtattacatatctttgagttcaacctttagtacgtgtggcttggtcacttcgtggctaaggtaagaacgtgcttgtggaagacaagtctgtggcttggtgagtctgtgtggccagcagcctctgatctgtgcagggtattaacgtgtcagggctgagtgttctgggatttctctagaggctggcaagaaccagttgttttgtcttgcgggtctgtcagggttggaaagtccaagccgtaggacccagtttcctttcttagctgatgtctttggccagaacaccgtgggctgttacttgctttgagttggaagcggtttgcatttacgcctgtaaatgtattcattcttaatttatgtaaggttttttttgtacgcaattctcgattctttgaagagatgacaacaaattttggttttctactgttatgtgagaacattaggccccagcaacacgtcattgtgtaaggaaaaataaaagtgctgccgtaaccaaaaaaaaaaa

SEQ ID NO: 433102 - DNA, 641 bp, Homo sapiens
  misc_feature (22)..(22): n is a, c, g, or t
  misc_feature (46)..(46): n is a, c, g, or t
catgagccggtccaggctactncacaaacaggaatagccttcgaanagattgtccttgaagcttgtatctgatatcagcactggattgtagaacttgttgctgattttgaccttgtattgaagttaactgttccccttggtattacatatctttgagttcaacctttagtacgtgtggcttggtcacttcgtggctaaggtaagaacgtgcttgtggaagacaagtctgtggcttggtgagtctgtgtggccagcagcctctgatctgtgcagggtattaacgtgtcagggctgagtgttctgggatttctctagaggctggcaagaaccagttgttttgtcttgcgggtctgtcagggttggaaagtccaagccgtaggacccagtttcctttcttagctgatgtctttggccagaacaccgtgggctgttacttgctttgagttggaagcggtttgcatttacgcctgtaaatgtattcattcttaatttatgtaaggttttttttgtacgcaattctcgattctttgaagagatgacaacaaattttggttttctactgttatgtgagaacattaggccccagcaacacgtcattgtgtaaggaaaaataaaagtgctgccgtaaccaaaaaaaaaaa

SEQ ID NO: 433103 - DNA, 506 bp, Homo sapiens
  misc_feature (22)..(22): n is a, c, g, or t
  misc_feature (46)..(46): n is a, c, g, or t
catgagccggtccaggctactncacaaacaggaatagccttcgaanagattgtccttgaagcttgtatctgatatcagcactggattgtagaacttgttgctgattttgaccttgtattgaagttaactgttccccttggtattaacgtgtcagggctgagtgttctgggatttctctagaggctggcaagaaccagttgttttgtcttgcgggtctgtcagggttggaaagtccaagccgtaggacccagtttcctttcttagctgatgtctttggccagaacaccgtgggctgttacttgctttgagttggaagcggtttgcatttacgcctgtaaatgtattcattcttaatttatgtaaggttttttttgtacgcaattctcgattctttgaagagatgacaacaaattttggttttctactgttatgtgagaacattaggccccagcaacacgtcattgtgtaaggaaaaataaaagtgctgccgtaaccaaaaaaaaaaa

SEQ ID NO: 433104 - DNA, 2788 bp, Homo sapiens
ggggaatctagatctagtaagacttcttcaaaatcctgatttccaaggccgatccagctgcttattcccaagtgctgacccacagccttcttttattccaggatctgcaactgtatctttccaacctagccaaccagatagaccgggaaacaggaattggggatgtgcccctggtgattctattggatgacctgagtgaagcaggctccatcagtgagttggtcaatggggccctcacctgcaagtatcataaatggtaagtaagctgggatcaagacaaaattcatcgaagtgggaggagggagaacccagtccaggacaacctatgagttgtgtgcatgtggcagaaagcaagtgtgaaggcaagtctaagtgaatctttttcccctttctccctacagtccctatattataggtaccaccaatcagcctgtaaaaatgacacccaaccatggcttgcacttgagcttcaggtaagacctctagctctggatgaaccttctgaccctacccaagagtcttcaatcctggactctggccaggaggcagtagataggagaaggaaagagaagtatccagagctttttgggctggaaatagaaagtagatgtatttgtcatgtcagttacaaggtggaggaggacacttgaggagagaaaaggcctgctaagctaagagagagccaggtaggttgctctaagcagaattaggattctctgcccgcacacgctgatctgggtcagtgatgtcagaaggttatccgaagagggctaccaatttgagaatcagctctaccaccccagggctgctgctctgagttccgatgtccccactattacttgaaaagaaaccaagtaggcattagtgagaagcaggcagaaggagggacagactggcaggggctgaaccctgacaatgtccccattgccactctgaccccactttccccatccttggtggcaggatgttgaccttctccaacaacgtggagccagccaatggcttcctggttcgttacctgaggaggaagctggtagagtcagacagcgacatcaatgccaacaaggaagagctgcttcgggtgctcgactgggtacccaagctgtggtatcatctccacaccttccttgagaagcacagcacctcagacttcctcatcggtactggggtccagcttcccccgggggtcaggaggtggcttcccttttccactgtaccacctggagggatgctcccttctcttcctggagtcttcggcatgtaaaggagctgcaagccttgtggcttcagacttagaaccacttaacgagccttcccaacacagttagcaccacttcaatcaccagaaagctaacccctctccttgtttttttcccacaattaacagaaaaaaggaggcacatatgtaggaaggaattaaacagctttcctcactcccttatctcacttctaccttgtgaagcaggacttatgagattgccatctaggcagtcagcacccactagtcttgacaactctaaatttcctttaatcctttgactgtcagacccctctgcctggtactaaggagtaaaagaggcacacaaccgggaagatctaggttcccagccatcttcatggccccatcctcttccctaggcccttgcttctttctgtcgtgtcccattggcattgaggacttccggacctggttcattgacctgtggaacaactctatcattccctatctacaggaaggagccaaggatgggataaaggtccatggacagaaagctgcttgggaggacccagtggaatgggtccgggacacacttccctggccatcagcccaacaagacagcaccccaagttctctggactcagatcctctgatggccatgctgctgaaacttcaagaagctgccaactacattgagtctccagatcgagaaaccatcctggaccccaaccttcaggcaacactttaagggttcggcaatcactgtcacccccggacagcagaacgctggcatcagctatcttagctcctcctctcccctctcctctttcagagcactggctctccagccccaggaggagaacaggagggaggaggagatgaaagaggagggacaggttcttggtgctgtacctttgagaacttcctaggaaggaatggtggggtggcgtttgggaacttgtgccccctaaacacatttactggcctcctctaatgactttggggaaaagatgattctgggtctttcccttgacttcttgtttcaattacaaactcctgggctttctggggaggggttcagaaaacatcaaaacactgcagcagttcctaaatgattctcacaagcaaccctgagagagacagtcttgtgagggagatctgggggaggcaggaagctcctcagattttctcacagacccttcccaattccatcaccactgccaacaactcctcccccagagatctggctggagcccagaaaaagaagcatgtggtttaaaaaatgtttaaatcaatctgtaaaaggtaaaaatgaaaaacaaaaacaagcaaacaaacaaaaaacaatggaaaagatgaagctggagagagaggaaccagttgccaaggtagagagctgcccgctcctgccctctggatgacataggggacatcaacaagacggctgccaacctgagaagtcaccaaaccacaaaaataaccttacagccttcagggaaagactaccagctctgtctttctaccctctaatttaacaatgcataagagtcaataaaccctactttttta

SEQ ID NO: 433105 - DNA, 586 bp, Homo sapiens
ccggttctgtgaagcagtacgccatgattggcctactaggaatccattcaggaatagtgcctgggataggcctgttatctacttgctgcatctctttaaatccatctcttctttcagctgagtaaaagaaatcagttaataaaagacaaggacctgtaacacacccatgcagtgactgtggggaatttgaggaaagactaggaattgggatcacttggcctagggaaaagaaccattgttcagacaggatcatctgccctctgaagggctactaaatggaggatggggccagcttgttctctatctccattgaagaccaaataagaagaattgcatttatgctgcagaatgaggggctgggctaagcaataattacctcaggaatttgaaaaggtcaacagagaggtgtgctatcttcttctgcacaggtctttatggacagattagacatccacctgcctgtatggaggcagaagaatagacaagggagctccttgtgggtatgaaaccctgaaaggctgtaatcccagcaatgggcaaaggggtaaggcatctgcaggttaacgggattcagctgaacccagct

SEQ ID NO: 433106 - DNA, 586 bp, Homo sapiens
gtgattgaggagttggttggttctcctttctcttatcttctgccactagacttgcctgaagtctcacatcctctctaaatctgttctatgtttttcccacttgtacttggccctagaacttcggatcaagagacaaaactcctcagatagcatctcaagcctcaacagcatcactagccattccagcatcggcagcagcaaggatgctgatgcgaaaaagaagaaaaaaaagagttgggtaggtaaaggtttggggggtggggaagtaggtagaaccgtggtggaccgccttcacctcagcatagggatcgaatccttccaggattaaccaaggtgtagtcccgtctaacactgagccctagtgtgatgtccgctcagagcatggtctcccagattctcccttccctcaatcatttcctacttgtccccaaggccacccctctgacctttatatgcatctgctttctttgggctctccatactggttaggccaagatgtatttggcaacagaaggatgctgaggatatactcagaaggaaacatcttatcagttctgtccccaccaccccccattcccttctatac

SEQ ID NO: 433107 - DNA, 860 bp, Homo sapiens
ccggttctgtgaagcagtacgccatgattggcctactaggaatccattcaggaatagtgcctgggataggcctgttatctacttgctgcatctctttaaatccatctcttctttcagctgagtaaaagaaatcagttaataaaagacaaggacctgtaacacacccatgcagtgactgtggggaatttgaggaaagactaggaattgggatcacttggcctagggaaaagaaccattgttcagacaggatcatctgccctctgaagggctactaaatggaggatggggccagcttgttctctatctccattgaagaccaaataagaagaattgcatttatgctgcagaatgaggggctgggctaagcaataattacctcaggaatttgaaaaggtcaacagagaggtgtgctatcttcttctgcacaggtctttatggacagattagacatccacctgcctgtatggaggcagaagaatagacaagggagctccttgtgggtatgaaaccctgaaaggctgtaatcccagcaatgggcaaagggtgagtcccactgcggccaccacgccaagaatcacccgctccaacagcagcaggaggagacctcctcctgctgctgtcctcctcctctcccaaactggcttcggcttgacttgtgacttgctttggccaacaggactttagcaaatgtggcacagtggatgcttgtggtttgtttggggtttgctctctggctgccctgaggcggcaggtgaagaagcccaggtcagctcaccggccagaaatcgggatcctctaactcttgctgctcctcagtgggaaagagagacaaagtatgtgagtcaatcctatcacaagac

SEQ ID NO: 433108 - DNA, 5183 bp, Homo sapiens
tggggtctgtagtgggcccgttatcgtgcatgtaccaggcgggcgtcccctccgagcggcagttcccacccacagttggcgcgtcagcagcaagctcagccatatctcccgcctggagctggtcgaatccctggactcggatgaggtggacctcaagtccggctacatgagcgacagtgacctcatgggcaagaccatgacggaggatgatgacatcactaccggctgggatgaaagcagctccatcagtagtggactcagcgatgcctcagacaatctcagttcagaagaattcaatgccagctcctcactcaactccctcccaagtactcccactgcttctcgcaggaactcaacaatagtgctacgcacagactcagagaagcgctcactggcagaaagtgggctgagctggtttagtgaatcagaggagaaagcccctaaaaaactggagtacgacagtggtagcctgaagatggaacctgggacttctaagtggcggagggagcggcctgagagctgtgatgattcatccaagggtggagaactgaaaaagcccatcagcctgggccaccctggttccctgaagaagggcaagaccccacctgtggctgtaacttcccccatcactcacacagcccagagtgccctcaaagtcgcaggcaaacctgagggcaaagctacagacaagggtaagcttgcagtgaagaatactgggctccaacgctcctcctctgatgctggtcgggaccgcctgagtgatgctaagaagcccccctcgggcattgctcgcccctccacttcgggatcctttggctacaagaagcctcctcctgccacaggcacagccactgtcatgcaaactggtggttcagccactctcagcaagatccagaagtcctcaggcatccctgtcaagccagtaaatgggcgcaagactagcttagatgtttccaacagtgcagagccaggattcctggctcctggagcccgttctaacatccagtaccgcagcctgccccggccagccaagtcaagttctatgagcgtgaccggcgggcggggtggacctcgccctgtgagcagcagcattgaccccagtctcctcagcaccaagcagggaggccttacgccttccagactgaaggagcctaccaaggtagccagtgggcggaccactccagcccctgtcaatcagacagatcgggaaaaggagaaggccaaagccaaggcagtggccttggactcagacaacatctccttgaagagtattggctccccagaaagtactcccaagaaccaagcaagccaccccacagccaccaagctggcagagctgccaccaacccctctcagggccacagcgaagagctttgtcaaaccaccctcactagccaatcttgacaaggtcaactccaacagtctggatctaccatcatccagtgataccacccatgcttcaaaggtcccagatctgcatgctacaagctcagcatctgggggccctctcccttcctgcttcacccccagtccggcacccatcctcaatattaactcagccagcttctcccagggcctggagctaatgagtggtttcagtgtgccaaaagagacccgcatgtaccccaaactctcaggcctgcacaggagcatggagtccctccagatgccaatgagcctccccagtgccttccccagcagtactcccgtccccaccccacctgctccccctgctgctcccacagaagaagagacggaagagctgacttggagtggaagccccagagctgggcaactggacagtaatcagcgggatcggaacactcttcccaagaaagggctcaggtaccagcttcagtcccaggaggagaccaaggagaggcgacattcccataccattggtgggctgcctgaatccgatgaccagtcagagctgccttctccccctgcacttcccatgtctctgagtgcaaagggccaacttaccaacatagtgagtcccactgcggccaccacgccaagaatcacccgctccaacagcatccccacccacgaggcggccttcgagctgtacagcggctcccaaatggggagcaccctgtccctggccgagagacccaagggaatgattcggtcaggatccttccgagaccccacggacgatgttcacggctcagtgctgtccctggcctccagtgcctcctccacctactcctcagctgaggagaggatgcaatctgagcaaatccggaagcttcgtagggaactggaatcatcccaggaaaaagtggccaccttgacgtctcagctttctgccaatgctaatctggtggctgcttttgagcagagcctggtgaatatgacatcccgcctgcgacacctggcagagacggccgaggagaaggacactgagctgctggatttgcgagaaaccatagactttctgaagaaaaagaactctgaggcccaggcagtcattcagggagcccttaatgcctcagaaaccacacccaaagaacttcggatcaagagacaaaactcctcagatagcatctcaagcctcaacagcatcactagccattccagcatcggcagcagcaaggatgctgatgcgaaaaagaagaaaaaaaagagttggcttcgaagttccttcaacaaagcgttcagtataaaaaaggggcccaagtcagcttcctcatactcggatatagaggagattgctacacccgactcttcagccccctcatcccccaaactacagcatggttctacagagactgcttcaccctccatcaagtcctccacctcgtcctccgtgggcactgatgtcaccgagggccctgctcacccagccccccacactaggctgttccatgcaaatgaggaggaggagccagagaagaaggaggtatcggagctgcgctctgagctatgggagaaggaaatgaagcttacagacatccgcttggaggccctcaactctgcccaccaactggatcagcttcgggagaccatgcacaacatgcagttggaggtggacctgctgaaagcagagaatgaccgactgaaggtagccccaggcccctcatcaggctccactccagggcaggtccctggatcatctgcattatcttccccacgccgctccctaggcctggcactcacccattccttcggccccagtcttgcagacacagacctgtcacccatggatggcatcagtacttgtggtccaaaggaggaagtgaccctccgggtggtggtgaggatgcccccgcagcacatcatcaaaggggacttgaagcagcaggaattcttcctgggctgtagcaaggtcagtggaaaagttgactggaagatgctggatgaagctgttttccaagtgttcaaggactatatttctaaaatggacccagcctctaccctgggactaagcactgagtccatccatggctacagcatcagccacgtgaaacgagtgttggatgcagagccccccgagatgcctccttgccgtcgaggtgtcaataacatatcagtctccctcaaaggtctgaaggagaaatgcgtcgacagcctggtgttcgagacgctgatccccaagccgatgatgcagcactacataagcctcctgctgaagcaccggcgcctcgtcctctcgggccccagcggcacgggcaagacctacctgaccaatcgcttggccgagtacctggtggagcgctctggccgtgaggtcacagagggcatcgtcagcaccttcaacatgcaccagcagtcttgcaaggatctgcaactgtatctttccaacctagccaaccagatagaccgggaaacaggaattggggatgtgcccctggtgattctattggatgacctgagtgaagcaggctccatcagtgagttggtcaatggggccctcacctgcaagtatcataaatgtccctatattataggtaccaccaatcagcctgtaaaaatgacacccaaccatggcttgcacttgagcttcaggatgttgaccttctccaacaacgtggagccagccaatggcttcctggttcgttacctgaggaggaagctggtagagtcagacagcgacatcaatgccaacaaggaagagctgcttcgggtgctcgactgggtacccaagctgtggtatcatctccacaccttccttgagaagcacagcacctcagacttcctcatcggcccttgcttctttctgtcgtgtcccattggcattgaggacttccggacctggttcattgacctgtggaacaactctatcattccctatctacaggaaggagccaaggatgggataaaggtccatggacagaaagctgcttgggaggacccagtggaatgggtccgggacacacttccctggccatcagcccaacaagaccaatcaaagctgtaccacctgcccccacccaccgtgggccctcacagcattgcctcacctcccgaggataggacagtcaaagacagcaccccaagttctctggactcagatcctctgatggccatgctgctgaaacttcaagaagctgccaactacattgagtctccagatcgagaaaccatcctggaccccaaccttcaggcaacactttaagggttcggcaatcactgtcacccccggacagcagaacgctggcatcagctatcttagctcctcctctcccctctcctctttcagagcactggctctccagccccaggaggagaacaggagggaggaggagatgaaagaggagggacaggttcttggtgctgtacctttgagaacttcctaggaaggaatggtggggtggcgtttgggaacttgtgccccctaaacacatttactggcctcctctaatgactttggggaaaagatgattctgggtctttcccttgacttcttgtttcaattacaaactcctgggctttctggggaggggttcagaaaacatcaaaacactgcagcagttcctaaatgattctcacaagcaaccctgagagagacagtcttgtgagggagatctgggggaggcaggaagctcctcagattttctcacagacccttcccaattccatcaccactgccaacaactcctcccccagagatctggctggagcccagaaaaagaagcatgtggtttaaaaaatgtttaaatcaatctgtaaaaggt

SEQ ID NO: 433109 - DNA, 4988 bp, Homo sapiens
tggggtctgtagtgggcccgttatcgtgcatgtaccaggcgggcgtcccctccgagcggcagttcccacccacagttggcgcgtcagcagcaagctcagccatatctcccgcctggagctggtcgaatccctggactcggatgaggtggacctcaagtccggctacatgagcgacagtgacctcatgggcaagaccatgacggaggatgatgacatcactaccggctgggatgaaagcagctccatcagtagtggactcagcgatgcctcagacaatctcagttcagaagaattcaatgccagctcctcactcaactccctcccaagtactcccactgcttctcgcaggaactcaacaatagtgctacgcacagactcagagaagcgctcactggcagaaagtgggctgagctggtttagtgaatcagaggagaaagcccctaaaaaactggagtacgacagtggtagcctgaagatggaacctgggacttctaagtggcggagggagcggcctgagagctgtgatgattcatccaagggtggagaactgaaaaagcccatcagcctgggccaccctggttccctgaagaagggcaagaccccacctgtggctgtaacttcccccatcactcacacagcccagagtgccctcaaagtcgcaggcaaacctgagggcaaagctacagacaagggtaagcttgcagtgaagaatactgggctccaacgctcctcctctgatgctggtcgggaccgcctgagtgatgctaagaagcccccctcgggcattgctcgcccctccacttcgggatcctttggctacaagaagcctcctcctgccacaggcacagccactgtcatgcaaactggtggttcagccactctcagcaagatccagaagtcctcaggcatccctgtcaagccagtaaatgggcgcaagactagcttagatgtttccaacagtgcagagccaggattcctggctcctggagcccgttctaacatccagtaccgcagcctgccccggccagccaagtcaagttctatgagcgtgaccggcgggcggggtggacctcgccctgtgagcagcagcattgaccccagtctcctcagcaccaagcagggaggccttacgccttccagactgaaggagcctaccaaggtagccagtgggcggaccactccagcccctgtcaatcagacagatcgggaaaaggagaaggccaaagccaaggcagtggccttggactcagacaacatctccttgaagagtattggctccccagaaagtactcccaagaaccaagcaagccaccccacagccaccaagctggcagagctgccaccaacccctctcagggccacagcgaagagctttgtcaaaccaccctcactagccaatcttgacaaggtcaactccaacagtctggatctaccatcatccagtgataccacccatgcttcaaaggtcccagatctgcatgctacaagctcagcatctgggggccctctcccttcctgcttcacccccagtccggcacccatcctcaatattaactcagccagcttctcccagggcctggagctaatgagtggtttcagtgtgccaaaagagacccgcatgtaccccaaactctcaggcctgcacaggagcatggagtccctccagatgccaatgagcctccccagtgccttccccagcagtactcccgtccccaccccacctgctccccctgctgctcccacagaagaagagacggaagagctgacttggagtggaagccccagagctgggcaactggacagtaatcagcgggatcggaacactcttcccaagaaagggctcaggtaccagcttcagtcccaggaggagaccaaggagaggcgacattcccataccattggtgggctgcctgaatccgatgaccagtcagagctgccttctccccctgcacttcccatgtctctgagtgcaaagggccaacttaccaacatagttcacggctcagtgctgtccctggcctccagtgcctcctccacctactcctcacaaatccggaagcttcgtagggaactggaatcatcccaggaaaaagtggccaccttgacgtctcagctttctgccaatgctaatctggtggctgcttttgagcagagcctggtgaatatgacatcccgcctgcgacacctggcagagacggccgaggagaaggacactgagctgctggatttgcgagaaaccatagactttctgaagaaaaagaactctgaggcccaggcagtcattcagggagcccttaatgcctcagaaaccacacccaaagaacttcggatcaagagacaaaactcctcagatagcatctcaagcctcaacagcatcactagccattccagcatcggcagcagcaaggatgctgatgcgaaaaagaagaaaaaaaagagttggcttcgaagttccttcaacaaagcgttcagtataaaaaaggggcccaagtcagcttcctcatactcggatatagaggagattgctacacccgactcttcagccccctcatcccccaaactacagcatggttctacagagactgcttcaccctccatcaagtcctccacctcgtcctccgtgggcactgatgtcaccgagggccctgctcacccagccccccacactaggctgttccatgcaaatgaggaggaggagccagagaagaaggaggtatcggagctgcgctctgagctatgggagaaggaaatgaagcttacagacatccgcttggaggccctcaactctgcccaccaactggatcagcttcgggagaccatgcacaacatgcagttggaggtggacctgctgaaagcagagaatgaccgactgaaggtagccccaggcccctcatcaggctccactccagggcaggtccctggatcatctgcattatcttccccacgccgctccctaggcctggcactcacccattccttcggccccagtcttgcagacacagacctgtcacccatggatggcatcagtacttgtggtccaaaggaggaagtgaccctccgggtggtggtgaggatgcccccgcagcacatcatcaaaggggacttgaagcagcaggaattcttcctgggctgtagcaaggtcagtggaaaagttgactggaagatgctggatgaagctgttttccaagtgttcaaggactatatttctaaaatggacccagcctctaccctgggactaagcactgagtccatccatggctacagcatcagccacgtgaaacgagtgttggatgcagagccccccgagatgcctccttgccgtcgaggtgtcaataacatatcagtctccctcaaaggtctgaaggagaaatgcgtcgacagcctggtgttcgagacgctgatccccaagccgatgatgcagcactacataagcctcctgctgaagcaccggcgcctcgtcctctcgggccccagcggcacgggcaagacctacctgaccaatcgcttggccgagtacctggtggagcgctctggccgtgaggtcacagagggcatcgtcagcaccttcaacatgcaccagcagtcttgcaaggatctgcaactgtatctttccaacctagccaaccagatagaccgggaaacaggaattggggatgtgcccctggtgattctattggatgacctgagtgaagcaggctccatcagtgagttggtcaatggggccctcacctgcaagtatcataaatgtccctatattataggtaccaccaatcagcctgtaaaaatgacacccaaccatggcttgcacttgagcttcaggatgttgaccttctccaacaacgtggagccagccaatggcttcctggttcgttacctgaggaggaagctggtagagtcagacagcgacatcaatgccaacaaggaagagctgcttcgggtgctcgactgggtacccaagctgtggtatcatctccacaccttccttgagaagcacagcacctcagacttcctcatcggcccttgcttctttctgtcgtgtcccattggcattgaggacttccggacctggttcattgacctgtggaacaactctatcattccctatctacaggaaggagccaaggatgggataaaggtccatggacagaaagctgcttgggaggacccagtggaatgggtccgggacacacttccctggccatcagcccaacaagaccaatcaaagctgtaccacctgcccccacccaccgtgggccctcacagcattgcctcacctcccgaggataggacagtcaaagacagcaccccaagttctctggactcagatcctctgatggccatgctgctgaaacttcaagaagctgccaactacattgagtctccagatcgagaaaccatcctggaccccaaccttcaggcaacactttaagggttcggcaatcactgtcacccccggacagcagaacgctggcatcagctatcttagctcctcctctcccctctcctctttcagagcactggctctccagccccaggaggagaacaggagggaggaggagatgaaagaggagggacaggttcttggtgctgtacctttgagaacttcctaggaaggaatggtggggtggcgtttgggaacttgtgccccctaaacacatttactggcctcctctaatgactttggggaaaagatgattctgggtctttcccttgacttcttgtttcaattacaaactcctgggctttctggggaggggttcagaaaacatcaaaacactgcagcagttcctaaatgattctcacaagcaaccctgagagagacagtcttgtgagggagatctgggggaggcaggaagctcctcagattttctcacagacccttcccaattccatcaccactgccaacaactcctcccccagagatctggctggagcccagaaaaagaagcatgtggtttaaaaaatgtttaaatcaatctgtaaaaggt

SEQ ID NO: 433110 - DNA, 5195 bp, Homo sapiens
gttccaagttgcatgtgcttgaaatagatttaattcttattccccacagtttaggtatttttcattagtacatcaatttgacacactgaatgcaagactattaatcccactgcttctcgcaggaactcaacaatagtgctacgcacagactcagagaagcgctcactggcagaaagtgggctgagctggtttagtgaatcagaggagaaagcccctaaaaaactggagtacgacagtggtagcctgaagatggaacctgggacttctaagtggcggagggagcggcctgagagctgtgatgattcatccaagggtggagaactgaaaaagcccatcagcctgggccaccctggttccctgaagaagggcaagaccccacctgtggctgtaacttcccccatcactcacacagcccagagtgccctcaaagtcgcaggcaaacctgagggcaaagctacagacaagggtaagcttgcagtgaagaatactgggctccaacgctcctcctctgatgctggtcgggaccgcctgagtgatgctaagaagcccccctcgggcattgctcgcccctccacttcgggatcctttggctacaagaagcctcctcctgccacaggcacagccactgtcatgcaaactggtggttcagccactctcagcaagatccagaagtcctcaggcatccctgtcaagccagtaaatgggcgcaagactagcttagatgtttccaacagtgcagagccaggattcctggctcctggagcccgttctaacatccagtaccgcagcctgccccggccagccaagtcaagttctatgagcgtgaccggcgggcggggtggacctcgccctgtgagcagcagcattgaccccagtctcctcagcaccaagcagggaggccttacgccttccagactgaaggagcctaccaaggtagccagtgggcggaccactccagcccctgtcaatcagacagatcgggaaaaggagaaggccaaagccaaggcagtggccttggactcagacaacatctccttgaagagtattggctccccagaaagtactcccaagaaccaagcaagccaccccacagccaccaagctggcagagctgccaccaacccctctcagggccacagcgaagagctttgtcaaaccaccctcactagccaatcttgacaaggtcaactccaacagtctggatctaccatcatccagtgataccacccatgcttcaaaggtcccagatctgcatgctacaagctcagcatctgggggccctctcccttcctgcttcacccccagtccggcacccatcctcaatattaactcagccagcttctcccagggcctggagctaatgagtggtttcagtgtgccaaaagagacccgcatgtaccccaaactctcaggcctgcacaggagcatggagtccctccagatgccaatgagcctccccagtgccttccccagcagtactcccgtccccaccccacctgctccccctgctgctcccacagaagaagagacggaagagctgacttggagtggaagccccagagctgggcaactggacagtaatcagcgggatcggaacactcttcccaagaaagggctcaggtaccagcttcagtcccaggaggagaccaaggagaggcgacattcccataccattggtgggctgcctgaatccgatgaccagtcagagctgccttctccccctgcacttcccatgtctctgagtgcaaagggccaacttaccaacatagtgagtcccactgcggccaccacgccaagaatcacccgctccaacagcatccccacccacgaggcggccttcgagctgtacagcggctcccaaatggggagcaccctgtccctggccgagagacccaagggaatgattcggtcaggatccttccgagaccccacggacgatgttcacggctcagtgctgtccctggcctccagtgcctcctccacctactcctcacaaatccggaagcttcgtagggaactggaatcatcccaggaaaaagtggccaccttgacgtctcagctttctgccaatgctaatctggtggctgcttttgagcagagcctggtgaatatgacatcccgcctgcgacacctggcagagacggccgaggagaaggacactgagctgctggatttgcgagaaaccatagactttctgaagaaaaagaactctgaggcccaggcagtcattcagggagcccttaatgcctcagaaaccacacccaaagaacttcggatcaagagacaaaactcctcagatagcatctcaagcctcaacagcatcactagccattccagcatcggcagcagcaaggatgctgatgcgaaaaagaagaaaaaaaagagttggcttcgaagttccttcaacaaagcgttcagtataaaaaaggggcccaagtcagcttcctcatactcggatatagaggagattgctacacccgactcttcagccccctcatcccccaaactacagcatggttctacagagactgcttcaccctccatcaagtcctccacctcgtcctccgtgggcactgatgtcaccgagggccctgctcacccagccccccacactaggctgttccatgcaaatgaggaggaggagccagagaagaaggaggtatcggagctgcgctctgagctatgggagaaggaaatgaagcttacagacatccgcttggaggccctcaactctgcccaccaactggatcagcttcgggagaccatgcacaacatgcagttggaggtggacctgctgaaagcagagaatgaccgactgaaggtagccccaggcccctcatcaggctccactccagggcaggtccctggatcatctgcattatcttccccacgccgctccctaggcctggcactcacccattccttcggccccagtcttgcagacacagacctgtcacccatggatggcatcagtacttgtggtccaaaggaggaagtgaccctccgggtggtggtgaggatgcccccgcagcacatcatcaaaggggacttgaagcagcaggaattcttcctgggctgtagcaaggtcagtggaaaagttgactggaagatgctggatgaagctgttttccaagtgttcaaggactatatttctaaaatggacccagcctctaccctgggactaagcactgagtccatccatggctacagcatcagccacgtgaaacgagtgttggatgcagagccccccgagatgcctccttgccgtcgaggtgtcaataacatatcagtctccctcaaaggtctgaaggagaaatgcgtcgacagcctggtgttcgagacgctgatccccaagccgatgatgcagcactacataagcctcctgctgaagcaccggcgcctcgtcctctcgggccccagcggcacgggcaagacctacctgaccaatcgcttggccgagtacctggtggagcgctctggccgtgaggtcacagagggcatcgtcagcaccttcaacatgcaccagcagtcttgcaaggatctgcaactgtatctttccaacctagccaaccagatagaccgggaaacaggaattggggatgtgcccctggtgattctattggatgacctgagtgaagcaggctccatcagtgagttggtcaatggggccctcacctgcaagtatcataaatgtccctatattataggtaccaccaatcagcctgtaaaaatgacacccaaccatggcttgcacttgagcttcaggatgttgaccttctccaacaacgtggagccagccaatggcttcctggttcgttacctgaggaggaagctggtagagtcagacagcgacatcaatgccaacaaggaagagctgcttcgggtgctcgactgggtacccaagctgtggtatcatctccacaccttccttgagaagcacagcacctcagacttcctcatcggcccttgcttctttctgtcgtgtcccattggcattgaggacttccggacctggttcattgacctgtggaacaactctatcattccctatctacaggaaggagccaaggatgggataaaggtccatggacagaaagctgcttgggaggacccagtggaatgggtccgggacacacttccctggccatcagcccaacaagaccaatcaaagctgtaccacctgcccccacccaccgtgggccctcacagcattgcctcacctcccgaggataggacagtcaaagacagcaccccaagttctctggactcagatcctctgatggccatgctgctgaaacttcaagaagctgccaactacattgagtctccagatcgagaaaccatcctggaccccaaccttcaggcaacactttaagggttcggcaatcactgtcacccccggacagcagaacgctggcatcagctatcttagctcctcctctcccctctcctctttcagagcactggctctccagccccaggaggagaacaggagggaggaggagatgaaagaggagggacaggttcttggtgctgtacctttgagaacttcctaggaaggaatggtggggtggcgtttgggaacttgtgccccctaaacacatttactggcctcctctaatgactttggggaaaagatgattctgggtctttcccttgacttcttgtttcaattacaaactcctgggctttctggggaggggttcagaaaacatcaaaacactgcagcagttcctaaatgattctcacaagcaaccctgagagagacagtcttgtgagggagatctgggggaggcaggaagctcctcagattttctcacagacccttcccaattccatcaccactgccaacaactcctcccccagagatctggctggagcccagaaaaagaagcatgtggtttaaaaaatgtttaaatcaatctgtaaaaggtaaaaatgaaaaacaaaaacaagcaaacaaacaaaaaacaatggaaaagatgaagctggagagagaggaaccagttgccaaggtagagagctgcccgctcctgccctctggatgacataggggacatcaacaagacggctgccaacctgagaagtcaccaaaccacaaaaataaccttacagccttcagggaaagactaccagctctgtctttctaccctctaatttaacaatgcataagagtcaataaaccctactttttta

SEQ ID NO: 433111 - DNA, 5891 bp, Homo sapiens
gttccaagttgcatgtgcttgaaatagatttaattcttattccccacagtttaggtatttttcattagtacatcaatttgacacactgaatgcaagactattaatcccactgcttctcgcaggaactcaacaatagtgctacgcacagactcagagaagcgctcactggcagaaagtgggctgagctggtttagtgaatcagaggagaaagcccctaaaaaactggagtacgacagtggtagcctgaagatggaacctgggacttctaagtggcggagggagcggcctgagagctgtgatgattcatccaagggtggagaactgaaaaagcccatcagcctgggccaccctggttccctgaagaagggcaagaccccacctgtggctgtaacttcccccatcactcacacagcccagagtgccctcaaagtcgcaggcaaacctgagggcaaagctacagacaagggtaagcttgcagtgaagaatactgggctccaacgctcctcctctgatgctggtcgggaccgcctgagtgatgctaagaagcccccctcgggcattgctcgcccctccacttcgggatcctttggctacaagaagcctcctcctgccacaggcacagccactgtcatgcaaactggtggttcagccactctcagcaagatccagaagtcctcaggcatccctgtcaagccagtaaatgggcgcaagactagcttagatgtttccaacagtgcagagccaggattcctggctcctggagcccgttctaacatccagtaccgcagcctgccccggccagccaagtcaagttctatgagcgtgaccggcgggcggggtggacctcgccctgtgagcagcagcattgaccccagtctcctcagcaccaagcagggaggccttacgccttccagactgaaggagcctaccaaggtagccagtgggcggaccactccagcccctgtcaatcagacagatcgggaaaaggagaaggccaaagccaaggcagtggccttggactcagacaacatctccttgaagagtattggctccccagaaagtactcccaagaaccaagcaagccaccccacagccaccaagctggcagagctgccaccaacccctctcagggccacagcgaagagctttgtcaaaccaccctcactagccaatcttgacaaggtcaactccaacagtctggatctaccatcatccagtgataccacccatgcttcaaaggtcccagatctgcatgctacaagctcagcatctgggggccctctcccttcctgcttcacccccagtccggcacccatcctcaatattaactcagccagcttctcccagggcctggagctaatgagtggtttcagtgtgccaaaagagacccgcatgtaccccaaactctcaggcctgcacaggagcatggagtccctccagatgccaatgagcctccccagtgccttccccagcagtactcccgtccccaccccacctgctccccctgctgctcccacagaagaagagacggaagagctgacttggagtggaagccccagagctgggcaactggacagtaatcagcgggatcggaacactcttcccaagaaagggctcaggtaccagcttcagtcccaggaggagaccaaggagaggcgacattcccataccattggtgggctgcctgaatccgatgaccagtcagagctgccttctccccctgcacttcccatgtctctgagtgcaaagggccaacttaccaacatagtgagtcccactgcggccaccacgccaagaatcacccgctccaacagcatccccacccacgaggcggccttcgagctgtacagcggctcccaaatggggagcaccctgtccctggccgagagacccaagggaatgattcggtcaggatccttccgagaccccacggacgatgttcacggctcagtgctgtccctggcctccagtgcctcctccacctactcctcacaaatccggaagcttcgtagggaactggaatcatcccaggaaaaagtggccaccttgacgtctcagctttctgccaatgctaatctggtggctgcttttgagcagagcctggtgaatatgacatcccgcctgcgacacctggcagagacggccgaggagaaggacactgagctgctggatttgcgagaaaccatagactttctgaagaaaaagaactctgaggcccaggcagtcattcagggagcccttaatgcctcagaaaccacacccaaagaacttcggatcaagagacaaaactcctcagatagcatctcaagcctcaacagcatcactagccattccagcatcggcagcagcaaggatgctgatgcgaaaaagaagaaaaaaaagagttggcttcgaagttccttcaacaaagcgttcagtataaaaaaggggcccaagtcagcttcctcatactcggatatagaggagattgctacacccgactcttcagccccctcatcccccaaactacagcatggttctacagagactgcttcaccctccatcaagtcctccacctcgtcctccgtgggcactgatgtcaccgagggccctgctcacccagccccccacactaggctgttccatgcaaatgaggaggaggagccagagaagaaggaggtatcggagctgcgctctgagctatgggagaaggaaatgaagcttacagacatccgcttggaggccctcaactctgcccaccaactggatcagcttcgggagaccatgcacaacatgcagttggaggtggacctgctgaaagcagagaatgaccgactgaaggtagccccaggcccctcatcaggctccactccagggcaggtccctggatcatctgcattatcttccccacgccgctccctaggcctggcactcacccattccttcggccccagtcttgcagacacagacctgtcacccatggatggcatcagtacttgtggtccaaaggaggaagtgaccctccgggtggtggtgaggatgcccccgcagcacatcatcaaaggggacttgaagcagcaggaattcttcctgggctgtagcaaggtcagtggaaaagttgactggaagatgctggatgaagctgttttccaagtgttcaaggactatatttctaaaatggacccagcctctaccctgggactaagcactgagtccatccatggctacagcatcagccacgtgaaacgagtgttggatgcagagccccccgagatgcctccttgccgtcgaggtgtcaataacatatcagtctccctcaaaggtctgaaggagaaatgcgtcgacagcctggtgttcgagacgctgatccccaagccgatgatgcagcactacataagcctcctgctgaagcaccggcgcctcgtcctctcgggccccagcggcacgggcaagacctacctgaccaatcgcttggccgagtacctggtggagcgctctggccgtgaggtcacagagggcatcgtcagcaccttcaacatgcaccagcagtcttgcaaggatctgcaactgtatctttccaacctagccaaccagatagaccgggaaacaggaattggggatgtgcccctggtgattctattggatgacctgagtgaagcaggctccatcagtgagttggtcaatggggccctcacctgcaagtatcataaatgtccctatattataggtaccaccaatcagcctgtaaaaatgacacccaaccatggcttgcacttgagcttcaggatgttgaccttctccaacaacgtggagccagccaatggcttcctggttcgttacctgaggaggaagctggtagagtcagacagcgacatcaatgccaacaaggaagagctgcttcgggtgctcgactgggtacccaagctgtggtatcatctccacaccttccttgagaagcacagcacctcagacttcctcatcggcccttgcttctttctgtcgtgtcccattggcattgaggacttccggacctggttcattgacctgtggaacaactctatcattccctatctacaggaaggagccaaggatgggataaaggtccatggacagaaagctgcttgggaggacccagtggaatgggtccgggacacacttccctggccatcagcccaacaagaccaatcaaagctgtaccacctgcccccacccaccgtgggccctcacagcattgcctcacctcccgaggataggacagtcaaagacagcaccccaagttctctggactcagatcctctgatggccatgctgctgaaacttcaagaagctgccaactacattgagtctccagatcgagaaaccatcctggaccccaaccttcaggcaacactttaagggttcggcaatcactgtcacccccggacagcagaacgctggcatcagctatcttagctcctcctctcccctctcctctttcagagcactggctctccagccccaggaggagaacaggagggaggaggagatgaaagaggagggacaggttcttggtgctgtacctttgagaacttcctaggaaggaatggtggggtggcgtttgggaacttgtgccccctaaacacatttactggcctcctctaatgactttggggaaaagatgattctgggtctttcccttgacttcttgtttcaattacaaactcctgggctttctggggaggggttcagaaaacatcaaaacactgcagcagttcctaaatgattctcacaagcaaccctgagagagacagtcttgtgagggagatctgggggaggcaggaagctcctcagattttctcacagacccttcccaattccatcaccactgccaacaactcctcccccagagatctggctggagcccagaaaaagaagcatgtggtttaaaaaatgtttaaatcaatctgtaaaaggtaaaaatgaaaaacaaaaacaagcaaacaaacaaaaaacaatggaaaagatgaagctggagagagaggaaccagttgccaaggtagagagctgcccgctcctgccctctggatgacataggggacatcaacaagacggctgccaacctgagaagtcaccaaaccacaaaaataaccttacagccttcagggaaagactaccagctctgtctttctaccctctaatttaacaatgcataagagtcaataaaccctacttttttaaaaaaaaaaaaaaaaaaaaaaaaaaaaaaaaaaaaaaaaaaaaaaaaaaaaaaaaaaaaaaaaaaaaaagagagagggggggcgggcggcgcgcgaggagaggccccccgcggagggagcgccacaaacctacggagcgcccaccaagaatgtttggtagagaaaagagaggggcgcccacaaaagaggagggcgagtgatatatataaacaacaaagagagggaggcggggcgagggcacaaaacaaaggacgcggccgcggcgaggcgaacagaagcgcggccacacggcggggaagcaccttgtgagagcaaagcgcaagcaacccacaagacagcgggggggagcgagagcagacaaacaagggggagccacaaaaaatcaccccacgagcaagaggtagcgttacggcagggaggaaaacgacagggggggcgcgcaacataaataaaaccaaaagcggagacagcgccgctatgtgatagcacgccgtggcgcgagaagaaacaaaaacacaaaaggaccaggccaaacatttaacacgcgaagtgcacgccaggagacgccagcacacaacaagacgatagcggagagaacaataggggcgggaataagagatgacaacaaaccagccaagcagagcattattttgctctccaccacagcacgaagcgcctagcagtaaccaacaacca

SEQ ID NO: 433112 - DNA, 7004 bp, Homo sapiens
gttccaagttgcatgtgcttgaaatagatttaattcttattccccacagtttaggtatttttcattagtacatcaatttgacacactgaatgcaagactattaatcccactgcttctcgcaggaactcaacaatagtgctacgcacagactcagagaagcgctcactggcagaaagtgggctgagctggtttagtgaatcagaggagaaagcccctaaaaaactggagtacgacagtggtagcctgaagatggaacctgggacttctaagtggcggagggagcggcctgagagctgtgatgattcatccaagggtggagaactgaaaaagcccatcagcctgggccaccctggttccctgaagaagggcaagaccccacctgtggctgtaacttcccccatcactcacacagcccagagtgccctcaaagtcgcaggcaaacctgagggcaaagctacagacaagggtaagcttgcagtgaagaatactgggctccaacgctcctcctctgatgctggtcgggaccgcctgagtgatgctaagaagcccccctcgggcattgctcgcccctccacttcgggatcctttggctacaagaagcctcctcctgccacaggcacagccactgtcatgcaaactggtggttcagccactctcagcaagatccagaagtcctcaggcatccctgtcaagccagtaaatgggcgcaagactagcttagatgtttccaacagtgcagagccaggattcctggctcctggagcccgttctaacatccagtaccgcagcctgccccggccagccaagtcaagttctatgagcgtgaccggcgggcggggtggacctcgccctgtgagcagcagcattgaccccagtctcctcagcaccaagcagggaggccttacgccttccagactgaaggagcctaccaaggtagccagtgggcggaccactccagcccctgtcaatcagacagatcgggaaaaggagaaggccaaagccaaggcagtggccttggactcagacaacatctccttgaagagtattggctccccagaaagtactcccaagaaccaagcaagccaccccacagccaccaagctggcagagctgccaccaacccctctcagggccacagcgaagagctttgtcaaaccaccctcactagccaatcttgacaaggtcaactccaacagtctggatctaccatcatccagtgataccacccatgcttcaaaggtcccagatctgcatgctacaagctcagcatctgggggccctctcccttcctgcttcacccccagtccggcacccatcctcaatattaactcagccagcttctcccagggcctggagctaatgagtggtttcagtgtgccaaaagagacccgcatgtaccccaaactctcaggcctgcacaggagcatggagtccctccagatgccaatgagcctccccagtgccttccccagcagtactcccgtccccaccccacctgctccccctgctgctcccacagaagaagagacggaagagctgacttggagtggaagccccagagctgggcaactggacagtaatcagcgggatcggaacactcttcccaagaaagggctcaggtaccagcttcagtcccaggaggagaccaaggagaggcgacattcccataccattggtgggctgcctgaatccgatgaccagtcagagctgccttctccccctgcacttcccatgtctctgagtgcaaagggccaacttaccaacatagtgagtcccactgcggccaccacgccaagaatcacccgctccaacagcatccccacccacgaggcggccttcgagctgtacagcggctcccaaatggggagcaccctgtccctggccgagagacccaagggaatgattcggtcaggatccttccgagaccccacggacgatgttcacggctcagtgctgtccctggcctccagtgcctcctccacctactcctcacaaatccggaagcttcgtagggaactggaatcatcccaggaaaaagtggccaccttgacgtctcagctttctgccaatgctaatctggtggctgcttttgagcagagcctggtgaatatgacatcccgcctgcgacacctggcagagacggccgaggagaaggacactgagctgctggatttgcgagaaaccatagactttctgaagaaaaagaactctgaggcccaggcagtcattcagggagcccttaatgcctcagaaaccacacccaaagaacttcggatcaagagacaaaactcctcagatagcatctcaagcctcaacagcatcactagccattccagcatcggcagcagcaaggatgctgatgcgaaaaagaagaaaaaaaagagttggcttcgaagttccttcaacaaagcgttcagtataaaaaaggggcccaagtcagcttcctcatactcggatatagaggagattgctacacccgactcttcagccccctcatcccccaaactacagcatggttctacagagactgcttcaccctccatcaagtcctccacctcgtcctccgtgggcactgatgtcaccgagggccctgctcacccagccccccacactaggctgttccatgcaaatgaggaggaggagccagagaagaaggaggtatcggagctgcgctctgagctatgggagaaggaaatgaagcttacagacatccgcttggaggccctcaactctgcccaccaactggatcagcttcgggagaccatgcacaacatgcagttggaggtggacctgctgaaagcagagaatgaccgactgaaggtagccccaggcccctcatcaggctccactccagggcaggtccctggatcatctgcattatcttccccacgccgctccctaggcctggcactcacccattccttcggccccagtcttgcagacacagacctgtcacccatggatggcatcagtacttgtggtccaaaggaggaagtgaccctccgggtggtggtgaggatgcccccgcagcacatcatcaaaggggacttgaagcagcaggaattcttcctgggctgtagcaaggtcagtggaaaagttgactggaagatgctggatgaagctgttttccaagtgttcaaggactatatttctaaaatggacccagcctctaccctgggactaagcactgagtccatccatggctacagcatcagccacgtgaaacgagtgttggatgcagagccccccgagatgcctccttgccgtcgaggtgtcaataacatatcagtctccctcaaaggtctgaaggagaaatgcgtcgacagcctggtgttcgagacgctgatccccaagccgatgatgcagcactacataagcctcctgctgaagcaccggcgcctcgtcctctcgggccccagcggcacgggcaagacctacctgaccaatcgcttggccgagtacctggtggagcgctctggccgtgaggtcacagagggcatcgtcagcaccttcaacatgcaccagcagtcttgcaaggatctgcaactgtatctttccaacctagccaaccagatagaccgggaaacaggaattggggatgtgcccctggtgattctattggatgacctgagtgaagcaggctccatcagtgagttggtcaatggggccctcacctgcaagtatcataaatggtaagtaagctgggatcaagacaaaattcatcgaagtgggaggagggagaacccagtccaggacaacctatgagttgtgtgcatgtggcagaaagcaagtgtgaaggcaagtctaagtgaatctttttcccctttctccctacagtccctatattataggtaccaccaatcagcctgtaaaaatgacacccaaccatggcttgcacttgagcttcaggtaagacctctagctctggatgaaccttctgaccctacccaagagtcttcaatcctggactctggccaggaggcagtagataggagaaggaaagagaagtatccagagctttttgggctggaaatagaaagtagatgtatttgtcatgtcagttacaaggtggaggaggacacttgaggagagaaaaggcctgctaagctaagagagagccaggtaggttgctctaagcagaattaggattctctgcccgcacacgctgatctgggtcagtgatgtcagaaggttatccgaagagggctaccaatttgagaatcagctctaccaccccagggctgctgctctgagttccgatgtccccactattacttgaaaagaaaccaagtaggcattagtgagaagcaggcagaaggagggacagactggcaggggctgaaccctgacaatgtccccattgccactctgaccccactttccccatccttggtggcaggatgttgaccttctccaacaacgtggagccagccaatggcttcctggttcgttacctgaggaggaagctggtagagtcagacagcgacatcaatgccaacaaggaagagctgcttcgggtgctcgactgggtacccaagctgtggtatcatctccacaccttccttgagaagcacagcacctcagacttcctcatcggtactggggtccagcttcccccgggggtcaggaggtggcttcccttttccactgtaccacctggagggatgctcccttctcttcctggagtcttcggcatgtaaaggagctgcaagccttgtggcttcagacttagaaccacttaacgagccttcccaacacagttagcaccacttcaatcaccagaaagctaacccctctccttgtttttttcccacaattaacagaaaaaaggaggcacatatgtaggaaggaattaaacagctttcctcactcccttatctcacttctaccttgtgaagcaggacttatgagattgccatctaggcagtcagcacccactagtcttgacaactctaaatttcctttaatcctttgactgtcagacccctctgcctggtactaaggagtaaaagaggcacacaaccgggaagatctaggttcccagccatcttcatggccccatcctcttccctaggcccttgcttctttctgtcgtgtcccattggcattgaggacttccggacctggttcattgacctgtggaacaactctatcattccctatctacaggaaggagccaaggatgggataaaggtccatggacagaaagctgcttgggaggacccagtggaatgggtccgggacacacttccctggccatcagcccaacaagaccaatcaaagctgtaccacctgcccccacccaccgtgggccctcacagcattgcctcacctcccgaggataggacagtcaaagacagcaccccaagttctctggactcagatcctctgatggccatgctgctgaaacttcaagaagctgccaactacattgagtctccagatcgagaaaccatcctggaccccaaccttcaggcaacactttaagggttcggcaatcactgtcacccccggacagcagaacgctggcatcagctatcttagctcctcctctcccctctcctctttcagagcactggctctccagccccaggaggagaacaggagggaggaggagatgaaagaggagggacaggttcttggtgctgtacctttgagaacttcctaggaaggaatggtggggtggcgtttgggaacttgtgccccctaaacacatttactggcctcctctaatgactttggggaaaagatgattctgggtctttcccttgacttcttgtttcaattacaaactcctgggctttctggggaggggttcagaaaacatcaaaacactgcagcagttcctaaatgattctcacaagcaaccctgagagagacagtcttgtgagggagatctgggggaggcaggaagctcctcagattttctcacagacccttcccaattccatcaccactgccaacaactcctcccccagagatctggctggagcccagaaaaagaagcatgtggtttaaaaaatgtttaaatcaatctgtaaaaggtaaaaatgaaaaacaaaaacaagcaaacaaacaaaaaacaatggaaaagatgaagctggagagagaggaaccagttgccaaggtagagagctgcccgctcctgccctctggatgacataggggacatcaacaagacggctgccaacctgagaagtcaccaaaccacaaaaataaccttacagccttcagggaaagactaccagctctgtctttctaccctctaatttaacaatgcataagagtcaataaaccctacttttttaaaaaaaaaaaaaaaaaaaaaaaaaaaaaaaaaaaaaaaaaaaaaaaaaaaaaaaaaaaaaaaaaaaaaagagagagggggggcgggcggcgcgcgaggagaggccccccgcggagggagcgccacaaacctacggagcgcccaccaagaatgtttggtagagaaaagagaggggcgcccacaaaagaggagggcgagtgatatatataaacaacaaagagagggaggcggggcgagggcacaaaacaaaggacgcggccgcggcgaggcgaacagaagcgcggccacacggcggggaagcaccttgtgagagcaaagcgcaagcaacccacaagacagcgggggggagcgagagcagacaaacaagggggagccacaaaaaatcaccccacgagcaagaggtagcgttacggcagggaggaaaacgacagggggggcgcgcaacataaataaaaccaaaagcggagacagcgccgctatgtgatagcacgccgtggcgcgagaagaaacaaaaacacaaaaggaccaggccaaacatttaacacgcgaagtgcacgccaggagacgccagcacacaacaagacgatagcggagagaacaataggggcgggaataagagatgacaacaaaccagccaagcagagcattattttgctctccaccacagcacgaagcgcctagcagtaaccaacaacca

SEQ ID NO: 433113 - DNA, 6519 bp, Homo sapiens
  misc_feature (2699)..(2699): n is a, c, g, or t
  misc_feature (3524)..(3524): n is a, c, g, or t
  misc_feature (3731)..(3731): n is a, c, g, or t
  misc_feature (3739)..(3739): n is a, c, g, or t
  misc_feature (3761)..(3761): n is a, c, g, or t
  misc_feature (3787)..(3787): n is a, c, g, or t
  misc_feature (3880)..(3880): n is a, c, g, or t
  misc_feature (4333)..(4334): n is a, c, g, or t
  misc_feature (4486)..(4486): n is a, c, g, or t
tggggtctgtagtgggcccgttatcgtgcatgtaccaggcgggcgtcccctccgagcggcagttcccacccacagttggcgcgtcagcagcaagctcagccatatctcccgcctggagctggtcgaatccctggactcggatgaggtggacctcaagtccggctacatgagcgacagtgacctcatgggcaagaccatgacggaggatgatgacatcactaccggctgggatgaaagcagctccatcagtagtggactcagcgatgcctcagacaatctcagttcagaagaattcaatgccagctcctcactcaactccctcccaagtactcccactgcttctcgcaggaactcaacaatagtgctacgcacagactcagagaagcgctcactggcagaaagtgggctgagctggtttagtgaatcagaggagaaagcccctaaaaaactggagtacgacagtggtagcctgaagatggaacctgggacttctaagtggcggagggagcggcctgagagctgtgatgattcatccaagggtggagaactgaaaaagcccatcagcctgggccaccctggttccctgaagaagggcaagaccccacctgtggctgtaacttcccccatcactcacacagcccagagtgccctcaaagtcgcaggcaaacctgagggcaaagctacagacaagggtaagcttgcagtgaagaatactgggctccaacgctcctcctctgatgctggtcgggaccgcctgagtgatgctaagaagcccccctcgggcattgctcgcccctccacttcgggatcctttggctacaagaagcctcctcctgccacaggcacagccactgtcatgcaaactggtggttcagccactctcagcaagatccagaagtcctcaggcatccctgtcaagccagtaaatgggcgcaagactagcttagatgtttccaacagtgcagagccaggattcctggctcctggagcccgttctaacatccagtaccgcagcctgccccggccagccaagtcaagttctatgagcgtgaccggcgggcggggtggacctcgccctgtgagcagcagcattgaccccagtctcctcagcaccaagcagggaggccttacgccttccagactgaaggagcctaccaaggtagccagtgggcggaccactccagcccctgtcaatcagacagatcgggaaaaggagaaggccaaagccaaggcagtggccttggactcagacaacatctccttgaagagtattggctccccagaaagtactcccaagaaccaagcaagccaccccacagccaccaagctggcagagctgccaccaacccctctcagggccacagcgaagagctttgtcaaaccaccctcactagccaatcttgacaaggtcaactccaacagtctggatctaccatcatccagtgataccacccatgcttcaaaggtcccagatctgcatgctacaagctcagcatctgggggccctctcccttcctgcttcacccccagtccggcacccatcctcaatattaactcagccagcttctcccagggcctggagctaatgagtggtttcagtgtgccaaaagagacccgcatgtaccccaaactctcaggcctgcacaggagcatggagtccctccagatgccaatgagcctccccagtgccttccccagcagtactcccgtccccaccccacctgctccccctgctgctcccacagaagaagagacggaagagctgacttggagtggaagccccagagctgggcaactggacagtaatcagcgggatcggaacactcttcccaagaaagggctcaggtaccagcttcagtcccaggaggagaccaaggagaggcgacattcccataccattggtgggctgcctgaatccgatgaccagtcagagctgccttctccccctgcacttcccatgtctctgagtgcaaagggccaacttaccaacatagtgagtcccactgcggccaccacgccaagaatcacccgctccaacagcatccccacccacgaggcggccttcgagctgtacagcggctcccaaatggggagcaccctgtccctggccgagagacccaagggaatgattcggtcaggatccttccgagaccccacggacgatgttcacggctcagtgctgtccctggcctccagtgcctcctccacctactcctcacaaatccggaagcttcgtagggaactggaatcatcccaggaaaaagtggccaccttgacgtctcagctttctgccaatgctaatctggtggctgcttttgagcagagcctggtgaatatgacatcccgcctgcgacacctggcagagacggccgaggagaaggacactgagctgctggatttgcgagaaaccatagactttctgaagaaaaagaactctgaggcccaggcagtcattcagggagcccttaatgcctcagaaaccacacccaaaggtaggacatccagccacagattgagagggaacagggagcaggaaagtaagagtattacagatttttatctgggcccatagtattccaagtcctatatcaagtctctagaaggtgagggcctttagataccctttagtgtgatgtctggactggtcagtgaggagtaccaggggcatgaccccagcttcctagggcatgaaggcaagnagaggagacctgtaagccccaggggtcctctccttaacctttacctcacggccaaagagccatcaaagaccatcgttaaaatagccctttacatttttatgcaaatgtgttgtgtgtccacacacacacaaacaatcttatttgatcctcactttagttctccaactactcttccaatgaaacaaccaaagctcacataggttatatggtgctgaaatggcaagttagcctggacgtttagtaaccagtcaagctttgctacagaagtcaagatggatgggagtctgatgccacaaaatctgtgatctctaactccagtcaggtcttcaagataccttggcagtcctcttacttgtccacagtcagttttcttttttattccactaccagtgattcccagctttcattgcttttttcaagctcctcattccaccactgatttgccttactctgaacatagctttggcgccccccttagttaagaaaatgaacattttcaagagagaactccattgacttttccccactccatgcgtttatattcatccaatacttatttatttgtctccattttgttggaaggattcatcccttctggccaagagtgaccgcttatctaatgttttgggatgccctctttagcaaccatacaacccccctttacccaacacatgcccttttctacctctctaatctcttatgctctattcattccttccctgcttataaacctgccaaaggctcttgtatgttaaaggggaaagatgtatcaatctatgttctaactataatcttatttctttgcttcctccagtcgatcctacntttccacctccctttcacacctaaccccactataattatgcttctgtcaccatcattctaccaaaaacactttcactgcagtcaccagtgactcccatttttccaaaatccaacttacaatttttagtacttattttccttttttttttttttttgagtcggagtctcactctgttgcccaggctggagtgcagtggcgtgatctcngcttaccncagcctccgcctcccaggttcnagcaattctcctgcctcagcctcctnagtagctgggactacaggcgcatgccaccatgcctggctaatttttgtatttttagtagagatggggtttcaccatgttagcaaagtgttttnaagactcatccatgttgtgtcatgtatccacacttcattcctttttgtggctgaataatattccattgtgtggatataccacagtttgtttagctgttcatcagttgataggtaggcattgagttgttttcactttttgcctattatgaataatgctgccataaacattcatgtacaagtttgtgtgtggacatatgttttttgttctctggggtatatacctagaagtggaattgctgggtcatatggtaactctatgtttgactttttgaggaattggcaagctgttttccagagcagctacaccattttacattcctgtcagcagcatatgagggtgcgatatctccacattctttgtttttgtttttttgagatggagtctcactctgttggccaggctggagtgcaatggtgcaatcttggctcactgcaacctccgcctcccaggtnnaagtaattctcctgcctcagcctcctgagaagctgggattacaggtgcccgccaccacacccagctaattatttgtttgcatttttagtagagacaggtttcaccatgttggccaggctagtctcgaactcctgacctgcagtgatccgccnacctcggcgtcccaaagtgctgggattacaggcgtgagccacacacccagccctatagctccacattcttgctaacacttactgacctcttttttgtaatagctagcttagtgggtgtgaggtggtatctcgttgtggttttgattttcatattcttaatggctaataccaagcatcttttcatgtgcttatttgctatttgtatgtctttatggagaaatgtgtattcaaatccttggcccacttttaaaatcaggttatttgtcttttgttgttgagctttaagagttttttaataattctgaatattagacccttatcagacacatgatttgaaaaatagtttctctcattgtatgggttgctgttttgctttcttgaaaatattctttgaagaacaaaagttttccattttcatgaggcatcatttatctagttttttcctttggctacttgtgctttaggtgctgtatctaagaaattattgcctaatccagggtcatgaagacttactcctggaattccttctaaatttttttttagttttaggtctttgttccatttttagtaaatttttgtacatggtatgaggtaggcagtctaacttcattcttttacatgagaatatccagttgttccagcatcatttgctgaaaagactattttttcccccactgaattgtcttggcactctaggaaatcaattgactatacatatatgagtttcattctagactttcagttctattccattcttctatatgagtttctttctagactttcagttctattccattcttctatatgtctatccttggccagtaccacattgttttgattactgtagctttgtagtaagtttggaaattgggaagtgtgagtcctccaactttgttctttttcaaggttgttttggctactctgtgtcctttgcatttccatgtgaatttcaggattcgtttgttaatctcagattgaattttgctagggattgcattgaatctgtatatcaatttagagagtattgcctcttaacaatgttaagtcttccaatccatgaacaggcatgcctttatctaaatattctttcatttctttcagtgatattttgcagtttttcagcatatgaaccttgtacttattttgttaaacttagtttttatactgttctaaactgaattgttttcttaatttctcttttgagttatagattactagtgtataaaaatacaattgattttttgcacattgatcttatatcctgcagacttgctgggctcacttatcagctcaattggttttacaatctcttcttaatctgtatttctatccatatcagtctcctgagttccagacctttacttccaaccacgtttggatgtttccacttagttgacctcatagagatatctctaacttaatatgtccaaaattaaagtcatccccttcaccccacttacaacaaacacacaagccaaccttttcccttctgcagtttgcgtatctcaggtattatcatttgcctggttgcccaagcctctaatatgagaatcatctttgattcctcactgtttcaccctgtatagtcagttagttctaactcctacgtagatctcaattctatccctcttctgtattgtcactaccctggctcaggtttttatcattcttctcctagaatatttcaataatttccttactggtcttgctgtgctcgttcttccagtgctttccttgcccccagagtaatccaattatatcagttaagatgagaaattactccaggccaggcacagcggcccacgctataatcccagcacttcagaaggccaagacgggaggttcactttaggccaggagttcaagacaagcctgggcaacatagtgagacctcattcttaaaaaattagcctgtagtcctagttactccagaggctgagtctggaggactgcttgggcccaggaggtagaagctgcagtgagccacagtggttgcactgactccagcctgggtgagagagagacctggtttc

SEQ ID NO: 433114 - DNA, 2404 bp, Homo sapiens
tttagaaatatagtccttggacacttggaaaacagcttcatccagcatcttccagtcaacttttccactgaccttgctacagcccgaggaagaattcctgccgctccctaggcggtgggactcagcccattcttcggccccagcttgcagacacagacctgtcacccatggatggcatcagtacttgtggtccaaaggaggaagtgaccctccgggtggtggtgaggatgcccccgcagcacatcatcaaaggggacttgaagcagcaggaattcttcctgggctgtagcaaggtcagtggaaaagttgactggaagatgctggatgaagctgttttccaagtgttcaaggactatatttctaaaatggacccagcctctaccctgggactaagcactgagtccatccatggctacagcatcagccacgtgaaacgagtgttggatgcagagccccccgagatgcctccttgccgtcgaggtgtcaataacatatcagtctccctcaaaggtctgaaggagaaatgcgtcgacagcctggtgttcgagacgctgatccccaagccgatgatgcagcactacataagcctcctgctgaagcaccggcgcctcgtcctctcgggccccagcggcacgggcaagacctacctgaccaatcgcttggccgagtacctggtggagcgctctggccgtgaggtcacagagggcatcgtcagcaccttcaacatgcaccagcagtcttgcaaggatctgcaactgtatctttccaacctagccaaccagatagaccgggaaacaggaattggggatgtgcccctggtgattctattggatgacctgagtgaagcaggctccatcagtgagttggtcaatggggccctcacctgcaagtatcataaatgtccctatattataggtaccaccaatcagcctgtaaaaatgacacccaaccatggcttgcacttgagcttcaggatgttgaccttctccaacaacgtggagccagccaatggcttcctggttcgttacctgaggaggaagctggtagagtcagacagcgacatcaatgccaacaaggaagagctgcttcgggtgctcgactgggtacccaagctgtggtatcatctccacaccttccttgagaagcacagcacctcagacttcctcatcggcccttgcttctttctgtcgtgtcccattggcattgaggacttccggacctggttcattgacctgtggaacaactctatcattccctatctacaggaaggagccaaggatgggataaaggtccatggacagaaagctgcttgggaggacccagtggaatgggtccgggacacacttccctggccatcagcccaacaagaccaatcaaagctgtaccacctgcccccacccaccgtgggccctcacagcattgcctcacctcccgaggataggacagtcaaagacagcaccccaagttctctggactcagatcctctgatggccatgctgctgaaacttcaagaagctgccaactacattgagtctccagatcgagaaaccatcctggaccccaaccttcaggcaacactttaagggttcggcaatcactgtcacccccggacagcagaacgctggcatcagctatcttagctcctcctctcccctctcctctttcagagcactggctctccagccccaggaggagaacaggagggaggaggagatgaaagaggagggacaggttcttggtgctgtacctttgagaacttcctaggaaggaatggtggggtggcgtttgggaacttgtgccccctaaacacatttactggcctcctctaatgactttggggaaaagatgattctgggtctttcccttgacttcttgtttcaattacaaactcctgggctttctggggaggggttcagaaaacatcaaaacactgcagcagttcctaaatgattctcacaagcaaccctgagagagacagtcttgtgagggagatctgggggaggcaggaagctcctcagattttctcacagacccttcccaattccatcaccactgccaacaactcctcccccagagatctggctggagcccagaaaaagaagcatgtggtttaaaaaatgtttaaatcaatctgtaaaaggtaaaaatgaaaaacaaaaacaagcaaacaaacaaaaaacaatggaaaagatgaagctggagagagaggaaccagttgccaaggtagagagctgcccgctcctgccctctggatgacataggggacatcaacaagacggctgccaacctgagaagtcaccaaaccacaaaaataaccttacagccttcagggaaagactaccagctctgtctttctaccctctaatttaacaatgcataagagtcaataaaccctactttttta

SEQ ID NO: 433115 - DNA, 4391 bp, Homo sapiens
gttccaagttgcatgtgcttgaaatagatttaattcttattccccacagtttaggtatttttcattagtacatcaatttgacacactgaatgcaagactattaatcccactgcttctcgcaggaactcaacaatagtgctacgcacagactcagagaagcgctcactggcagaaagtgggctgagctggtttagtgaatcagaggagaaagcccctaaaaaactggagtacgacagtggtagcctgaagatggaacctgggacttctaagtggcggagggagcggcctgagagctgtgatgattcatccaagggtggagaactgaaaaagcccatcagcctgggccaccctggttccctgaagaagggcaagaccccacctgtggctgtaacttcccccatcactcacacagcccagagtgccctcaaagtcgcaggcaaacctgagggcaaagctacagacaagggtaagcttgcagtgaagaatactgggctccaacgctcctcctctgatgctggtcgggaccgcctgagtgatgctaagaagcccccctcgggcattgctcgcccctccacttcgggatcctttggctacaagaagcctcctcctgccacaggcacagccactgtcatgcaaactggtggttcagccactctcagcaagatccagaagtcctcaggcatccctgtcaagccagtaaatgggcgcaagactagcttagatgtttccaacagtgcagagccaggattcctggctcctggagcccgttctaacatccagtaccgcagcctgccccggccagccaagtcaagttctatgagcgtgaccggcgggcggggtggacctcgccctgtgagcagcagcattgaccccagtctcctcagcaccaagcagggaggccttacgccttccagactgaaggagcctaccaaggtagccagtgggcggaccactccagcccctgtcaatcagacagatcgggaaaaggagaaggccaaagccaaggcagtggccttggactcagacaacatctccttgaagagtattggctccccagaaagtactcccaagaaccaagcaagccaccccacagccaccaagctggcagagctgccaccaacccctctcagggccacagcgaagagctttgtcaaaccaccctcactagccaatcttgacaaggtcaactccaacagtctggatctaccatcatccagtgataccacccatgcttcaaaggtcccagatctgcatgctacaagctcagcatctgggggccctctcccttcctgcttcacccccagtccggcacccatcctcaatattaactcagccagcttctcccagggcctggagctaatgagtggtttcagtgtgccaaaagagacccgcatgtaccccaaactctcaggcctgcacaggagcatggagtccctccagatgccaatgagcctccccagtgccttccccagcagtactcccgtccccaccccacctgctccccctgctgctcccacagaagaagagacggaagagctgacttggagtggaagccccagagctgggcaactggacagtaatcagcgggatcggaacactcttcccaagaaagggctcaggtaccagcttcagtcccaggaggagaccaaggagaggcgacattcccataccattggtgggctgcctgaatccgatgaccagtcagagctgccttctccccctgcacttcccatgtctctgagtgcaaagggccaacttaccaacatagtgagtcccactgcggccaccacgccaagaatcacccgctccaacagcatccccacccacgaggcggccttcgagctgtacagcggctcccaaatggggagcaccctgtccctggccgagagacccaagggaatgattcggtcaggatccttccgagaccccacggacgatgttcacggctcagtgctgtccctggcctccagtgcctcctccacctactcctcacaaatccggaagcttcgtagggaactggaatcatcccaggaaaaagtggccaccttgacgtctcagctttctgccaatgctaatctggtggctgcttttgagcagagcctggtgaatatgacatcccgcctgcgacacctggcagagacggccgaggagaaggacactgagctgctggatttgcgagaaaccatagactttctgaagaaaaagaactctgaggcccaggcagtcattcagggagcccttaatgcctcagaaaccacacccaaagaacttcggatcaagagacaaaactcctcagatagcatctcaagcctcaacagcatcactagccattccagcatcggcagcagcaaggatgctgatgcgaaaaagaagaaaaaaaagagttggcttcgaagttccttcaacaaagcgttcagtataaaaaaggggcccaagtcagcttcctcatactcggatatagaggagattgctacacccgactcttcagccccctcatcccccaaactacagcatggttctacagagactgcttcaccctccatcaagtcctccacctcgtcctccgtgggcactgatgtcaccgagggccctgctcacccagccccccacactaggctgttccatgcaaatgaggaggaggagccagagaagaaggaggtatcggagctgcgctctgagctatgggagaaggaaatgaagcttacagacatccgcttggaggccctcaactctgcccaccaactggatcagcttcgggagaccatgcacaacatgcagttggaggtggacctgctgaaagcagagaatgaccgactgaaggtagccccaggcccctcatcaggctccactccagggcaggtccctggatcatctgcattatcttccccacgccgctccctaggcctggcactcacccattccttcggccccagtcttgcagacacagacctgtcacccatggatggcatcagtacttgtggtccaaaggaggaagtgaccctccgggtggtggtgaggatgcccccgcagcacatcatcaaaggggacttgaagcagcaggaattcttcctgggctgtagcaaggtcagtggaaaagttgactggaagatgctggatgaagctgttttccaagtgttcaaggactatatttctaaaatggacccagcctctaccctgggactaagcactgagtccatccatggctacagcatcagccacgtgaaacgagtgttggatgcagagccccccgagatgcctccttgccgtcgaggtgtcaataacatatcagtctccctcaaaggtctgaaggagaaatgcgtcgacagcctggtgttcgagacgctgatccccaagccgatgatgcagcactacataagcctcctgctgaagcaccggcgcctcgtcctctcgggccccagcggcacgggcaagacctacctgaccaatcgcttggccgagtacctggtggagcgctctggccgtgaggtcacagagggcatcgtcagcaccttcaacatgcaccagcagtcttgcaaggatctgcaactgtatctttccaacctagccaaccagatagaccgggaaacaggaattggggatgtgcccctggtgattctattggatgacctgagtgaagcaggctccatcagtgagttggtcaatggggccctcacctgcaagtatcataaatgtccctatattataggtaccaccaatcagcctgtaaaaatgacacccaaccatggcttgcacttgagcttcaggatgttgaccttctccaacaacgtggagccagccaatggcttcctggttcgttacctgaggaggaagctggtagagtcagacagcgacatcaatgccaacaaggaagagctgcttcgggtgctcgactgggtacccaagctgtggtatcatctccacaccttccttgagaagcacagcacctcagacttcctcatcggcccttgcttctttctgtcgtgtcccattggcattgaggacttccggacctggttcattgacctgtggaacaactctatcattccctatctacaggaaggagccaaggatgggataaaggtccatggacagaaagctgcttgggaggacccagtggaatgggtccgggacacacttccctggccatcagcccaacaagaccaatcaaagctgtaccacctgcccccacccaccgtgggccctcacagcattgcctcacctcccgaggataggacagtcaaagacagcaccccaagttctctggactcagatcctctgatggccatgctgctgaaacttcaagaagctgccaactacattgagtctccagatcgagaaaccatcctggaccccaaccttcaggcagggcccgagagtacaggccgagagta

SEQ ID NO: 433116 - DNA, 1917 bp, Homo sapiens
cattgaggacttccggacctggttcattgacctgtagatagggaatgatagagttgttccacaggtcaatgaaccaggtccggaaggagccaaggatgggataaaggtccatggacagaaagctgcttgggaggacccagtggaatgggtccgggacacacttccctggccatcagcccaacaagaccaatcaaagctgtaccacctgcccccacccaccgtgggccctcacagcattgcctcacctcccgaggataggacagtcaaagacagcaccccaagttctctggactcagatcctctgatggccatgctgctgaaacttcaagaagctgccaactacattgagtctccagatcgagaaaccatcctggaccccaaccttcaggcaacactttaagggttcggcaatcactgtcacccccggacagcagaacgctggcatcagctatcttagctcctcctctcccctctcctctttcagagcactggctctccagccccaggaggagaacaggagggaggaggagatgaaagaggagggacaggttcttggtgctgtacctttgagaacttcctaggaaggaatggtggggtggcgtttgggaacttgtgccccctaaacacatttactggcctcctctaatgactttggggaaaagatgattctgggtctttcccttgacttcttgtttcaattacaaactcctgggctttctggggaggggttcagaaaacatcaaaacactgcagcagttcctaaatgattctcacaagcaaccctgagagagacagtcttgtgagggagatctgggggaggcaggaagctcctcagattttctcacagacccttcccaattccatcaccactgccaacaactcctcccccagagatctggctggagcccagaaaaagaagcatgtggtttaaaaaatgtttaaatcaatctgtaaaaggtaaaaatgaaaaacaaaaacaagcaaacaaacaaaaaacaatggaaaagatgaagctggagagagaggaaccagttgccaaggtagagagctgcccgctcctgccctctggatgacataggggacatcaacaagacggctgccaacctgagaagtcaccaaaccacaaaaataaccttacagccttcagggaaagactaccagctctgtctttctaccctctaatttaacaatgcataagagtcaataaaccctacttttttaaaaaaaaaaaaaaaaaaaaaaaaaaaaaaaaaaaaaaaaaaaaaaaaaaaaaaaaaaaaaaaaaaaaaagagagagggggggcgggcggcgcgcgaggagaggccccccgcggagggagcgccacaaacctacggagcgcccaccaagaatgtttggtagagaaaagagaggggcgcccacaaaagaggagggcgagtgatatatataaacaacaaagagagggaggcggggcgagggcacaaaacaaaggacgcggccgcggcgaggcgaacagaagcgcggccacacggcggggaagcaccttgtgagagcaaagcgcaagcaacccacaagacagcgggggggagcgagagcagacaaacaagggggagccacaaaaaatcaccccacgagcaagaggtagcgttacggcagggaggaaaacgacagggggggcgcgcaacataaataaaaccaaaagcggagacagcgccgctatgtgatagcacgccgtggcgcgagaagaaacaaaaacacaaaaggaccaggccaaacatttaacacgcgaagtgcacgccaggagacgccagcacacaacaagacgatagcggagagaacaataggggcgggaataagagatgacaacaaaccagccaagcagagcattattttgctctccaccacagcacgaagcgcctagcagtaaccaacaacca

SEQ ID NO: 433117 - DNA, 885 bp, Homo sapiens
tggggtctgtagtgggcccgttatcgtgcatgtaccaggcgggcgtcccctccgagcggcagttcccacccacagttggcgcgtcagcagcaagctcagccatatctcccgcctggagctggtcgaatccctggactcggatgaggtggacctcaagtccggctacatgagcgacagtgacctcatgggcaagaccatgacggaggatgatgacatcactaccgggtaagcgcaggggcttcttggatggcgggggaggatggtggaaagaccactgggatgcgacgccttaaaagtggagtggaacccaaaacgggttttggtttgctgtgctgctatgaaagtacacaaaagtgtgctgtgtacactttgtgattgcctctgaaattcgatgtggtttattctagacttgggtgtggtgtaggcagggcctacatccaaggagctgattggtcaatgaaggcgcctccctctcattggtctctgtggctgtcattctgtcaccctcctccctggctctttgccctcaataaactggctcaaagagccttggaaaagcattttattcccagctcttatgcgaactctgtgtagaccctggacaactaaatctgctttcccatttgcaaaaaaaaaaaaaaccaaaaaggttattaacatcgtatctgtctacctaagaagagaaaatgagagcttgtgggtgaaatcgctagtcaaacagtgagtagcagcagtagctccacttcctttgccaggggttcgtaacccctcagttccctatccgacccctgtggtcctcagtgtctgctccttgggtttcttcctgtgcaaaccttctaccaatcatgcaacttcctaatccctacccagcgtgtcaaatccttc

SEQ ID NO: 433118 - DNA, 225 bp, Homo sapiens
gccccccgagatgcctccttgccgtcgaggtgtcaataacatatcagtctccctcaaaggtcagtctttgtctcttggggtgaggtggtgtggcatgaaggcagggacaggatcatcaaataatccatcatgcattcattcaccaagaactcactgagaaggtataatatgaagatgcttaagtaatgtgagatataaaaagatgagtaagacccagtcctaact

SEQ ID NO: 433119 - DNA, 325 bp, Homo sapiens
ccaccacgcctggccagttttttattgttttatttttattttttggtagagtcagggtctctctttgttttcaaagctgattgcaaactcctggcttcaagctatccttccaccttggcctcccaaagtgttgggattttgttgttgttgtttcccttctgtgggcaggacccagagtcccaactctcataaatccatctttttgcccccctttagatggccatgctgctgaaacttcaagaagctgccaactacattgagtctccagatcgagaaaccatcctggaccccaaccttcaggcaacactttaagggttcggcaatc

SEQ ID NO: 433120 - DNA, 491 bp, Homo sapiens
ctggaagagaccatgtccagcctgcgagggtcccaggtgactcacagctccctggagatgacctgctacgacagcgatgatgccaacccacgcagcgtgtccagcctctccaaccgctcgtcccctctgtcatggcgctatggccagtccagtccgcggctgcaggctggtgacgcgccctctgtgggtgggagctgccgctcggaggggacgcccgcctggtacatgcacggcgaacgggcccactactcccacaccatgcccatgcgcagccccagcaagctcagccatatctcccgcctggagctggtcgaatccctggactcggatgaggtggacctcaagtccggctacatgagcgacagtgacctcatgggcaagaccatgacggaggatgatgacatcactaccggacccagagtcccagagaaagaggacagtgcagaatgtcctggatctccggcagaacctggaagagaccatgtcctgcc

SEQ ID NO: 433121 - DNA, 4933 bp, Homo sapiens
gttccaagttgcatgtgcttgaaatagatttaattcttattccccacagtttaggtatttttcattagtacatcaatttgacacactgaatgcaagactattaatcccactgcttctcgcaggaactcaacaatagtgctacgcacagactcagagaagcgctcactggcagaaagtgggctgagctggtttagtgaatcagaggagaaagcccctaaaaaactggagtacgacagtggtagcctgaagatggaacctgggacttctaagtggcggagggagcggcctgagagctgtgatgattcatccaagggtggagaactgaaaaagcccatcagcctgggccaccctggttccctgaagaagggcaagaccccacctgtggctgtaacttcccccatcactcacacagcccagagtgccctcaaagtcgcaggcaaacctgagggcaaagctacagacaagggtaagcttgcagtgaagaatactgggctccaacgctcctcctctgatgctggtcgggaccgcctgagtgatgctaagaagcccccctcgggcattgctcgcccctccacttcgggatcctttggctacaagaagcctcctcctgccacaggcacagccactgtcatgcaaactggtggttcagccactctcagcaagatccagaagtcctcaggcatccctgtcaagccagtaaatgggcgcaagactagcttagatgtttccaacagtgcagagccaggattcctggctcctggagcccgttctaacatccagtaccgcagcctgccccggccagccaagtcaagttctatgagcgtgaccggcgggcggggtggacctcgccctgtgagcagcagcattgaccccagtctcctcagcaccaagcagggaggccttacgccttccagactgaaggagcctaccaaggtagccagtgggcggaccactccagcccctgtcaatcagacagatcgggaaaaggagaaggccaaagccaaggcagtggccttggactcagacaacatctccttgaagagtattggctccccagaaagtactcccaagaaccaagcaagccaccccacagccaccaagctggcagagctgccaccaacccctctcagggccacagcgaagagctttgtcaaaccaccctcactagccaatcttgacaaggtcaactccaacagtctggatctaccatcatccagtgataccacccatgcttcaaaggtcccagatctgcatgctacaagctcagcatctgggggccctctcccttcctgcttcacccccagtccggcacccatcctcaatattaactcagccagcttctcccagggcctggagctaatgagtggtttcagtgtgccaaaagagacccgcatgtaccccaaactctcaggcctgcacaggagcatggagtccctccagatgccaatgagcctccccagtgccttccccagcagtactcccgtccccaccccacctgctccccctgctgctcccacagaagaagagacggaagagctgacttggagtggaagccccagagctgggcaactggacagtaatcagcgggatcggaacactcttcccaagaaagggctcaggtaccagcttcagtcccaggaggagaccaaggagaggcgacattcccataccattggtgggctgcctgaatccgatgaccagtcagagctgccttctccccctgcacttcccatgtctctgagtgcaaagggccaacttaccaacatagtgagtcccactgcggccaccacgccaagaatcacccgctccaacagcatccccacccacgaggcggccttcgagctgtacagcggctcccaaatggggagcaccctgtccctggccgagagacccaagggaatgattcggtcaggatccttccgagaccccacggacgatgttcacggctcagtgctgtccctggcctccagtgcctcctccacctactcctcacaaatccggaagcttcgtagggaactggaatcatcccaggaaaaagtggccaccttgacgtctcagctttctgccaatgctaatctggtggctgcttttgagcagagcctggtgaatatgacatcccgcctgcgacacctggcagagacggccgaggagaaggacactgagctgctggatttgcgagaaaccatagactttctgaagaaaaagaactctgaggcccaggcagtcattcagggagcccttaatgcctcagaaaccacacccaaagaacttcggatcaagagacaaaactcctcagatagcatctcaagcctcaacagcatcactagccattccagcatcggcagcagcaaggatgctgatgcgaaaaagaagaaaaaaaagagttggcttcgaagttccttcaacaaagcgttcagtataaaaaaggggcccaagtcagcttcctcatactcggatatagaggagattgctacacccgactcttcagccccctcatcccccaaactacagcatggttctacagagactgcttcaccctccatcaagtcctccacctcgtcctccgtgggcactgatgtcaccgagggccctgctcacccagccccccacactaggctgttccatgcaaatgaggaggaggagccagagaagaaggaggtatcggagctgcgctctgagctatgggagaaggaaatgaagcttacagacatccgcttggaggccctcaactctgcccaccaactggatcagcttcgggagaccatgcacaacatgcagttggaggtggacctgctgaaagcagagaatgaccgactgaaggtagccccaggcccctcatcaggctccactccagggcaggtccctggatcatctgcattatcttccccacgccgctccctaggcctggcactcacccattccttcggccccagtcttgcagacacagacctgtcacccatggatggcatcagtacttgtggtccaaaggaggaagtgaccctccgggtggtggtgaggatgcccccgcagcacatcatcaaaggggacttgaagcagcaggaattcttcctgggctgtagcaaggtcagtggaaaagttgactggaagatgctggatgaagctgttttccaagtgttcaaggactatatttctaaaatggacccagcctctaccctgggactaagcactgagtccatccatggctacagcatcagccacgtgaaacgagtgttggatgcagagccccccgagatgcctccttgccgtcgaggtgtcaataacatatcagtctccctcaaaggtctgaaggagaaatgcgtcgacagcctggtgttcgagacgctgatccccaagccgatgatgcagcactacataagcctcctgctgaagcaccggcgcctcgtcctctcgggccccagcggcacgggcaagacctacctgaccaatcgcttggccgagtacctggtggagcgctctggccgtgaggtcacagagggcatcgtcagcaccttcaacatgcaccagcagtcttgcaaggatctgcaactgtatctttccaacctagccaaccagatagaccgggaaacaggaattggggatgtgcccctggtgattctattggatgacctgagtgaagcaggctccatcagtgagttggtcaatggggccctcacctgcaagtatcataaatgtccctatattataggtaccaccaatcagcctgtaaaaatgacacccaaccatggcttgcacttgagcttcaggatgttgaccttctccaacaacgtggagccagccaatggcttcctggttcgttacctgaggaggaagctggtagagtcagacagcgacatcaatgccaacaaggaagagctgcttcgggtgctcgactgggtacccaagctgtggtatcatctccacaccttccttgagaagcacagcacctcagacttcctcatcggcccttgcttctttctgtcgtgtcccattggcattgaggacttccggacctggttcattgacctgtggaacaactctatcattccctatctacaggaaggagccaaggatgggataaaggtccatggacagaaagctgcttgggaggacccagtggaatgggtccgggacacacttccctggccatcagcccaacaagaccaatcaaagctgtaccacctgcccccacccaccgtgggccctcacagcattgcctcacctcccgaggataggacagtcaaagacagcaccccaagttctctggactcagatcctctgatggccatgctgctgaaacttcaagaagctgccaactacattgagtctccagatcgagaaaccatcctggaccccaaccttcaggcaacactttaagggttcggcaatcactgtcacccccggacagcagaacgctggcatcagctatcttagctcctcctctcccctctcctctttcagagcactggctctccagccccaggaggagaacaggagggaggaggagatgaaagaggagggacaggttcttggtgctgtacctttgagaacttcctaggaaggaatggtggggtggcgtttgggaacttgtgccccctaaacacatttactggcctcctctaatgactttggggaaaagatgattctgggtctttcccttgacttcttgtttcaattacaaactcctgggctttctggggaggggttcagaaaacatcaaaacactgcagcagttcctaaatgattctcacaagcaaccctgagagagacagtcttgtgagggagatctgggggaggcaggaagctcctcagattttctcacagacccttcccaattccatcaccactgccaacaactcctcccccagagatctggctggagcccagaaaaagaagcatgtggtttaaaaaatgtttaaatcaatctgtaaaaggt

SEQ ID NO: 433122 - DNA, 5084 bp, Homo sapiens
cgggtgtcaggcgagagcggtcctggggggcgctgggtgcccacccggtgaatggccgcctgagccggggaagatgcttcatctgcccctgcccagatccggaagaacggtgaatttcccccgcagctgggatgaaagcagctccatcagtagtggactcagcgatgcctcagacaatctcagttcagaagaattcaatgccagctcctcactcaactccctcccaagtactcccactgcttctcgcaggaactcaacaatagtgctacgcacagactcagagaagcgctcactggcagaaagtgggctgagctggtttagtgaatcagaggagaaagcccctaaaaaactggagtacgacagtggtagcctgaagatggaacctgggacttctaagtggcggagggagcggcctgagagctgtgatgattcatccaagggtggagaactgaaaaagcccatcagcctgggccaccctggttccctgaagaagggcaagaccccacctgtggctgtaacttcccccatcactcacacagcccagagtgccctcaaagtcgcaggcaaacctgagggcaaagctacagacaagggtaagcttgcagtgaagaatactgggctccaacgctcctcctctgatgctggtcgggaccgcctgagtgatgctaagaagcccccctcgggcattgctcgcccctccacttcgggatcctttggctacaagaagcctcctcctgccacaggcacagccactgtcatgcaaactggtggttcagccactctcagcaagatccagaagtcctcaggcatccctgtcaagccagtaaatgggcgcaagactagcttagatgtttccaacagtgcagagccaggattcctggctcctggagcccgttctaacatccagtaccgcagcctgccccggccagccaagtcaagttctatgagcgtgaccggcgggcggggtggacctcgccctgtgagcagcagcattgaccccagtctcctcagcaccaagcagggaggccttacgccttccagactgaaggagcctaccaaggtagccagtgggcggaccactccagcccctgtcaatcagacagatcgggaaaaggagaaggccaaagccaaggcagtggccttggactcagacaacatctccttgaagagtattggctccccagaaagtactcccaagaaccaagcaagccaccccacagccaccaagctggcagagctgccaccaacccctctcagggccacagcgaagagctttgtcaaaccaccctcactagccaatcttgacaaggtcaactccaacagtctggatctaccatcatccagtgataccacccatgcttcaaaggtcccagatctgcatgctacaagctcagcatctgggggccctctcccttcctgcttcacccccagtccggcacccatcctcaatattaactcagccagcttctcccagggcctggagctaatgagtggtttcagtgtgccaaaagagacccgcatgtaccccaaactctcaggcctgcacaggagcatggagtccctccagatgccaatgagcctccccagtgccttccccagcagtactcccgtccccaccccacctgctccccctgctgctcccacagaagaagagacggaagagctgacttggagtggaagccccagagctgggcaactggacagtaatcagcgggatcggaacactcttcccaagaaagggctcaggtaccagcttcagtcccaggaggagaccaaggagaggcgacattcccataccattggtgggctgcctgaatccgatgaccagtcagagctgccttctccccctgcacttcccatgtctctgagtgcaaagggccaacttaccaacatagtgagtcccactgcggccaccacgccaagaatcacccgctccaacagcatccccacccacgaggcggccttcgagctgtacagcggctcccaaatggggagcaccctgtccctggccgagagacccaagggaatgattcggtcaggatccttccgagaccccacggacgatgttcacggctcagtgctgtccctggcctccagtgcctcctccacctactcctcagctgaggagaggatgcaatctgagcaaatccggaagcttcgtagggaactggaatcatcccaggaaaaagtggccaccttgacgtctcagctttctgccaatgctaatctggtggctgcttttgagcagagcctggtgaatatgacatcccgcctgcgacacctggcagagacggccgaggagaaggacactgagctgctggatttgcgagaaaccatagactttctgaagaaaaagaactctgaggcccaggcagtcattcagggagcccttaatgcctcagaaaccacacccaaagaacttcggatcaagagacaaaactcctcagatagcatctcaagcctcaacagcatcactagccattccagcatcggcagcagcaaggatgctgatgcgaaaaagaagaaaaaaaagagttggcttcgaagttccttcaacaaagcgttcagtataaaaaaggggcccaagtcagcttcctcatactcggatatagaggagattgctacacccgactcttcagccccctcatcccccaaactacagcatggttctacagagactgcttcaccctccatcaagtcctccacctcgtcctccgtgggcactgatgtcaccgagggccctgctcacccagccccccacactaggctgttccatgcaaatgaggaggaggagccagagaagaaggaggtatcggagctgcgctctgagctatgggagaaggaaatgaagcttacagacatccgcttggaggccctcaactctgcccaccaactggatcagcttcgggagaccatgcacaacatgcagttggaggtggacctgctgaaagcagagaatgaccgactgaaggtagccccaggcccctcatcaggctccactccagggcaggtccctggatcatctgcattatcttccccacgccgctccctaggcctggcactcacccattccttcggccccagtcttgcagacacagacctgtcacccatggatggcatcagtacttgtggtccaaaggaggaagtgaccctccgggtggtggtgaggatgcccccgcagcacatcatcaaaggggacttgaagcagcaggaattcttcctgggctgtagcaaggtcagtggaaaagttgactggaagatgctggatgaagctgttttccaagtgttcaaggactatatttctaaaatggacccagcctctaccctgggactaagcactgagtccatccatggctacagcatcagccacgtgaaacgagtgttggatgcagagccccccgagatgcctccttgccgtcgaggtgtcaataacatatcagtctccctcaaaggtctgaaggagaaatgcgtcgacagcctggtgttcgagacgctgatccccaagccgatgatgcagcactacataagcctcctgctgaagcaccggcgcctcgtcctctcgggccccagcggcacgggcaagacctacctgaccaatcgcttggccgagtacctggtggagcgctctggccgtgaggtcacagagggcatcgtcagcaccttcaacatgcaccagcagtcttgcaaggatctgcaactgtatctttccaacctagccaaccagatagaccgggaaacaggaattggggatgtgcccctggtgattctattggatgacctgagtgaagcaggctccatcagtgagttggtcaatggggccctcacctgcaagtatcataaatgtccctatattataggtaccaccaatcagcctgtaaaaatgacacccaaccatggcttgcacttgagcttcaggatgttgaccttctccaacaacgtggagccagccaatggcttcctggttcgttacctgaggaggaagctggtagagtcagacagcgacatcaatgccaacaaggaagagctgcttcgggtgctcgactgggtacccaagctgtggtatcatctccacaccttccttgagaagcacagcacctcagacttcctcatcggcccttgcttctttctgtcgtgtcccattggcattgaggacttccggacctggttcattgacctgtggaacaactctatcattccctatctacaggaaggagccaaggatgggataaaggtccatggacagaaagctgcttgggaggacccagtggaatgggtccgggacacacttccctggccatcagcccaacaagaccaatcaaagctgtaccacctgcccccacccaccgtgggccctcacagcattgcctcacctcccgaggataggacagtcaaagacagcaccccaagttctctggactcagatcctctgatggccatgctgctgaaacttcaagaagctgccaactacattgagtctccagatcgagaaaccatcctggaccccaaccttcaggcaacactttaagggttcggcaatcactgtcacccccggacagcagaacgctggcatcagctatcttagctcctcctctcccctctcctctttcagagcactggctctccagccccaggaggagaacaggagggaggaggagatgaaagaggagggacaggttcttggtgctgtacctttgagaacttcctaggaaggaatggtggggtggcgtttgggaacttgtgccccctaaacacatttactggcctcctctaatgactttggggaaaagatgattctgggtctttcccttgacttcttgtttcaattacaaactcctgggctttctggggaggggttcagaaaacatcaaaacactgcagcagttcctaaatgattctcacaagcaaccctgagagagacagtcttgtgagggagatctgggggaggcaggaagctcctcagattttctcacagacccttcccaattccatcaccactgccaacaactcctcccccagagatctggctggagcccagaaaaagaagcatgtggtttaaaaaatgtttaaatcaatctgtaaaaggt

SEQ ID NO: 433123 - DNA, 3733 bp, Homo sapiens
ccggttctgtgaagcagtacgccatgattggcctactaggaatccattcaggaatagtgcctgggataggcctgttatctacttgctgcatctctttaaatccatctcttctttcagctgagtaaaagaaatcagttaataaaagacaaggacctgtaacacacccatgcagtgactgtggggaatttgaggaaagactaggaattgggatcacttggcctagggaaaagaaccattgttcagacaggatcatctgccctctgaagggctactaaatggaggatggggccagcttgttctctatctccattgaagaccaaataagaagaattgcatttatgctgcagaatgaggggctgggctaagcaataattacctcaggaatttgaaaaggtcaacagagaggtgtgctatcttcttctgcacaggtctttatggacagattagacatccacctgcctgtatggaggcagaagaatagacaagggagctccttgtgggtatgaaaccctgaaaggctgtaatcccagcaatgggcaaagggtgagtcccactgcggccaccacgccaagaatcacccgctccaacagcatccccacccacgaggcggccttcgagctgtacagcggctcccaaatggggagcaccctgtccctggccgagagacccaagggaatgattcggtcaggatccttccgagaccccacggacgatgttcacggctcagtgctgtccctggcctccagtgcctcctccacctactcctcagctgaggagaggatgcaatctgagcaaatccggaagcttcgtagggaactggaatcatcccaggaaaaagtggccaccttgacgtctcagctttctgccaatgctaatctggtggctgcttttgagcagagcctggtgaatatgacatcccgcctgcgacacctggcagagacggccgaggagaaggacactgagctgctggatttgcgagaaaccatagactttctgaagaaaaagaactctgaggcccaggcagtcattcagggagcccttaatgcctcagaaaccacacccaaagaacttcggatcaagagacaaaactcctcagatagcatctcaagcctcaacagcatcactagccattccagcatcggcagcagcaaggatgctgatgcgaaaaagaagaaaaaaaagagttggcttcgaagttccttcaacaaagcgttcagtataaaaaaggggcccaagtcagcttcctcatactcggatatagaggagattgctacacccgactcttcagccccctcatcccccaaactacagcatggttctacagagactgcttcaccctccatcaagtcctccacctcgtcctccgtgggcactgatgtcaccgagggccctgctcacccagccccccacactaggctgttccatgcaaatgaggaggaggagccagagaagaaggaggtatcggagctgcgctctgagctatgggagaaggaaatgaagcttacagacatccgcttggaggccctcaactctgcccaccaactggatcagcttcgggagaccatgcacaacatgcagttggaggtggacctgctgaaagcagagaatgaccgactgaaggtagccccaggcccctcatcaggctccactccagggcaggtccctggatcatctgcattatcttccccacgccgctccctaggcctggcactcacccattccttcggccccagtcttgcagacacagacctgtcacccatggatggcatcagtacttgtggtccaaaggaggaagtgaccctccgggtggtggtgaggatgcccccgcagcacatcatcaaaggggacttgaagcagcaggaattcttcctgggctgtagcaaggtcagtggaaaagttgactggaagatgctggatgaagctgttttccaagtgttcaaggactatatttctaaaatggacccagcctctaccctgggactaagcactgagtccatccatggctacagcatcagccacgtgaaacgagtgttggatgcagagccccccgagatgcctccttgccgtcgaggtgtcaataacatatcagtctccctcaaaggtctgaaggagaaatgcgtcgacagcctggtgttcgagacgctgatccccaagccgatgatgcagcactacataagcctcctgctgaagcaccggcgcctcgtcctctcgggccccagcggcacgggcaagacctacctgaccaatcgcttggccgagtacctggtggagcgctctggccgtgaggtcacagagggcatcgtcagcaccttcaacatgcaccagcagtcttgcaaggatctgcaactgtatctttccaacctagccaaccagatagaccgggaaacaggaattggggatgtgcccctggtgattctattggatgacctgagtgaagcaggctccatcagtgagttggtcaatggggccctcacctgcaagtatcataaatgtccctatattataggtaccaccaatcagcctgtaaaaatgacacccaaccatggcttgcacttgagcttcaggatgttgaccttctccaacaacgtggagccagccaatggcttcctggttcgttacctgaggaggaagctggtagagtcagacagcgacatcaatgccaacaaggaagagctgcttcgggtgctcgactgggtacccaagctgtggtatcatctccacaccttccttgagaagcacagcacctcagacttcctcatcggcccttgcttctttctgtcgtgtcccattggcattgaggacttccggacctggttcattgacctgtggaacaactctatcattccctatctacaggaaggagccaaggatgggataaaggtccatggacagaaagctgcttgggaggacccagtggaatgggtccgggacacacttccctggccatcagcccaacaagaccaatcaaagctgtaccacctgcccccacccaccgtgggccctcacagcattgcctcacctcccgaggataggacagtcaaagacagcaccccaagttctctggactcagatcctctgatggccatgctgctgaaacttcaagaagctgccaactacattgagtctccagatcgagaaaccatcctggaccccaaccttcaggcaacactttaagggttcggcaatcactgtcacccccggacagcagaacgctggcatcagctatcttagctcctcctctcccctctcctctttcagagcactggctctccagccccaggaggagaacaggagggaggaggagatgaaagaggagggacaggttcttggtgctgtacctttgagaacttcctaggaaggaatggtggggtggcgtttgggaacttgtgccccctaaacacatttactggcctcctctaatgactttggggaaaagatgattctgggtctttcccttgacttcttgtttcaattacaaactcctgggctttctggggaggggttcagaaaacatcaaaacactgcagcagttcctaaatgattctcacaagcaaccctgagagagacagtcttgtgagggagatctgggggaggcaggaagctcctcagattttctcacagacccttcccaattccatcaccactgccaacaactcctcccccagagatctggctggagcccagaaaaagaagcatgtggtttaaaaaatgtttaaatcaatctgtaaaaggt

SEQ ID NO: 433124 - DNA, 6369 bp, Homo sapiens
gttccaagttgcatgtgcttgaaatagatttaattcttattccccacagtttaggtatttttcattagtacatcaatttgacacactgaatgcaagactattaatcccactgcttctcgcaggaactcaacaatagtgctacgcacagactcagagaagcgctcactggcagaaagtgggctgagctggtttagtgaatcagaggagaaagcccctaaaaaactggagtacgacagtggtagcctgaagatggaacctgggacttctaagtggcggagggagcggcctgagagctgtgatgattcatccaagggtggagaactgaaaaagcccatcagcctgggccaccctggttccctgaagaagggcaagaccccacctgtggctgtaacttcccccatcactcacacagcccagagtgccctcaaagtcgcaggcaaacctgagggcaaagctacagacaagggtaagcttgcagtgaagaatactgggctccaacgctcctcctctgatgctggtcgggaccgcctgagtgatgctaagaagcccccctcgggcattgctcgcccctccacttcgggatcctttggctacaagaagcctcctcctgccacaggcacagccactgtcatgcaaactggtggttcagccactctcagcaagatccagaagtcctcaggcatccctgtcaagccagtaaatgggcgcaagactagcttagatgtttccaacagtgcagagccaggattcctggctcctggagcccgttctaacatccagtaccgcagcctgccccggccagccaagtcaagttctatgagcgtgaccggcgggcggggtggacctcgccctgtgagcagcagcattgaccccagtctcctcagcaccaagcagggaggccttacgccttccagactgaaggagcctaccaaggtagccagtgggcggaccactccagcccctgtcaatcagacagatcgggaaaaggagaaggccaaagccaaggcagtggccttggactcagacaacatctccttgaagagtattggctccccagaaagtactcccaagaaccaagcaagccaccccacagccaccaagctggcagagctgccaccaacccctctcagggccacagcgaagagctttgtcaaaccaccctcactagccaatcttgacaaggtcaactccaacagtctggatctaccatcatccagtgataccacccatgcttcaaaggtcccagatctgcatgctacaagctcagcatctgggggccctctcccttcctgcttcacccccagtccggcacccatcctcaatattaactcagccagcttctcccagggcctggagctaatgagtggtttcagtgtgccaaaagagacccgcatgtaccccaaactctcaggcctgcacaggagcatggagtccctccagatgccaatgagcctccccagtgccttccccagcagtactcccgtccccaccccacctgctccccctgctgctcccacagaagaagagacggaagagctgacttggagtggaagccccagagctgggcaactggacagtaatcagcgggatcggaacactcttcccaagaaagggctcaggtaccagcttcagtcccaggaggagaccaaggagaggcgacattcccataccattggtgggctgcctgaatccgatgaccagtcagagctgccttctccccctgcacttcccatgtctctgagtgcaaagggccaacttaccaacatagtgagtcccactgcggccaccacgccaagaatcacccgctccaacagcatccccacccacgaggcggccttcgagctgtacagcggctcccaaatggggagcaccctgtccctggccgagagacccaagggaatgattcggtcaggatccttccgagaccccacggacgatgttcacggctcagtgctgtccctggcctccagtgcctcctccacctactcctcacaaatccggaagcttcgtagggaactggaatcatcccaggaaaaagtggccaccttgacgtctcagctttctgccaatgctaatctggtggctgcttttgagcagagcctggtgaatatgacatcccgcctgcgacacctggcagagacggccgaggagaaggacactgagctgctggatttgcgagaaaccatagactttctgaagaaaaagaactctgaggcccaggcagtcattcagggagcccttaatgcctcagaaaccacacccaaagaacttcggatcaagagacaaaactcctcagatagcatctcaagcctcaacagcatcactagccattccagcatcggcagcagcaaggatgctgatgcgaaaaagaagaaaaaaaagagttggcttcgaagttccttcaacaaagcgttcagtataaaaaaggggcccaagtcagcttcctcatactcggatatagaggagattgctacacccgactcttcagccccctcatcccccaaactacagcatggttctacagagactgcttcaccctccatcaagtcctccacctcgtcctccgtgggcactgatgtcaccgagggccctgctcacccagccccccacactaggctgttccatgcaaatgaggaggaggagccagagaagaaggaggtatcggagctgcgctctgagctatgggagaaggaaatgaagcttacagacatccgcttggaggccctcaactctgcccaccaactggatcagcttcgggagaccatgcacaacatgcagttggaggtggacctgctgaaagcagagaatgaccgactgaaggtagccccaggcccctcatcaggctccactccagggcaggtccctggatcatctgcattatcttccccacgccgctccctaggcctggcactcacccattccttcggccccagtcttgcagacacagacctgtcacccatggatggcatcagtacttgtggtccaaaggaggaagtgaccctccgggtggtggtgaggatgcccccgcagcacatcatcaaaggggacttgaagcagcaggaattcttcctgggctgtagcaaggtcagtggaaaagttgactggaagatgctggatgaagctgttttccaagtgttcaaggactatatttctaaaatggacccagcctctaccctgggactaagcactgagtccatccatggctacagcatcagccacgtgaaacgagtgttggatgcagagccccccgagatgcctccttgccgtcgaggtgtcaataacatatcagtctccctcaaaggtctgaaggagaaatgcgtcgacagcctggtgttcgagacgctgatccccaagccgatgatgcagcactacataagcctcctgctgaagcaccggcgcctcgtcctctcgggccccagcggcacgggcaagacctacctgaccaatcgcttggccgagtacctggtggagcgctctggccgtgaggtcacagagggcatcgtcagcaccttcaacatgcaccagcagtcttgcaaggatctgcaactgtatctttccaacctagccaaccagatagaccgggaaacaggaattggggatgtgcccctggtgattctattggatgacctgagtgaagcaggctccatcagtgagttggtcaatggggccctcacctgcaagtatcataaatgtccctatattataggtaccaccaatcagcctgtaaaaatgacacccaaccatggcttgcacttgagcttcaggatgttgaccttctccaacaacgtggagccagccaatggcttcctggttcgttacctgaggaggaagctggtagagtcagacagcgacatcaatgccaacaaggaagagctgcttcgggtgctcgactgggtacccaagctgtggtatcatctccacaccttccttgagaagcacagcacctcagacttcctcatcggtactggggtccagcttcccccgggggtcaggaggtggcttcccttttccactgtaccacctggagggatgctcccttctcttcctggagtcttcggcatgtaaaggagctgcaagccttgtggcttcagacttagaaccacttaacgagccttcccaacacagttagcaccacttcaatcaccagaaagctaacccctctccttgtttttttcccacaattaacagaaaaaaggaggcacatatgtaggaaggaattaaacagctttcctcactcccttatctcacttctaccttgtgaagcaggacttatgagattgccatctaggcagtcagcacccactagtcttgacaactctaaatttcctttaatcctttgactgtcagacccctctgcctggtactaaggagtaaaagaggcacacaaccgggaagatctaggttcccagccatcttcatggccccatcctcttccctaggcccttgcttctttctgtcgtgtcccattggcattgaggacttccggacctggttcattgacctgtggaacaactctatcattccctatctacaggaaggagccaaggatgggataaaggtccatggacagaaagctgcttgggaggacccagtggaatgggtccgggacacacttccctggccatcagcccaacaagaccaatcaaagctgtaccacctgcccccacccaccgtgggccctcacagcattgcctcacctcccgaggataggacagtcaaagacagcaccccaagttctctggactcagatcctctgatggccatgctgctgaaacttcaagaagctgccaactacattgagtctccagatcgagaaaccatcctggaccccaaccttcaggcaacactttaagggttcggcaatcactgtcacccccggacagcagaacgctggcatcagctatcttagctcctcctctcccctctcctctttcagagcactggctctccagccccaggaggagaacaggagggaggaggagatgaaagaggagggacaggttcttggtgctgtacctttgagaacttcctaggaaggaatggtggggtggcgtttgggaacttgtgccccctaaacacatttactggcctcctctaatgactttggggaaaagatgattctgggtctttcccttgacttcttgtttcaattacaaactcctgggctttctggggaggggttcagaaaacatcaaaacactgcagcagttcctaaatgattctcacaagcaaccctgagagagacagtcttgtgagggagatctgggggaggcaggaagctcctcagattttctcacagacccttcccaattccatcaccactgccaacaactcctcccccagagatctggctggagcccagaaaaagaagcatgtggtttaaaaaatgtttaaatcaatctgtaaaaggtaaaaatgaaaaacaaaaacaagcaaacaaacaaaaaacaatggaaaagatgaagctggagagagaggaaccagttgccaaggtagagagctgcccgctcctgccctctggatgacataggggacatcaacaagacggctgccaacctgagaagtcaccaaaccacaaaaataaccttacagccttcagggaaagactaccagctctgtctttctaccctctaatttaacaatgcataagagtcaataaaccctacttttttaaaaaaaaaaaaaaaaaaaaaaaaaaaaaaaaaaaaaaaaaaaaaaaaaaaaaaaaaaaaaaaaaaaaaagagagagggggggcgggcggcgcgcgaggagaggccccccgcggagggagcgccacaaacctacggagcgcccaccaagaatgtttggtagagaaaagagaggggcgcccacaaaagaggagggcgagtgatatatataaacaacaaagagagggaggcggggcgagggcacaaaacaaaggacgcggccgcggcgaggcgaacagaagcgcggccacacggcggggaagcaccttgtgagagcaaagcgcaagcaacccacaagacagcgggggggagcgagagcagacaaacaagggggagccacaaaaaatcaccccacgagcaagaggtagcgttacggcagggaggaaaacgacagggggggcgcgcaacataaataaaaccaaaagcggagacagcgccgctatgtgatagcacgccgtggcgcgagaagaaacaaaaacacaaaaggaccaggccaaacatttaacacgcgaagtgcacgccaggagacgccagcacacaacaagacgatagcggagagaacaataggggcgggaataagagatgacaacaaaccagccaagcagagcattattttgctctccaccacagcacgaagcgcctagcagtaaccaacaacca

SEQ ID NO: 433125 - DNA, 5854 bp, Homo sapiens
gttccaagttgcatgtgcttgaaatagatttaattcttattccccacagtttaggtatttttcattagtacatcaatttgacacactgaatgcaagactattaatcccactgcttctcgcaggaactcaacaatagtgctacgcacagactcagagaagcgctcactggcagaaagtgggctgagctggtttagtgaatcagaggagaaagcccctaaaaaactggagtacgacagtggtagcctgaagatggaacctgggacttctaagtggcggagggagcggcctgagagctgtgatgattcatccaagggtggagaactgaaaaagcccatcagcctgggccaccctggttccctgaagaagggcaagaccccacctgtggctgtaacttcccccatcactcacacagcccagagtgccctcaaagtcgcaggcaaacctgagggcaaagctacagacaagggtaagcttgcagtgaagaatactgggctccaacgctcctcctctgatgctggtcgggaccgcctgagtgatgctaagaagcccccctcgggcattgctcgcccctccacttcgggatcctttggctacaagaagcctcctcctgccacaggcacagccactgtcatgcaaactggtggttcagccactctcagcaagatccagaagtcctcaggcatccctgtcaagccagtaaatgggcgcaagactagcttagatgtttccaacagtgcagagccaggattcctggctcctggagcccgttctaacatccagtaccgcagcctgccccggccagccaagtcaagttctatgagcgtgaccggcgggcggggtggacctcgccctgtgagcagcagcattgaccccagtctcctcagcaccaagcagggaggccttacgccttccagactgaaggagcctaccaaggtagccagtgggcggaccactccagcccctgtcaatcagacagatcgggaaaaggagaaggccaaagccaaggcagtggccttggactcagacaacatctccttgaagagtattggctccccagaaagtactcccaagaaccaagcaagccaccccacagccaccaagctggcagagctgccaccaacccctctcagggccacagcgaagagctttgtcaaaccaccctcactagccaatcttgacaaggtcaactccaacagtctggatctaccatcatccagtgataccacccatgcttcaaaggtcccagatctgcatgctacaagctcagcatctgggggccctctcccttcctgcttcacccccagtccggcacccatcctcaatattaactcagccagcttctcccagggcctggagctaatgagtggtttcagtgtgccaaaagagacccgcatgtaccccaaactctcaggcctgcacaggagcatggagtccctccagatgccaatgagcctccccagtgccttccccagcagtactcccgtccccaccccacctgctccccctgctgctcccacagaagaagagacggaagagctgacttggagtggaagccccagagctgggcaactggacagtaatcagcgggatcggaacactcttcccaagaaagggctcaggtaccagcttcagtcccaggaggagaccaaggagaggcgacattcccataccattggtgggctgcctgaatccgatgaccagtcagagctgccttctccccctgcacttcccatgtctctgagtgcaaagggccaacttaccaacatagtgagtcccactgcggccaccacgccaagaatcacccgctccaacagcatccccacccacgaggcggccttcgagctgtacagcggctcccaaatggggagcaccctgtccctggccgagagacccaagggaatgattcggtcaggatccttccgagaccccacggacgatgttcacggctcagtgctgtccctggcctccagtgcctcctccacctactcctcacaaatccggaagcttcgtagggaactggaatcatcccaggaaaaagtggccaccttgacgtctcagctttctgccaatgctaatctggtggctgcttttgagcagagcctggtgaatatgacatcccgcctgcgacacctggcagagacggccgaggagaaggacactgagctgctggatttgcgagaaaccatagactttctgaagaaaaagaactctgaggcccaggcagtcattcagggagcccttaatgcctcagaaaccacacccaaagaacttcggatcaagagacaaaactcctcagatagcatctcaagcctcaacagcatcactagccattccagcatcggcagcagcaaggatgctgatgcgaaaaagaagaaaaaaaagagttggcttcgaagttccttcaacaaagcgttcagtataaaaaaggggcccaagtcagcttcctcatactcggatatagaggagattgctacacccgactcttcagccccctcatcccccaaactacagcatggttctacagagactgcttcaccctccatcaagtcctccacctcgtcctccgtgggcactgatgtcaccgagggccctgctcacccagccccccacactaggctgttccatgcaaatgaggaggaggagccagagaagaaggaggtatcggagctgcgctctgagctatgggagaaggaaatgaagcttacagacatccgcttggaggccctcaactctgcccaccaactggatcagcttcgggagaccatgcacaacatgcagttggaggtggacctgctgaaagcagagaatgaccgactgaaggtagccccaggcccctcatcaggctccactccagggcaggtccctggatcatctgcattatcttccccacgccgctccctaggcctggcactcacccattccttcggccccagtcttgcagacacagacctgtcacccatggatggcatcagtacttgtggtccaaaggaggaagtgaccctccgggtggtggtgaggatgcccccgcagcacatcatcaaaggggacttgaagcagcaggaattcttcctgggctgtagcaaggtcagtggaaaagttgactggaagatgctggatgaagctgttttccaagtgttcaaggactatatttctaaaatggacccagcctctaccctgggactaagcactgagtccatccatggctacagcatcagccacgtgaaacgagtgttggatgcagagccccccgagatgcctccttgccgtcgaggtgtcaataacatatcagtctccctcaaaggtctgaaggagaaatgcgtcgacagcctggtgttcgagacgctgatccccaagccgatgatgcagcactacataagcctcctgctgaagcaccggcgcctcgtcctctcgggccccagcggcacgggcaagacctacctgaccaatcgcttggccgagtacctggtggagcgctctggccgtgaggtcacagagggcatcgtcagcaccttcaacatgcaccagcagtcttgcaaggatctgcaactgtatctttccaacctagccaaccagatagaccgggaaacaggaattggggatgtgcccctggtgattctattggatgacctgagtgaagcaggctccatcagtgagttggtcaatggggccctcacctgcaagtatcataaatgtccctatattataggtaccaccaatcagcctgtaaaaatgacacccaaccatggcttgcacttgagcttcaggatgttgaccttctccaacaacgtggagccagccaatggcttcctggttcgttacctgaggaggaagctggtagagtcagacagcgacatcaatgccaacaaggaagagctgcttcgggtgctcgactgggtacccaagctgtggtatcatctccacaccttccttgagaagcacagcacctcagacttcctcatcggcccttgcttctttctgtcgtgtcccattggcattgaggacttccggacctggttcattgacctgtggaacaactctatcattccctatctacaggaaggagccaaggatgggataaaggtccatggacagaaagctgcttgggaggacccagtggaatgggtccgggacacacttccctggccatcagcccaacaagaccaatcaaagctgtaccacctgcccccacccaccgtgggccctcacagcattgcctcacctcccgaggataggacagtcaaagacagcaccccaagttctctggactcagatcctctgatggccatgctgctgaaacttcaagaagctgccaactacattgagtctccagatcgagaaaccatcctggaccccaaccttcaggcaacactttaagggttcggcaatcactgtcacccccggacagcagaacgctggcatcagctatcttagctcctcctctcccctctcctctttcagagcactggctctccagccccaggaggagaacaggagggaggaggagatgaaagaggagggacaggttcttggtgctgtacctttgagaacttcctaggaaggaatggtggggtggcgtttgggaacttgtgccccctaaacacatttactggcctcctctaatgattcttgtttcaattacaaactcctgggctttctggggaggggttcagaaaacatcaaaacactgcagcagttcctaaatgattctcacaagcaaccctgagagagacagtcttgtgagggagatctgggggaggcaggaagctcctcagattttctcacagacccttcccaattccatcaccactgccaacaactcctcccccagagatctggctggagcccagaaaaagaagcatgtggtttaaaaaatgtttaaatcaatctgtaaaaggtaaaaatgaaaaacaaaaacaagcaaacaaacaaaaaacaatggaaaagatgaagctggagagagaggaaccagttgccaaggtagagagctgcccgctcctgccctctggatgacataggggacatcaacaagacggctgccaacctgagaagtcaccaaaccacaaaaataaccttacagccttcagggaaagactaccagctctgtctttctaccctctaatttaacaatgcataagagtcaataaaccctacttttttaaaaaaaaaaaaaaaaaaaaaaaaaaaaaaaaaaaaaaaaaaaaaaaaaaaaaaaaaaaaaaaaaaaaaagagagagggggggcgggcggcgcgcgaggagaggccccccgcggagggagcgccacaaacctacggagcgcccaccaagaatgtttggtagagaaaagagaggggcgcccacaaaagaggagggcgagtgatatatataaacaacaaagagagggaggcggggcgagggcacaaaacaaaggacgcggccgcggcgaggcgaacagaagcgcggccacacggcggggaagcaccttgtgagagcaaagcgcaagcaacccacaagacagcgggggggagcgagagcagacaaacaagggggagccacaaaaaatcaccccacgagcaagaggtagcgttacggcagggaggaaaacgacagggggggcgcgcaacataaataaaaccaaaagcggagacagcgccgctatgtgatagcacgccgtggcgcgagaagaaacaaaaacacaaaaggaccaggccaaacatttaacacgcgaagtgcacgccaggagacgccagcacacaacaagacgatagcggagagaacaataggggcgggaataagagatgacaacaaaccagccaagcagagcattattttgctctccaccacagcacgaagcgcctagcagtaaccaacaacca

SEQ ID NO: 433126 - DNA, 4971 bp, Homo sapiens
gttccaagttgcatgtgcttgaaatagatttaattcttattccccacagtttaggtatttttcattagtacatcaatttgacacactgaatgcaagactattaatcccactgcttctcgcaggaactcaacaatagtgctacgcacagactcagagaagcgctcactggcagaaagtgggctgagctggtttagtgaatcagaggagaaagcccctaaaaaactggagtacgacagtggtagcctgaagatggaacctgggacttctaagtggcggagggagcggcctgagagctgtgatgattcatccaagggtggagaactgaaaaagcccatcagcctgggccaccctggttccctgaagaagggcaagaccccacctgtggctgtaacttcccccatcactcacacagcccagagtgccctcaaagtcgcaggcaaacctgagggcaaagctacagacaagggtaagcttgcagtgaagaatactgggctccaacgctcctcctctgatgctggtcgggaccgcctgagtgatgctaagaagcccccctcgggcattgctcgcccctccacttcgggatcctttggctacaagaagcctcctcctgccacaggcacagccactgtcatgcaaactggtggttcagccactctcagcaagatccagaagtcctcaggcatccctgtcaagccagtaaatgggcgcaagactagcttagatgtttccaacagtgcagagccaggattcctggctcctggagcccgttctaacatccagtaccgcagcctgccccggccagccaagtcaagttctatgagcgtgaccggcgggcggggtggacctcgccctgtgagcagcagcattgaccccagtctcctcagcaccaagcagggaggccttacgccttccagactgaaggagcctaccaaggtagccagtgggcggaccactccagcccctgtcaatcagacagatcgggaaaaggagaaggccaaagccaaggcagtggccttggactcagacaacatctccttgaagagtattggctccccagaaagtactcccaagaaccaagcaagccaccccacagccaccaagctggcagagctgccaccaacccctctcagggccacagcgaagagctttgtcaaaccaccctcactagccaatcttgacaaggtcaactccaacagtctggatctaccatcatccagtgataccacccatgcttcaaaggtcccagatctgcatgctacaagctcagcatctgggggccctctcccttcctgcttcacccccagtccggcacccatcctcaatattaactcagccagcttctcccagggcctggagctaatgagtggtttcagtgtgccaaaagagacccgcatgtaccccaaactctcaggcctgcacaggagcatggagtccctccagatgccaatgagcctccccagtgccttccccagcagtactcccgtccccaccccacctgctccccctgctgctcccacagaagaagagacggaagagctgacttggagtggaagccccagagctgggcaactggacagtaatcagcgggatcggaacactcttcccaagaaagggctcaggtaccagcttcagtcccaggaggagaccaaggagaggcgacattcccataccattggtgggctgcctgaatccgatgaccagtcagagctgccttctccccctgcacttcccatgtctctgagtgcaaagggccaacttaccaacatagtgagtcccactgcggccaccacgccaagaatcacccgctccaacagcatccccacccacgaggcggccttcgagctgtacagcggctcccaaatggggagcaccctgtccctggccgagagacccaagggaatgattcggtcaggatccttccgagaccccacggacgatgttcacggctcagtgctgtccctggcctccagtgcctcctccacctactcctcacaaatccggaagcttcgtagggaactggaatcatcccaggaaaaagtggccaccttgacgtctcagctttctgccaatgctaatctggtggctgcttttgagcagagcctggtgaatatgacatcccgcctgcgacacctggcagagacggccgaggagaaggacactgagctgctggatttgcgagaaaccatagactttctgaagaaaaagaactctgaggcccaggcagtcattcagggagcccttaatgcctcagaaaccacacccaaagaacttcggatcaagagacaaaactcctcagatagcatctcaagcctcaacagcatcactagccattccagcatcggcagcagcaaggatgctgatgcgaaaaagaagaaaaaaaagagttggcttcgaagttccttcaacaaagcgttcagtataaaaaaggggcccaagtcagcttcctcatactcggatatagaggagattgctacacccgactcttcagccccctcatcccccaaactacagcatggttctacagagactgcttcaccctccatcaagtcctccacctcgtcctccgtgggcactgatgtcaccgagggccctgctcacccagccccccacactaggctgttccatgcaaatgaggaggaggagccagagaagaaggaggtatcggagctgcgctctgagctatgggagaaggaaatgaagcttacagacatccgcttggaggccctcaactctgcccaccaactggatcagcttcgggagaccatgcacaacatgcagttggaggtggacctgctgaaagcagagaatgaccgactgaaggtagccccaggcccctcatcaggctccactccagggcaggtccctggatcatctgcattatcttccccacgccgctccctaggcctggcactcacccattccttcggccccagtcttgcagacacagacctgtcacccatggatggcatcagtacttgtggtccaaaggaggaagtgaccctccgggtggtggtgaggatgcccccgcagcacatcatcaaaggggacttgaagcagcaggaattcttcctgggctgtagcaaggtcagtggaaaagttgactggaagatgctggatgaagctgttttccaagtgttcaaggactatatttctaaaatggacccagcctctaccctgggactaagcactgagtccatccatggctacagcatcagccacgtgaaacgagtgttggatgcagagccccccgagatgcctccttgccgtcgaggtgtcaataacatatcagtctccctcaaaggtctgaaggagaaatgcgtcgacagcctggtgttcgagacgctgatccccaagccgatgatgcagcactacataagcctcctgctgaagcaccggcgcctcgtcctctcgggccccagcggcacgggcaagacctacctgaccaatcgcttggccgagtacctggtggagcgctctggccgtgaggtcacagagggcatcgtcagcaccttcaacatgcaccagcagtcttgcaaggatctgcaactgtatctttccaacctagccaaccagatagaccgggaaacaggaattggggatgtgcccctggtgattctattggatgacctgagtgaagcaggctccatcagtgagttggtcaatggggccctcacctgcaagtatcataaatgtccctatattataggtaccaccaatcagcctgtaaaaatgacacccaaccatggcttgcacttgagcttcaggatgttgaccttctccaacaacgtggagccagccaatggcttcctggttcgttacctgaggaggaagctggtagagtcagacagcgacatcaatgccaacaaggaagagctgcttcgggtgctcgactgggtacccaagctgtggtatcatctccacaccttccttgagaagcacagcacctcagacttcctcatcggtactggggtccagcttcccccgggggtcaggaggtggcttcccttttccactgtaccacctggagggatgctcccttctcttcctggagtcttcggcatgtaaaggagctgcaagccttgtggcttcagacttagaaccacttaacgagccttcccaacacagttagcaccacttcaatcaccagaaagctaacccctctccttgtttttttcccacaattaacagaaaaaaggaggcacatatgtaggaaggaattaaacagctttcctcactcccttatctcacttctaccttgtgaagcaggacttatgagattgccatctaggcagtcagcacccactagtcttgacaactctaaatttcctttaatcctttgactgtcagacccctctgcctggtactaaggagtaaaagaggcacacaaccgggaagatctaggttcccagccatcttcatggccccatcctcttccctaggcccttgcttctttctgtcgtgtcccattggcattgaggacttccggacctggttcattgacctgtggaacaactctatcattccctatctacaggaaggagccaaggatgggataaaggtgagccctacccccttcactcaaaccctaagatcaggctgtcctacctaacaaagtaggaatgtttctttaatgttaggcatgggactactaggattagttaggttctctttctaacaggtggagcaaggcactgggtagactaagctgctttcctgcctccagctgccattcagcaaatggtacaatgaccactgcctctggggccatctctccagtcctaggccttctggctctaagcccaatttaaaccactctctaggggtcagagcaaacagaaaaataattgagctaagaagtaagtaaaaccctaattaaaacaaacaaacaaacaaacaaaaccttagctacttactactaataagtatgttatattaaccaagttacttgacctttttaaataccctcatatg

SEQ ID NO: 433127 - DNA, 2736 bp, Homo sapiens
gttccaagttgcatgtgcttgaaatagatttaattcttattccccacagtttaggtatttttcattagtacatcaatttgacacactgaatgcaagactattaatcccactgcttctcgcaggaactcaacaatagtgctacgcacagactcagagaagcgctcactggcagaaagtgggctgagctggtttagtgaatcagaggagaaagcccctaaaaaactggagtacgacagtggtagcctgaagatggaacctgggacttctaagtggcggagggagcggcctgagagctgtgatgattcatccaagggtggagaactgaaaaagcccatcagcctgggccaccctggttccctgaagaagggcaagaccccacctgtggctgtaacttcccccatcactcacacagcccagagtgccctcaaagtcgcaggcaaacctgagggcaaagctacagacaagggtaagcttgcagtgaagaatactgggctccaacgctcctcctctgatgctggtcgggaccgcctgagtgatgctaagaagcccccctcgggcattgctcgcccctccacttcgggatcctttggctacaagaagcctcctcctgccacaggcacagccactgtcatgcaaactggtggttcagccactctcagcaagatccagaagtcctcaggcatccctgtcaagccagtaaatgggcgcaagactagcttagatgtttccaacagtgcagagccaggattcctggctcctggagcccgttctaacatccagtaccgcagcctgccccggccagccaagtcaagttctatgagcgtgaccggcgggcggggtggacctcgccctgtgagcagcagcattgaccccagtctcctcagcaccaagcagggaggccttacgccttccagactgaaggagcctaccaaggtagccagtgggcggaccactccagcccctgtcaatcagacagatcgggaaaaggagaaggccaaagccaaggcagtggccttggactcagacaacatctccttgaagagtattggctccccagaaagtactcccaagaaccaagcaagccaccccacagccaccaagctggcagagctgccaccaacccctctcagggccacagcgaagagctttgtcaaaccaccctcactagccaatcttgacaaggtcaactccaacagtctggatctaccatcatccagtgataccacccatgcttcaaaggtcccagatctgcatgctacaagctcagcatctgggggccctctcccttcctgcttcacccccagtccggcacccatcctcaatattaactcagccagcttctcccagggcctggagctaatgagtggtttcagtgtgccaaaagagacccgcatgtaccccaaactctcaggcctgcacaggagcatggagtccctccagatgccaatgagcctccccagtgccttccccagcagtactcccgtccccaccccacctgctccccctgctgctcccacagaagaagagacggaagagctgacttggagtggaagccccagagctgggcaactggacagtaatcagcgggatcggaacactcttcccaagaaagggctcaggtaccagcttcagtcccaggaggagaccaaggagaggcgacattcccataccattggtgggctgcctgaatccgatgaccagtcagagctgccttctccccctgcacttcccatgtctctgagtgcaaagggccaacttaccaacatagtgagtcccactgcggccaccacgccaagaatcacccgctccaacagcatccccacccacgaggcggccttcgagctgtacagcggctcccaaatggggagcaccctgtccctggccgagagacccaagggaatgattcggtcaggatccttccgagaccccacggacgatgttcacggctcagtgctgtccctggcctccagtgcctcctccacctactcctcacaaatccggaagcttcgtagggaactggaatcatcccaggaaaaagtggccaccttgacgtctcagctttctgccaatgctaatctggtggctgcttttgagcagagcctggtgaatatgacatcccgcctgcgacacctggcagagacggccgaggagaaggacactgagctgctggatttgcgagaaaccatagactttctgaagaaaaagaactctgaggcccaggcagtcattcagggagcccttaatgcctcagaaaccacacccaaagaacttcggatcaagagacaaaactcctcagatagcatctcaagcctcaacagcatcactagccattccagcatcggcagcagcaaggatgctgatgcgaaaaagaagaaaaaaaagagttgggtaggtaaaggtttggggggtggggaagtaggtagaaccgtggtggaccgccttcacctcagcatagggatcgaatccttccaggattaaccaaggtgtagtcccgtctaacactgagccctagtgtgatgtccgctcagagcatggtctcccagattctcccttccctcaatcatttcctacttgtccccaaggccacccctctgacctttatatgcatctgctttctttgggctctccatactggttaggccaagatgtatttggcaacagaaggatgctgaggatatactcagaaggaaacatcttatcagttctgtccccaccaccccccattcccttctatac

SEQ ID NO: 433128 - DNA, 1560 bp, Homo sapiens
tggggtctgtagtgggcccgttatcgtgcatgtaccaggcgggcgtcccctccgagcggcagttcccacccacagttggcgcgtcagcagcaagctcagccatatctcccgcctggagctggtcgaatccctggactcggatgaggtggacctcaagtccggctacatgagcgacagtgacctcatgggcaagaccatgacggaggatgatgacatcactaccggctgggatgaaagcagctccatcagtagtggactcagcgatgcctcagacaatctcagttcagaagaattcaatgccagctcctcactcaactccctcccaagtactcccactgcttctcgcaggaactcaacaatagtgctacgcacagactcagagaagcgctcactggcagaaagtgggctgagctggtttagtgaatcagaggagaaagcccctaaaaaactggagtacgacagtggtagcctgaagatggaacctgggacttctaagtggcggagggagcggcctgagagctgtgatgattcatccaagggtggagaactgaaaaagcccatcagcctgggccaccctggttccctgaagaagggcaagaccccacctgtggctgtaacttcccccatcactcacacagcccagagtgccctcaaagtcgcaggcaaacctgagggcaaagctacagacaagggtaagcttgcagtgaagaatactgggctccaacgctcctcctctgatgctggtcgggaccgcctgagtgatgctaagaagcccccctcgggcattgctcgcccctccacttcgggatcctttggctacaagaagcctcctcctgccacaggcacagccactgtcatgcaaactggtggttcagccactctcagcaagatccagaagtcctcaggcatccctgtcaagccagtaaatgggcgcaagactagcttagatgtttccaacagtgcagagccaggattcctggctcctggagcccgttctaacatccagtaccgcagcctgccccggccagccaagtcaagttctatgagcgtgaccggcgggcggggtggacctcgccctgtgagcagcagcattgaccccagtctcctcagcaccaagcagggaggccttacgccttccagactgaaggagcctaccaaggtagccagtgggcggaccactccagcccctgtcaatcagacagatcgggaaaaggagaaggccaaagccaaggcagtggccttggactcagacaacatctccttgaagagtattggctccccagaaagtactcccaagaaccaagcaagccaccccacagccaccaagctggcagagctgccaccaacccctctcagggccacagcgaagagctttgtcaaaccaccctcactagccaatcttgacaaggtcaactccaacagtctggatctaccatcatccagtgataccacccatgcttcaaaggtcccagatctgcatgctacaagctcagcatctgggggccctctcccttcctgcttcacccccagtcccgactaacttggtccgagctcgatcga

SEQ ID NO: 433129 - DNA, 5126 bp, Homo sapiens
  misc_feature (120)..(120): n is a, c, g, or t
aagcagcccgcggaccggcagcaaaggaacgtgcgaacgcgtgacgccgcccgactggctcgcgctctcccgtgccccggcgtcctccgcccgctcatggcccgggccgccgcggacgancggcgctgaggcgggccgcgtggagacgtgaggcggccgccgtggccctcacagtcggcgtttcgccgcctgcccgcggtgcccgcgcacgccggccgccatcgccttcgcgcctggctggcgggggcgctgtcctcccaggccgtccgcgccgctccctggagctcggcggagcgcggcagccagggccggcggaggcgcgaggagccgggcgccaccgccgccgccgccgccgccgccgcgggggccatgaccgtggagcagaacgtgctgcagcagagcgcggcgcagaagcaccagcagacgtttttgaatcaactgagagaaattacggggattaatgacacccagatactacagcaagccttgaaggatagtaatggaaacttggaattagcagtggctttccttactgcgaagaatgctaagacccctcagcaggaggagacaacttactaccaaacagcacttcctggcaatgatagatacatcagtgtgggaagccaagcagatacaaatgtgattgatctcactggagatgataaagatgatcttcagagagcaattgccttgagtttggccgaatcaaacagggcattcagggagactggaataactgatgaggaacaagccattagcagagttcttgaagccagcatagcagagaataaagcatgtttgaagaggacacctacagaagtttggagggattctcgaaacccttatgatagaaaaagacaggacaaagctcccgttgggctaaagaatgttggcaatacttgttggtttagtgctgttattcagtcattatttaatcttttggaatttagaagattagttctgaattacaagcctccatcaaatgctcaagatttaccccgaaaccaaaaggaacatcggaatttgccttttatgcgtgagctgaggtatctatttgcacttcttgttggtaccaaaaggaagtatgttgatccatcaagagcagttgaaattcttaaggatgctttcaaatcaaatgactcacagcagcaagatgtgagtgagtttacacacaaattattagattggttagaagatgccttccaaatgaaagctgaagaggagacggatgaagagaagccaaagaaccccatggtagagttgttctatggcagattcctggctgtgggagtacttgaaggtaaaaaatttgaaaacactgaaatgtttggtcagtacccacttcaggtcaatgggttcaaagatctgcatgagtgcctagaagctgcaatgattgaaggagaaattgagtctttacattcagagaattcaggaaaatcaggccaagagcattggtttactgaattaccacctgtgttaacatttgaattgtcaagatttgaatttaatcaggcattgggaagaccagaaaaaattcacaacaaattagaatttccccaagttttatatttggacagatacatgcacagaaacagagaaataacaagaattaagagggaagagatcaagagactgaaagattacctcacggtattacaacaaaggctagaaagatatttaagctatggttccggtcccaaacgattccccttggtagatgttcttcagtatgcattggaatttgcctcaagtaaacctgtttgcacttctcctgttgacgatattgacgctagttccccacctagtggttccataccatcacagacattaccaagcacaacagaacaacagggagccctatcttcagaactgccaagcacatcaccttcatcagttgctgccatttcatcgagatcagtaatacacaaaccatttactcagtcccggatacctccagatttgcccatgcatccggcaccaaggcacataacggaggaagaactttctgtgctggaaagttgtttacatcgctggaggacagaaatagaaaatgacaccagagatttgcaggaaagcatatccagaatccatcgaacaattgaattaatgtactctgacaaatctatgatacaagttccttatcgattacatgccgttttagttcacgaaggccaagctaatgctgggcactactgggcatatatttttgatcatcgtgaaagcagatggatgaagtacaatgatattgctgtgacaaaatcatcatgggaagagctagtgagggactcttttggtggttatagaaatgccagtgcatactgtttaatgtacataaatgataaggcacagttcctaatacaagaggagtttaataaagaaactgggcagccccttgttggtatagaaacattaccaccggatttgagagattttgttgaggaagacaaccaacgatttgaaaaagaactagaagaatgggatgcacaacttgcccagaaagctttgcaggaaaagcttttagcgtctcagaaattgagagagtcagagacttctgtgacaacagcacaagcagcaggagacccagaatatctagagcagccatcaagaagtgatttctcaaagcacttgaaagaagaaactattcaaataattaccaaggcatcacatgagcatgaagataaaagtcctgaaacagttttgcagtcggcaattaagttggaatatgcaaggttggttaagttggcccaagaagacaccccaccagaaaccgattatcgtttacatcatgtagtggtctactttatccagaaccaggcaccaaagaaaattattgagaaaacattactagaacaatttggagatagaaatttgagttttgatgaaaggtgtcacaacataatgaaagttgctcaagccaaactggaaatgataaaacctgaagaagtaaacttggaggaatatgaggagtggcatcaggattataggaaattcagggaaacaactatgtatctcataattgggctagaaaattttcaaagagaaagttatatagattccttgctgttcctcatctgtgcttatcagaataacaaagaactcttgtctaaaggcttatacagaggacatgatgaagaattgatatcacattatagaagagaatgtttgctaaaattaaatgagcaagccgcagaactcttcgaatctggagaggatcgagaagtaaacaatggtttgattatcatgaatgagtttattgtcccatttttgccattattactggtggatgaaatggaagaaaaggatatactagctgtagaagatatgagaaatcgatggtgttcctaccttggtcaagaaatggaaccacacctccaagaaaagctgacagattttttgccaaaactgcttgattgttctatggagattaaaagtttccatgagccaccgaagttaccttcatattccacgcatgaactctgtgagcgatttgcccgaatcatgttgtccctcagtcgaactcctgctgatggaagataaactgcacactttccctgaacacactgtataaactctttttagttcttaacccttgccttcctgtcacagggtttgcttgttgctgctatagtttttaacttttttttattttaataactgcaaaagacaaaatgactatacagactttagtcagactgcagacaataaagctgaaaatcgcatggcgctcagacattttaaccggaactgatgtataatcacaaatctaattgattttattatggcaaaactatgcttttgccaccttcctgttgcagtattactttgcttttatcttttctttctcaacagctttccattcagtctggatccttccatgactacagccatttaagtgttcagcactgtgtacgatacataatatttggtagcttgtaaatgaaataaagaataaagttttatttatggctacctatgtgtttgtaagcaggtatattgtatattagtgtattagtaatactagataaatgaattttgtctggggattaagattggatagttaatagattaatacaatcttttaattctgctctaatgctagcaaattggaaaatgtttaagtctttgacacttaaatttatctatatttttaacaaagttcttgaacttagtatggcaccggaacctgttttgaattcagtcaggtttttactcaagtaagtggtgttttttttaagtcaaactacactgaaacttttatccttttcttagattaatcttactttttaaatgtatttacaatatacagcaaggtgattatttcaagagaatcccaaagtacttgaataagggctattgtaaaatttaaaagaaatatttatatatacacatatatacacatacacacatgtatatatatattcttcataatggaggacaatgttttgcaatatataaatcattctatttttgtaaattgtatatcactttaattgaaaatgttctctactaattaatactgtgaaacaaaattgatgttgtttaactagaagttatgagtatcttaactgcctttattccttttcaaaaaggaaaaagctgtagaacattttgtagatgaaactactgtttaagattaatgaattaatattgtgaatgaaaatcaaaatccatactttaaaggtaatcatgttactaacaacctatttttgaattcataaaaatttctttataaatgatgttttgtgaacatagtaaaatagaccattatactatgtgtatgtttgatacagcgtcgccaaaactagtgttctttattagtgcctctcacaaaagatcctggatggaggagtaagatgaaatattatgctattatatgatgctgtttgtaaaggtattaatgtactagtaaggtgttaatgacaaggaattagtactattcctgttgtaaagttagattttgcatattgtatctatcaaaatatgtttgggtttagattttaagttgtctactgagcagatttctgcattggttttccagtcctgttaaaagtttagaaacttcatatgtgtcatcacagcttttgtaaagaaagtatccttaatattttatgacattctaccacagt

SEQ ID NO: 433130 - DNA, 860 bp, Homo sapiens
gttgtccaaatataatcttgtgcactatcaagtatcaagaatggtatgtcaaataaaagaaacttgactttttctcagaagtatgtcctccttgtgccagttgcaatgattctgagtataagtagtacacagttgtaaaaaataaacctccaagactagtcatttttacattctgctaatggaattttccctcaggttatgttaaattgttgttctttttcagtcattatttaatcttttggaatttagaagattagttctgaattacaagcctccatcaaatgctcaagatttaccccgaaaccaaaaggaacatcggaatttgccttttatgcgtgagctgaggtatctatttgcacttcttgttggtaccaaaaggaagtatgttgatccatcaagagcagttgaaattcttaaggatgctttcaaatcaaatgactcacagcaggtagttctgttgcactgacttgttcattaaccatttgtatttaatctgaacaatattaagcacctttcccaagaatatgagactatttgagatgcatgattctgctttattaaaaataacctggaaccatttaaaacatttgggagacttttaagagaaaagtgatcttgaaggtgttaaaataaagttttaatttatattatgattgaaatgaaaacgatggatacaattaagattatttacaaatacataattaaacatgttcacaaatgtgtgataacagaggatcattatagtacacatgcttttgatattcctgtgtttgctggcagggagtacttttccttaattacccagaaatggtttttgaaagatgttatctttgttattgttgcttttgtcttttattctt

SEQ ID NO: 433131 - DNA, 3969 bp, Homo sapiens
  misc_feature (120)..(120): n is a, c, g, or t
aagcagcccgcggaccggcagcaaaggaacgtgcgaacgcgtgacgccgcccgactggctcgcgctctcccgtgccccggcgtcctccgcccgctcatggcccgggccgccgcggacgancggcgctgaggcgggccgcgtggagacgtgaggcggccgccgtggccctcacagtcggcgtttcgccgcctgcccgcggtgcccgcgcacgccggccgccatcgccttcgcgcctggctggcgggggcgctgtcctcccaggccgtccgcgccgctccctggagctcggcggagcgcggcagccagggccggcggaggcgcgaggagccgggcgccaccgccgccgccgccgccgccgccgcgggggccatgaccgtggagcagaacgtgctgcagcagagcgcggcgcagaagcaccagcagacgtttttgaatcaactgagagaaattacggggattaatgacacccagatactacagcaagccttgaaggatagtaatggaaacttggaattagcagtggctttccttactgcgaagaatgctaagacccctcagcaggaggagacaacttactaccaaacagcacttcctggcaatgatagatacatcagtgtgggaagccaagcagatacaaatgtgattgatctcactggagatgataaagatgatcttcagagagcaattgccttgagtttggccgaatcaaacagggcattcagggagactggaataactgatgaggaacaagccattagcagagttcttgaagccagcatagcagagaataaagcatgtttgaagaggacacctacagaagtttggagggattctcgaaacccttatgatagaaaaagacaggacaaagctcccgttgggctaaagaatgttggcaatacttgttggtttagtgctgttattcagtcattatttaatcttttggaatttagaagattagttctgaattacaagcctccatcaaatgctcaagatttaccccgaaaccaaaaggaacatcggaatttgccttttatgcgtgagctgaggtatctatttgcacttcttgttggtaccaaaaggaagtatgttgatccatcaagagcagttgaaattcttaaggatgctttcaaatcaaatgactcacagcagcaagatgtgagtgagtttacacacaaattattagattggttagaagatgccttccaaatgaaagctgaagaggagacggatgaagagaagccaaagaaccccatggtagagttgttctatggcagattcctggctgtgggagtacttgaaggtaaaaaatttgaaaacactgaaatgtttggtcagtacccacttcaggtcaatgggttcaaagatctgcatgagtgcctagaagctgcaatgattgaaggagaaattgagtctttacattcagagaattcaggaaaatcaggccaagagcattggtttactgaattaccacctgtgttaacatttgaattgtcaagatttgaatttaatcaggcattgggaagaccagaaaaaattcacaacaaattagaatttccccaagttttatatttggacagatacatgcacagaaacagagaaataacaagaattaagagggaagagatcaagagactgaaagattacctcacggtattacaacaaaggctagaaagatatttaagctatggttccggtcccaaacgattccccttggtagatgttcttcagtatgcattggaatttgcctcaagtaaacctgtttgcacttctcctgttgacgatattgacgctagttccccacctagtggttccataccatcacagacattaccaagcacaacagaacaacagggagccctatcttcagaactgccaagcacatcaccttcatcagttgctgccatttcatcgagatcagtaatacacaaaccatttactcagtcccggatacctccagatttgcccatgcatccggcaccaaggcacataacggaggaagaactttctgtgctggaaagttgtttacatcgctggaggacagaaatagaaaatgacaccagagatttgcaggaaagcatatccagaatccatcgaacaattgaattaatgtactctgacaaatctatgatacaagttccttatcgattacatgccgttttagttcacgaaggccaagctaatgctgggcactactgggcatatatttttgatcatcgtgaaagcagatggatgaagtacaatgatattgctgtgacaaaatcatcatgggaagagctagtgagggactcttttggtggttatagaaatgccagtgcatactgtttaatgtacataaatgataaggcacagttcctaatacaagaggagtttaataaagaaactgggcagccccttgttggtatagaaacattaccaccggatttgagagattttgttgaggaagacaaccaacgatttgaaaaagaactagaagaatgggatgcacaacttgcccagaaagctttgcaggaaaagcttttagcgtctcagaaattgagagagtcagagacttctgtgacaacagcacaagcagcaggagacccagaatatctagagcagccatcaagaagtgatttctcaaagcacttgaaagaagaaactattcaaataattaccaaggcatcacatgagcatgaagataaaagtcctgaaacagttttgcagtcggcaattaagttggaatatgcaaggttggttaagttggcccaagaagacaccccaccagaaaccgattatcgtttacatcatgtagtggtctactttatccagaaccaggcaccaaagaaaattattgagaaaacattactagaacaatttggagatagaaatttgagttttgatgaaaggtgtcacaacataatgaaagttgctcaagccaaactggaaatgataaaacctgaagaagtaaacttggaggaatatgaggagtggcatcaggattataggaaattcagggaaacaactatgtatctcataattgggctagaaaattttcaaagagaaagttatatagattccttgctgttcctcatctgtgcttatcagaataacaaagaactcttgtctaaaggcttatacagaggacatgatgaagaattgatatcacattatagaagagaatgtttgctaaaattaaatgagcaagccgcagaactcttcgaatctggagaggatcgagaagtaaacaatggtttgattatcatgaatgagtttattgtcccatttttgccattattactggtggatgaaatggaagaaaaggatatactagctgtagaagatatgagaaatcgatggtgttcctaccttggtcaagaaatggaaccacacctccaagaaaagctgacagattttttgccaaaactgcttgattgttctatggagattaaaagtttccatgagccaccgaagttaccttcatattccacgcatgaactctgtgagcgatttgcccgaatcatgttgtccctcagtcgaactcctgctgatggaagataaactgcacactttccctgaacacactgtataaactctttttagttcttaacccttgccttcctgtcacagggtttgcttgttgctgctatagtttttaacttttttttattttaataactgcaaaagacaaaatgactatacagactttagtcagactgcagacaataaagctgaaaatcgcatggcgctcagacattttaaccggaactgatgtataatcacaaatctaattgattttattatggcaaaactatgcttttgccaccttcctgttgcagtattactttgcttttatcttttctttctcaacagctttccattcagtctggatccttccatgactacagccatttaagtgttcagcactgtgtacgatacataatatttggtagcttgtaaatgaaataaagaataaagttttatttatggcta

SEQ ID NO: 433132 - DNA, 2154 bp, Homo sapiens
  misc_feature (120)..(120): n is a, c, g, or t
aagcagcccgcggaccggcagcaaaggaacgtgcgaacgcgtgacgccgcccgactggctcgcgctctcccgtgccccggcgtcctccgcccgctcatggcccgggccgccgcggacgancggcgctgaggcgggccgcgtggagacgtgaggcggccgccgtggccctcacagtcggcgtttcgccgcctgcccgcggtgcccgcgcacgccggccgccatcgccttcgcgcctggctggcgggggcgctgtcctcccaggccgtccgcgccgctccctggagctcggcggagcgcggcagccagggccggcggaggcgcgaggagccgggcgccaccgccgccgccgccgccgccgccgcgggggccatgaccgtggagcagaacgtgctgcagcagagcgcggcgcagaagcaccagcagacgtttttgaatcaactgagagaaattacggggattaatgacacccagatactacagcaagccttgaaggatagtaatggaaacttggaattagcagtggctttccttactgcgaagaatgctaagacccctcagcaggaggagacaacttactaccaaacagcacttcctggcaatgatagatacatcagtgtgggaagccaagcagatacaaatgtgattgatctcactggagatgataaagatgatcttcagagagcaattgccttgagtttggccgaatcaaacagggcattcagggagactggaataactgatgaggaacaagccattagcagagttcttgaagccagcatagcagagaataaagcatgtttgaagaggacacctacagaagtttggagggattctcgaaacccttatgatagaaaaagacaggacaaagctcccgttgggctaaagaatgttggcaatacttgttggtttagtgctgttattcagtcattatttaatcttttggaatttagaagattagttctgaattacaagcctccatcaaatgctcaagatttaccccgaaaccaaaaggaacatcggaatttgccttttatgcgtgagctgaggtatctatttgcacttcttgttggtaccaaaaggaagtatgttgatccatcaagagcagttgaaattcttaaggatgctttcaaatcaaatgactcacagcaggagtggcatcaggattataggaaattcagggaaacaactatgtatctcataattgggctagaaaattttcaaagagaaagttatatagattccttgctgttcctcatctgtgcttatcagaataacaaagaactcttgtctaaaggcttatacagaggacatgatgaagaattgatatcacattatagaagagaatgtttgctaaaattaaatgagcaagccgcagaactcttcgaatctggagaggatcgagaagtaaacaatggtttgattatcatgaatgagtttattgtcccatttttgccattattactggtggatgaaatggaagaaaaggatatactagctgtagaagatatgagaaatcgatggtgttcctaccttggtcaagaaatggaaccacacctccaagaaaagctgacagattttttgccaaaactgcttgattgttctatggagattaaaagtttccatgagccaccgaagttaccttcatattccacgcatgaactctgtgagcgatttgcccgaatcatgttgtccctcagtcgaactcctgctgatggaagataaactgcacactttccctgaacacactgtataaactctttttagttcttaacccttgccttcctgtcacagggtttgcttgttgctgctatagtttttaacttttttttattttaataactgcaaaagacaaaatgactatacagactttagtcagactgcagacaataaagctgaaaatcgcatggcgctcagacattttaaccggaactgatgtataatcacaaatctaattgattttattatggcaaaactatgcttttgccaccttcctgttgcagtattactttgcttttatcttttctttctcaacagctttccattcagtctggatccttccatgactacagccatttaagtgttcagcactgtgtacgatacataatatttggtagcttgtaaatgaaataaagaataaagttttatttatggcta

SEQ ID NO: 433133 - DNA, 2622 bp, Homo sapiens
cccgcgcgcggtatatgcaatgcagtccgtctacgtgattcttcgtcatggttttcaaacacaagcagcaggagacccagaatatctagagcagccatcaagaagtgatttctcaaagcacttgaaagaagaaactattcaaataattaccaaggcatcacatgagcatgaagataaaagtcctgaaacagttttgcagtcggcaattaagttggaatatgcaaggttggttaagttggcccaagaagacaccccaccagaaaccgattatcgtttacatcatgtagtggtctactttatccagaaccaggcaccaaagaaaattattgagaaaacattactagaacaatttggagatagaaatttgagttttgatgaaaggtgtcacaacataatgaaagttgctcaagccaaactggaaatgataaaacctgaagaagtaaacttggaggaatatgaggagtggcatcaggattataggaaattcagggaaacaactatgtatctcataattgggctagaaaattttcaaagagaaagttatatagattccttgctgttcctcatctgtgcttatcagaataacaaagaactcttgtctaaaggcttatacagaggacatgatgaagaattgatatcacattatagaagagaatgtttgctaaaattaaatgagcaagccgcagaactcttcgaatctggagaggatcgagaagtaaacaatggtttgattatcatgaatgagtttattgtcccatttttgccattattactggtggatgaaatggaagaaaaggatatactagctgtagaagatatgagaaatcgatggtgttcctaccttggtcaagaaatggaaccacacctccaagaaaagctgacagattttttgccaaaactgcttgattgttctatggagattaaaagtttccatgagccaccgaagttaccttcatattccacgcatgaactctgtgagcgatttgcccgaatcatgttgtccctcagtcgaactcctgctgatggaagataaactgcacactttccctgaacacactgtataaactctttttagttcttaacccttgccttcctgtcacagggtttgcttgttgctgctatagtttttaacttttttttattttaataactgcaaaagacaaaatgactatacagactttagtcagactgcagacaataaagctgaaaatcgcatggcgctcagacattttaaccggaactgatgtataatcacaaatctaattgattttattatggcaaaactatgcttttgccaccttcctgttgcagtattactttgcttttatcttttctttctcaacagctttccattcagtctggatccttccatgactacagccatttaagtgttcagcactgtgtacgatacataatatttggtagcttgtaaatgaaataaagaataaagttttatttatggctacctatgtgtttgtaagcaggtatattgtatattagtgtattagtaatactagataaatgaattttgtctggggattaagattggatagttaatagattaatacaatcttttaattctgctctaatgctagcaaattggaaaatgtttaagtctttgacacttaaatttatctatatttttaacaaagttcttgaacttagtatggcaccggaacctgttttgaattcagtcaggtttttactcaagtaagtggtgttttttttaagtcaaactacactgaaacttttatccttttcttagattaatcttactttttaaatgtatttacaatatacagcaaggtgattatttcaagagaatcccaaagtacttgaataagggctattgtaaaatttaaaagaaatatttatatatacacatatatacacatacacacatgtatatatatattcttcataatggaggacaatgttttgcaatatataaatcattctatttttgtaaattgtatatcactttaattgaaaatgttctctactaattaatactgtgaaacaaaattgatgttgtttaactagaagttatgagtatcttaactgcctttattccttttcaaaaaggaaaaagctgtagaacattttgtagatgaaactactgtttaagattaatgaattaatattgtgaatgaaaatcaaaatccatactttaaaggtaatcatgttactaacaacctatttttgaattcataaaaatttctttataaatgatgttttgtgaacatagtaaaatagaccattatactatgtgtatgtttgatacagcgtcgccaaaactagtgttctttattagtgcctctcacaaaagatcctggatggaggagtaagatgaaatattatgctattatatgatgctgtttgtaaaggtattaatgtactagtaaggtgttaatgacaaggaattagtactattcctgttgtaaagttagattttgcatattgtatctatcaaaatatgtttgggtttagattttaagttgtctactgagcagatttctgcattggttttccagtcctgttaaaagtttagaaacttcatatgtgtcatcacagcttttgtaaagaaagtatccttaatattttatgacattctaccacagt

SEQ ID NO: 433134 - DNA, 2418 bp, Homo sapiens
  misc_feature (120)..(120): n is a, c, g, or t
aagcagcccgcggaccggcagcaaaggaacgtgcgaacgcgtgacgccgcccgactggctcgcgctctcccgtgccccggcgtcctccgcccgctcatggcccgggccgccgcggacgancggcgctgaggcgggccgcgtggagacgtgaggcggccgccgtggccctcacagtcggcgtttcgccgcctgcccgcggtgcccgcgcacgccggccgccatcgccttcgcgcctggctggcgggggcgctgtcctcccaggccgtccgcgccgctccctggagctcggcggagcgcggcagccagggccggcggaggcgcgaggagccgggcgccaccgccgccgccgccgccgccgccgcgggggccatgaccgtggagcagaacgtgctgcagcagagcgcggcgcagaagcaccagcagacgtttttgaatcaactgagagaaattacggggattaatgacacccagatactacagcaagccttgaaggatagtaatggaaacttggaattagcagtggctttccttactgcgaagaatgctaagacccctcagcaggaggagacaacttactaccaaacagcacttcctggcaatgatagatacatcagtgtgggaagccaagcagatacaaatgtgattgatctcactggagatgataaagatgatcttcagagagcaattgccttgagtttggccgaatcaaacagggcattcagggagactggaataactgatgaggaacaagccattagcagagttcttgaagccagcatagcagagaataaagcatgtttgaagaggacacctacagaagtttggagggattctcgaaacccttatgatagaaaaagacaggacaaagctcccgttgggctaaagaatgttggcaatacttgttggtttagtgctgttattcagtcattatttaatcttttggaatttagaagattagttctgaattacaagcctccatcaaatgctcaagatttaccccgaaaccaaaaggaacatcggaatttgccttttatgcgtgagctgaggtatctatttgcacttcttgttggtaccaaaaggaagtatgttgatccatcaagagcagttgaaattcttaaggatgctttcaaatcaaatgactcacagcagcaagatgtgagtgagtttacacacaaattattagattggttagaagatgccttccaaatgaaagctgaagaggagacggatgaagagaagccaaagaaccccatggtagagttgttctatggcagattcctggctgtgggagtacttgaaggtaaaaaatttgaaaacactgaaatgtttggtcagtacccacttcaggtcaatgggttcaaagatctgcatgagtgcctagaagctgcaatgattgaaggagaaattgagtctttacattcagagaattcaggaaaatcaggccaagagcattggtttactgaattaccacctgtgttaacatttgaattgtcaagatttgaatttaatcaggcattgggaagaccagaaaaaattcacaacaaattagaatttccccaagttttatatttggacagatacatgcacagaaacagagaaataacaagaattaagagggaagagatcaagagactgaaagattacctcacggtattacaacaaaggctagaaagatatttaagctatggttccggtcccaaacgattccccttggtagatgttcttcagtatgcattggaatttgcctcaagtaaacctgtttgcacttctcctgttgacgatattgacgctagttccccacctagtggttccataccatcacagacattaccaagcacaacagaacaacagggagccctatcttcagaactgccaagcacatcaccttcatcagttgctgccatttcatcgagatcagtaatacacaaaccatttactcagtcccggatacctccagatttgcccatgcatccggcaccaaggcacataacggaggaagaactttctgtgctggaaagttgtttacatcgctggaggacagaaatagaaaatgacaccagagatttgcaggaaagcatatccagaatccatcgaacaattgaattaatgtactctgacaaatctatgatacaagttccttatcgattacatgccgttttagttcacgaaggccaagctaatgctgggcactactgggcatatatttttgatcatcgtgaaagcagatggatgaagtacaatgatattgctgtgacaaaatcatcatgggaagagctagtgagggaactagcgtcaatatcgtcaccggagaagtgcaacaggtttacttgaggccaattccaatgcatactgaagaacatctaccacggggaatcgtttgggaccggaaccatagcctctaaatatctttctagcctt

SEQ ID NO: 433135 - DNA, 1831 bp, Homo sapiens
aaccgatgtgatgcatgtatacaagatgagagatcgatggtgttcctatctgggtcagtaaatggggaccacacctccaagaaaagctgacagattttttgccaaaactgcttgattgttctatggagattaaaagtttccatgagccaccgaagttaccttcatattccacgcatgaactctgtgagcgatttgcccgaatcatgttgtccctcagtcgaactcctgctgatggaagataaactgcacactttccctgaacacactgtataaactctttttagttcttaacccttgccttcctgtcacagggtttgcttgttgctgctatagtttttaacttttttttattttaataactgcaaaagacaaaatgactatacagactttagtcagactgcagacaataaagctgaaaatcgcatggcgctcagacattttaaccggaactgatgtataatcacaaatctaattgattttattatggcaaaactatgcttttgccaccttcctgttgcagtattactttgcttttatcttttctttctcaacagctttccattcagtctggatccttccatgactacagccatttaagtgttcagcactgtgtacgatacataatatttggtagcttgtaaatgaaataaagaataaagttttatttatggctacctatgtgtttgtaagcaggtatattgtatattagtgtattagtaatactagataaatgaattttgtctggggattaagattggatagttaatagattaatacaatcttttaattctgctctaatgctagcaaattggaaaatgtttaagtctttgacacttaaatttatctatatttttaacaaagttcttgaacttagtatggcaccggaacctgttttgaattcagtcaggtttttactcaagtaagtggtgttttttttaagtcaaactacactgaaacttttatccttttcttagattaatcttactttttaaatgtatttacaatatacagcaaggtgattatttcaagagaatcccaaagtacttgaataagggctattgtaaaatttaaaagaaatatttatatatacacatatatacacatacacacatgtatatatatattcttcataatggaggacaatgttttgcaatatataaatcattctatttttgtaaattgtatatcactttaattgaaaatgttctctactaattaatactgtgaaacaaaattgatgttgtttaactagaagttatgagtatcttaactgcctttattccttttcaaaaaggaaaaagctgtagaacattttgtagatgaaactactgtttaagattaatgaattaatattgtgaatgaaaatcaaaatccatactttaaaggtaatcatgttactaacaacctatttttgaattcataaaaatttctttataaatgatgttttgtgaacatagtaaaatagaccattatactatgtgtatgtttgatacagcgtcgccaaaactagtgttctttattagtgcctctcacaaaagatcctggatggaggagtaagatgaaatattatgctattatatgatgctgtttgtaaaggtattaatgtactagtaaggtgttaatgacaaggaattagtactattcctgttgtaaagttagattttgcatattgtatctatcaaaatatgtttgggtttagattttaagttgtctactgagcagatttctgcattggttttccagtcctgttaaaagtttagaaacttcatatgtgtcatcacagcttttgtaaagaaagtatccttaatattttatgacattctaccacagt

SEQ ID NO: 433136 - DNA, 715 bp, Homo sapiens
gagttttctgtattaatcacttgagtgcccctgcatctgcagaaatttctggcacgtggtgttgactctgtaggaagtttttgaagggaaaagtgaattgattacctttatatttctgtatcaaggaatacaatagtatatattcagttgccattaatggagatgagtttttcaaaaattaatatggattctgaatttctttatttttaaaactattttgagtgcttatacaattttataatttggggaagttaatctctagagaagaaaaaatggcccctgtgttgatgatcggcataagccaaacatgactgaaaaacacaataatgttttctccaccgctgttgcttttgtttctgttgttgccatatgcatagctttttctaaagagagattttcagttctagataggttgagattgttttctctaaataccgtttgttctaatactgtttgtgaacatatttatgttgtcttccttattaatacttacagatccttaatttaaaaaggaaacaaaaacctattcttttttttttcctgcattgcattaagaaattaaatgagcaagccgcagaactcttcgaatctggagaggatcgagaagtaaacaatggtttgattatcatgaatgagtttattgtcccatttttgccattattactggtggatgaaatggaagaaaaggatatactagctgtagaagatatgagaa

SEQ ID NO: 433137 - DNA, 432 bp, Homo sapiens
aatcattaaatgacaccttatatccttagatttgcaggaaagcatatccagaatccatcgaacaattgaattaatgtactctgacaaatctatgatacaagtaagtgaaattttgagctagtaatcattgtcaaaattatttacatatattttaatttacctttacattatcttaatctaatttttctttacatgttttgttttaaaattttggcaaatcttattgtaaaataataagggcttgcaatatgtacaatgtgacagttcatctgaatggggaaacttttataacaaatttataacaaaattcatgacaagttttccccattcagttgtattttcacaccgtatgtgttgtgtacccttactattttacagtaaaatctaccaaagtttttcaaaaggctatagcatctttaaaaagtcttatgg

SEQ ID NO: 433138 - DNA, 378 bp, Homo sapiens
ggttctccacagcatgattcattctttctaaaagaatgaagttgtttggcctttctcaagttctttttccttttttactctagtttactttattctgttttttgtttgttttggaaaaccaaaggtgatttgttttcttttcctagtatattttcagagttgagaatataatgattttgggtttttcctccctctagcaccagcagacgtttttgaatcaactgagagaaattacggggattaatgacacccagatactacagcaagccttgaaggtatggcctctgttttatgatatacagtttgtggtatatgctcatctctagtgcgtattatatttgatagttgattttttttttggggtataccatgtggtag

SEQ ID NO: 433139 - DNA, 5222 bp, Homo sapiens
  misc_feature (120)..(120): n is a, c, g, or t
aagcagcccgcggaccggcagcaaaggaacgtgcgaacgcgtgacgccgcccgactggctcgcgctctcccgtgccccggcgtcctccgcccgctcatggcccgggccgccgcggacgancggcgctgaggcgggccgcgtggagacgtgaggcggccgccgtggccctcacagtcggcgtttcgccgcctgcccgcggtgcccgcgcacgccggccgccatcgccttcgcgcctggctggcgggggcgctgtcctcccaggccgtccgcgccgctccctggagctcggcggagcgcggcagccagggccggcggaggcgcgaggagccgggcgccaccgccgccgccgccgccgccgccgcgggggccatgaccgtggagcagaacgtgctgcagcagagcgcggcgcagaagcaccagcagacgtttttgaatcaactgagagaaattacggggattaatgacacccagatactacagcaagccttgaaggatagtaatggaaacttggaattagcagtggctttccttactgcgaagaatgctaagacccctcagcaggaggagacaacttactaccaaacagcacttcctggcaatgatagatacatcagtgtgggaagccaagcagatacaaatgtgattgatctcactggagatgataaagatgatcttcagagagcaattgccttgagtttggccgaatcaaacagggcattcagggagactggaataactgatgaggaacaagccattagcagagttcttgaagccagcatagcagagaataaagcatgtttgaagaggacacctacagaagtttggagggattctcgaaacccttatgatagaaaaagacaggacaaagctcccgttgggctaaagaatgttggcaatacttgttggtttagtgctgttattcagtcattatttaatcttttggaatttagaagattagttctgaattacaagcctccatcaaatgctcaagatttaccccgaaaccaaaaggaacatcggaatttgccttttatgcgtgagctgaggtatctatttgcacttcttgttggtaccaaaaggaagtatgttgatccatcaagagcagttgaaattcttaaggatgctttcaaatcaaatgactcacagcagcaagatgtgagtgagtttacacacaaattattagattggttagaagatgccttccaaatgaaagctgaagaggagacggatgaagagaagccaaagaaccccatggtagagttgttctatggcagattcctggctgtgggagtacttgaaggtaaaaaatttgaaaacactgaaatgtttggtcagtacccacttcaggtcaatgggttcaaagatctgcatgagtgcctagaagctgcaatgattgaaggagaaattgagtctttacattcagagaattcaggaaaatcaggccaagagcattggtttactgaattaccacctgtgttaacatttgaattgtcaagatttgaatttaatcaggcattgggaagaccagaaaaaattcacaacaaattagaatttccccaagttttatatttggacagatacatgcacagaaacagagaaataacaagaattaagagggaagagatcaagagactgaaagattacctcacggtattacaacaaaggctagaaagatatttaagctatggttccggtcccaaacgattccccttggtagatgttcttcagtatgcattggaatttgcctcaagtaaacctgtttgcacttctcctgttgacgatattgacgctagttccccacctagtggttccataccatcacagacattaccaagcacaacagaacaacagggagccctatcttcagaactgccaagcacatcaccttcatcagttgctgccatttcatcgagatcagtaatacacaaaccatttactcagtcccggatacctccagatttgcccatgcatccggcaccaaggcacataacggaggaagaactttctgtgctggaaagttgtttacatcgctggaggacagaaatagaaaatgacaccagagatttgcaggaaagcatatccagaatccatcgaacaattgaattaatgtactctgacaaatctatgatacaagttccttatcgattacatgccgttttagttcacgaaggccaagctaatgctgggcactactgggcatatatttttgatcatcgtgaaagcagatggatgaagtacaatgatattgctgtgacaaaatcatcatgggaagagctagtgagggactcttttggtggttatagaaatgccagtgcatactgtttaatgtacataaatgataaggcacagttcctaatacaagaggagtttaataaagaaactgggcagccccttgttggtatagaaacattaccaccggatttgagagattttgttgaggaagacaaccaacgatttgaaaaagaactagaagaatgggatgcacaacttgcccagaaagctttgcaggaaaagcttttagcgtctcagaaattgagagagtcagagacttctgtgacaacagcacaagcagcaggagacccagaatatctagagcagccatcaagaagtgatttctcaaagcacttgaaagaagaaactattcaaataattaccaaggcatcacatgagcatgaagataaaagtcctgaaacagttttgcagtcgatcatgatgacaccgaacatgcaaggtattatcatggcgataggtaaatccaggagtgtatatgacaggtgtggccctgaagcagggttctttaaggcaattaagttggaatatgcaaggttggttaagttggcccaagaagacaccccaccagaaaccgattatcgtttacatcatgtagtggtctactttatccagaaccaggcaccaaagaaaattattgagaaaacattactagaacaatttggagatagaaatttgagttttgatgaaaggtgtcacaacataatgaaagttgctcaagccaaactggaaatgataaaacctgaagaagtaaacttggaggaatatgaggagtggcatcaggattataggaaattcagggaaacaactatgtatctcataattgggctagaaaattttcaaagagaaagttatatagattccttgctgttcctcatctgtgcttatcagaataacaaagaactcttgtctaaaggcttatacagaggacatgatgaagaattgatatcacattatagaagagaatgtttgctaaaattaaatgagcaagccgcagaactcttcgaatctggagaggatcgagaagtaaacaatggtttgattatcatgaatgagtttattgtcccatttttgccattattactggtggatgaaatggaagaaaaggatatactagctgtagaagatatgagaaatcgatggtgttcctaccttggtcaagaaatggaaccacacctccaagaaaagctgacagattttttgccaaaactgcttgattgttctatggagattaaaagtttccatgagccaccgaagttaccttcatattccacgcatgaactctgtgagcgatttgcccgaatcatgttgtccctcagtcgaactcctgctgatggaagataaactgcacactttccctgaacacactgtataaactctttttagttcttaacccttgccttcctgtcacagggtttgcttgttgctgctatagtttttaacttttttttattttaataactgcaaaagacaaaatgactatacagactttagtcagactgcagacaataaagctgaaaatcgcatggcgctcagacattttaaccggaactgatgtataatcacaaatctaattgattttattatggcaaaactatgcttttgccaccttcctgttgcagtattactttgcttttatcttttctttctcaacagctttccattcagtctggatccttccatgactacagccatttaagtgttcagcactgtgtacgatacataatatttggtagcttgtaaatgaaataaagaataaagttttatttatggctacctatgtgtttgtaagcaggtatattgtatattagtgtattagtaatactagataaatgaattttgtctggggattaagattggatagttaatagattaatacaatcttttaattctgctctaatgctagcaaattggaaaatgtttaagtctttgacacttaaatttatctatatttttaacaaagttcttgaacttagtatggcaccggaacctgttttgaattcagtcaggtttttactcaagtaagtggtgttttttttaagtcaaactacactgaaacttttatccttttcttagattaatcttactttttaaatgtatttacaatatacagcaaggtgattatttcaagagaatcccaaagtacttgaataagggctattgtaaaatttaaaagaaatatttatatatacacatatatacacatacacacatgtatatatatattcttcataatggaggacaatgttttgcaatatataaatcattctatttttgtaaattgtatatcactttaattgaaaatgttctctactaattaatactgtgaaacaaaattgatgttgtttaactagaagttatgagtatcttaactgcctttattccttttcaaaaaggaaaaagctgtagaacattttgtagatgaaactactgtttaagattaatgaattaatattgtgaatgaaaatcaaaatccatactttaaaggtaatcatgttactaacaacctatttttgaattcataaaaatttctttataaatgatgttttgtgaacatagtaaaatagaccattatactatgtgtatgtttgatacagcgtcgccaaaactagtgttctttattagtgcctctcacaaaagatcctggatggaggagtaagatgaaatattatgctattatatgatgctgtttgtaaaggtattaatgtactagtaaggtgttaatgacaaggaattagtactattcctgttgtaaagttagattttgcatattgtatctatcaaaatatgtttgggtttagattttaagttgtctactgagcagatttctgcattggttttccagtcctgttaaaagtttagaaacttcatatgtgtcatcacagcttttgtaaagaaagtatccttaatattttatgacattctaccacagt

SEQ ID NO: 433140 - DNA, 3820 bp, Homo sapiens
  misc_feature (120)..(120): n is a, c, g, or t
aagcagcccgcggaccggcagcaaaggaacgtgcgaacgcgtgacgccgcccgactggctcgcgctctcccgtgccccggcgtcctccgcccgctcatggcccgggccgccgcggacgancggcgctgaggcgggccgcgtggagacgtgaggcggccgccgtggccctcacagtcggcgtttcgccgcctgcccgcggtgcccgcgcacgccggccgccatgaccgtggagcagaacgtgctgcagcagagcgcggcgcagaagcaccagcagacgtttttgaatcaactgagagaaattacggggattaatgacacccagatactacagcaagccttgaaggatagtaatggaaacttggaattagcagtggctttccttactgcgaagaatgctaagacccctcagcaggaggagacaacttactaccaaacagcacttcctggcaatgatagatacatcagtgtgggaagccaagcagatacaaatgtgattgatctcactggagatgataaagatgatcttcagagagcaattgccttgagtttggccgaatcaaacagggcattcagggagactggaataactgatgaggaacaagccattagcagagttcttgaagccagcatagcagagaataaagcatgtttgaagaggacacctacagaagtttggagggattctcgaaacccttatgatagaaaaagacaggacaaagctcccgttgggctaaagaatgttggcaatacttgttggtttagtgctgttattcagtcattatttaatcttttggaatttagaagattagttctgaattacaagcctccatcaaatgctcaagatttaccccgaaaccaaaaggaacatcggaatttgccttttatgcgtgagctgaggtatctatttgcacttcttgttggtaccaaaaggaagtatgttgatccatcaagagcagttgaaattcttaaggatgctttcaaatcaaatgactcacagcagcaagatgtgagtgagtttacacacaaattattagattggttagaagatgccttccaaatgaaagctgaagaggagacggatgaagagaagccaaagaaccccatggtagagttgttctatggcagattcctggctgtgggagtacttgaaggtaaaaaatttgaaaacactgaaatgtttggtcagtacccacttcaggtcaatgggttcaaagatctgcatgagtgcctagaagctgcaatgattgaaggagaaattgagtctttacattcagagaattcaggaaaatcaggccaagagcattggtttactgaattaccacctgtgttaacatttgaattgtcaagatttgaatttaatcaggcattgggaagaccagaaaaaattcacaacaaattagaatttccccaagttttatatttggacagatacatgcacagaaacagagaaataacaagaattaagagggaagagatcaagagactgaaagattacctcacggtattacaacaaaggctagaaagatatttaagctatggttccggtcccaaacgattccccttggtagatgttcttcagtatgcattggaatttgcctcaagtaaacctgtttgcacttctcctgttgacgatattgacgctagttccccacctagtggttccataccatcacagacattaccaagcacaacagaacaacagggagccctatcttcagaactgccaagcacatcaccttcatcagttgctgccatttcatcgagatcagtaatacacaaaccatttactcagtcccggatacctccagatttgcccatgcatccggcaccaaggcacataacggaggaagaactttctgtgctggaaagttgtttacatcgctggaggacagaaatagaaaatgacaccagagatttgcaggaaagcatatccagaatccatcgaacaattgaattaatgtactctgacaaatctatgatacaagttccttatcgattacatgccgttttagttcacgaaggccaagctaatgctgggcactactgggcatatatttttgatcatcgtgaaagcagatggatgaagtacaatgatattgctgtgacaaaatcatcatgggaagagctagtgagggactcttttggtggttatagaaatgccagtgcatactgtttaatgtacataaatgataaggcacagttcctaatacaagaggagtttaataaagaaactgggcagccccttgttggtatagaaacattaccaccggatttgagagattttgttgaggaagacaaccaacgatttgaaaaagaactagaagaatgggatgcacaacttgcccagaaagctttgcaggaaaagcttttagcgtctcagaaattgagagagtcagagacttctgtgacaacagcacaagcagcaggagacccagaatatctagagcagccatcaagaagtgatttctcaaagcacttgaaagaagaaactattcaaataattaccaaggcatcacatgagcatgaagataaaagtcctgaaacagttttgcagtcggcaattaagttggaatatgcaaggttggttaagttggcccaagaagacaccccaccagaaaccgattatcgtttacatcatgtagtggtctactttatccagaaccaggcaccaaagaaaattattgagaaaacattactagaacaatttggagatagaaatttgagttttgatgaaaggtgtcacaacataatgaaagttgctcaagccaaactggaaatgataaaacctgaagaagtaaacttggaggaatatgaggagtggcatcaggattataggaaattcagggaaacaactatgtatctcataattgggctagaaaattttcaaagagaaagttatatagattccttgctgttcctcatctgtgcttatcagaataacaaagaactcttgtctaaaggcttatacagaggacatgatgaagaattgatatcacattatagaagagaatgtttgctaaaattaaatgagcaagccgcagaactcttcgaatctggagaggatcgagaagtaaacaatggtttgattatcatgaatgagtttattgtcccatttttgccattattactggtggatgaaatggaagaaaaggatatactagctgtagaagatatgagaaatcgatggtgttcctaccttggtcaagaaatggaaccacacctccaagaaaagctgacagattttttgccaaaactgcttgattgttctatggagattaaaagtttccatgagccaccgaagttaccttcatattccacgcatgaactctgtgagcgatttgcccgaatcatgttgtccctcagtcgaactcctgctgatggaagataaactgcacactttccctgaacacactgtataaactctttttagttcttaacccttgccttcctgtcacagggtttgcttgttgctgctatagtttttaacttttttttattttaataactgcaaaagacaaaatgactatacagactttagtcagactgcagacaataaagctgaaaatcgcatggcgctcagacattttaaccggaactgatgtataatcacaaatctaattgattttattatggcaaaactatgcttttgccaccttcctgttgcagtattactttgcttttatcttttctttctcaacagctttccattcagtctggatccttccatgactacagccatttaagtgttcagcactgtgtacgatacataatatttggtagcttgtaaatgaaataaagaataaagttttatttatggcta

SEQ ID NO: 433141 - DNA, 2454 bp, Homo sapiens
ctcaacctgtagcctgtgacaatcattatcgaaggcaattaagttggaatatgcaaggttggttaagttggcccaagaagacaccccaccagaaaccgattatcgtttacatcatgtagtggtctactttatccagaaccaggcaccaaagaaaattattgagaaaacattactagaacaatttggagatagaaatttgagttttgatgaaaggtgtcacaacataatgaaagttgctcaagccaaactggaaatgataaaacctgaagaagtaaacttggaggaatatgaggagtggcatcaggattataggaaattcagggaaacaactatgtatctcataattgggctagaaaattttcaaagagaaagttatatagattccttgctgttcctcatctgtgcttatcagaataacaaagaactcttgtctaaaggcttatacagaggacatgatgaagaattgatatcacattatagaagagaatgtttgctaaaattaaatgagcaagccgcagaactcttcgaatctggagaggatcgagaagtaaacaatggtttgattatcatgaatgagtttattgtcccatttttgccattattactggtggatgaaatggaagaaaaggatatactagctgtagaagatatgagaaatcgatggtgttcctaccttggtcaagaaatggaaccacacctccaagaaaagctgacagattttttgccaaaactgcttgattgttctatggagattaaaagtttccatgagccaccgaagttaccttcatattccacgcatgaactctgtgagcgatttgcccgaatcatgttgtccctcagtcgaactcctgctgatggaagataaactgcacactttccctgaacacactgtataaactctttttagttcttaacccttgccttcctgtcacagggtttgcttgttgctgctatagtttttaacttttttttattttaataactgcaaaagacaaaatgactatacagactttagtcagactgcagacaataaagctgaaaatcgcatggcgctcagacattttaaccggaactgatgtataatcacaaatctaattgattttattatggcaaaactatgcttttgccaccttcctgttgcagtattactttgcttttatcttttctttctcaacagctttccattcagtctggatccttccatgactacagccatttaagtgttcagcactgtgtacgatacataatatttggtagcttgtaaatgaaataaagaataaagttttatttatggctacctatgtgtttgtaagcaggtatattgtatattagtgtattagtaatactagataaatgaattttgtctggggattaagattggatagttaatagattaatacaatcttttaattctgctctaatgctagcaaattggaaaatgtttaagtctttgacacttaaatttatctatatttttaacaaagttcttgaacttagtatggcaccggaacctgttttgaattcagtcaggtttttactcaagtaagtggtgttttttttaagtcaaactacactgaaacttttatccttttcttagattaatcttactttttaaatgtatttacaatatacagcaaggtgattatttcaagagaatcccaaagtacttgaataagggctattgtaaaatttaaaagaaatatttatatatacacatatatacacatacacacatgtatatatatattcttcataatggaggacaatgttttgcaatatataaatcattctatttttgtaaattgtatatcactttaattgaaaatgttctctactaattaatactgtgaaacaaaattgatgttgtttaactagaagttatgagtatcttaactgcctttattccttttcaaaaaggaaaaagctgtagaacattttgtagatgaaactactgtttaagattaatgaattaatattgtgaatgaaaatcaaaatccatactttaaaggtaatcatgttactaacaacctatttttgaattcataaaaatttctttataaatgatgttttgtgaacatagtaaaatagaccattatactatgtgtatgtttgatacagcgtcgccaaaactagtgttctttattagtgcctctcacaaaagatcctggatggaggagtaagatgaaatattatgctattatatgatgctgtttgtaaaggtattaatgtactagtaaggtgttaatgacaaggaattagtactattcctgttgtaaagttagattttgcatattgtatctatcaaaatatgtttgggtttagattttaagttgtctactgagcagatttctgcattggttttccagtcctgttaaaagtttagaaacttcatatgtgtcatcacagcttttgtaaagaaagtatccttaatattttatgacattctaccacagt

SEQ ID NO: 433142 - DNA, 3517 bp, Homo sapiens
ggcgctcgcagactccggagtcgccaacatgtcgaccgccatgaatttcgggaccaagagcttccagccgcggcccccggacaagggcagcttcccgctggatcacttaggtgaatgtaaaagctttaaagagaaattcatgaagtgtcttcataacaataattttgaaaatgctttgtgcagaaaggaatcaaaagaatatttagaatgcaggatggagagaaaattgatgctacaagaaccattggagaaactgggatttggagacttgactagtggaaaatcagaggcaaaaaaatgaattttgatgagaagacccctgggccgtgttcagtggtctctcaggacggagggcatcatcctgcctcttaggttggctgaggcctgcgtgtggtgtccttagaaatgggcttcgaatagaagctccagccctgtgggggcgtctcctgggtagggagtggcgtcccgttttcccttaggagggtgtttctgcattgaacccctgagtgggacggcgttcccggcaaagctgggagggaggcgagcgtggggcaagacccttgtcttcgaggccggggccctcttgtatggggcggttttatgttgcagtcctctgatactttctgagttcaaagaggtaaatgtataaatttcagtcccttctgaacacagatatcatcagaaaattaccattccctagcaggatgttttcgtgtttgtattcgtatatgccagttcatttcctttgaaaaaaaaaaaaagtggaacacaaagtaggaagtgagaaccttctggctttggatggattgacttcttgattctttctggttttgcctgaacaccaagtagcttcataatcaaagggtcattttctggtttgtatcagaccgtatttataaagttgggtatttaatttcagtaactcctgtattttaacagaaaaagaacctgagtccatttgcagttaggctcgcaccagctgtcttctgtgccagccagctccgcccgagaccccggcacgtgttcgcagcacagcctggcaggggccctgagcggagttctcagcccgtctgtgccaaagttgcctgtgggtcacggaaacccggcccatgtccacccagtgcgtcaggccagccggggcccaaacctgtggatggaacgcaggtgcctgcacatctggggcctcagccagacctgtctccttcccaggcactgtcggaaaggggctggctcctgtctggtcagtggaggatggtggcaggagacggggtggggaggtccaggtcacgtcctctctggcgaccctggcagtggctgtctccaagccctggcaggtggggccaccaatctggccgacctcaggctctgggaaacaggctgccctcgtccctctgcctgtgggtggctgaggcttctcagcccatctccagttctctgcagcaaaggccctctgtttctgtcctgcagtggtggccctttcgtggttaaacatgtccctcccctcctcacagaactgagtacctattgcggctgggcccgcccaaccctgtgtccctgcacccatgggttctaccacctgattcggctgcagctgtcactgtcccgtgtctgctctctgtcaggcctctgagtgctgcagacgtattaacatatcaccgctagttgatggaaagtcttgtttcttattagaatattttgtgtaggcacagggttgccccagcactgtctatagcaaccccagtgtcctcacagtgcacgtgagccgtgacgcagccaccgtggagtcggcgctgacgcggtgtggccacgtgccatgagctcgccaacgcagtgcggctatatggcgtgagcttactgtgaagtggagacaggcagggacacaggaaactacaaacgagaaatccagaaggaggagctggaactgatgggcatagccggccgcgagcccctccgagcacccctgggggtggagttctggctgtcatggcagagggtttcacatgctcaaaaagtaaatgaaccaggatgtgaggggaacacaacagaccatgccgacggagctcccgggcccaggccggggcctcttcccatcgcactctgacccgccgtcgggagtgcccaggcccgggtcgggcctgcctctccgctcgcaccgcactctgacccatcaggagtgtggggaagaccgtcgaccaaaggtgggaaagacaggaaagatactgtactctaagtagtaaatttgttttttgcgtggacgattctgaagctgtattctgagatggaaaaaactagaaatacatcgtggatgatgagagccaggtgtattgagctcctgcttttctaacgtacaaaggtaactggatagagaaacggagtgatcgccctcacctggccagggtgtgctccgagaccccagcaggtgccgaagccgcggatagtcccgaatcctgtccaggcgctgttttttcctgtacgtacctgtgatcaagtctgagatgtgacagcaaaactgacagaacttcgtgcttccctcttcaaaatgtcacagatgggcactgtgttcttaccggagatcttagcaacctcggcatctggctgtttttcttataggtcaggagtttccaccttttcccttaaaggaagcgcttggcagcttctctggtgtgtctgagtcgccagcatcaccactgtcctgttctggggccattcttaagtaaaataaaagcttcttggacccaagcaccacatcaccgcgatggctggtctgatcaccgagatggctgctgagtgcctggcaggcagggtggcgtggatggcccgaaacgctggacggagggagggttgatgtcccagcaggacggctgctcagaacagcacagaatcaaaaactcatgaatggtttatttctggaattttccacttagtatttttggactgtggctgaccatgggtaactgaaaccgtgtgtaagggggactgttgtgaggggctgtgcacaaatgcttcccagctcttgagggcctggacgcagtgacccgtgcactcagggtcttggccctgataccattctgtaaccaaaaggaaccagggccaggccagagaaggtatcagatgagctagagagtgaagaattgctgggatgaggagacttgttgaaataacacggggggatgggaaggagcatacggtggccagcctggggcagtgtgagcgtgaaaataaacaggctgggcgcagcggctcacgcctgcaatcccagcactttaggaggccaaggtgggaggatcacttgaggctaggagttcaagaccagcctgggcaacatgggtgaaaccctgtctctacaaaacaagaaaagtcagccgtgcgtggtgtcacccgcctgtagtcccagatactcaggaagctgaggcaggaggatcacttgagccagaggttaagtctgcagtgagctgtgattgtaccactgctctccagcctgagcaacagagccggaccctgtctcaccaaaggaaaa

SEQ ID NO: 433143 - DNA, 726 bp, Homo sapiens
ggcgctcgcagactccggagtcgccaacatgtcgaccgccatgaatttcgggaccaagagcttccagccgcggcccccggacaagggcagcttcccgctggatcacttaggtgaatgtaaaagctttaaagagaaattcatgaagtgtcttcataacaataattttgaaaatgctttgtgcagaaaggaatcaaaagaatatttagaatgcaggatggagagaaaattgatgctacaagaaccattggagaaactgggatttggagacttgactagtggaaaatcagaggcaaaaaaatgaattttgatgagaagacccctgggccgtgttcagtggtctctcaggacggagggcatcatcctgcctcttaggttggctgaggcctgcgtgtggtgtccttagaaatgggcttcgaatagaagctccagccctgtgggggcgtctcctgggtagggagtggcgtcccgttttcccttaggagggtgtttctgcattgaacccctgagtgggacggcgttcccggcaaagctgggagggaggcgagcgtggggcaagacccttgtcttcgaggccggggccctcttgtatggggcggttttatgttgcagtcctctgatactttctgagttcaaagaggtaaatgtataaatttcagtcccttctgaacacagatatcatcagaaaattaccattccctagcaggaaattattcagaaaaaaaaaaa

SEQ ID NO: 433144 - DNA, 2075 bp, Homo sapiens
cgggagcaggtggaggactggcggcggtcgagatcgtgctgccatggctcagcctctgggtccagagcctcagctcctacctcttccctccttgccagcccctgatgcctgccagacttttgcctctgctggagcccctgcctgaccagcttcccctccctgtctggttgggatttgggggctgagctgtctggggtcccagggccaaccaatgcagtgccggctcccgcggggcctggctggagccctcctcaccctcctgtgcatggggctcctgtgtctgcggtaccacttgaacctgtccccgcagcgggtacaagggacccccgagctgagccagccgaacccggggccccctaagctacagctacacgatgtcttcattgcagtgaagacgacccgggctttccaccgcttgcgcctggagctgctgcttgacacgtgggtttccaggaccagggaacagacatttgtcttcaccgacagcccagacaaaggcctccaggagagactggggtcccaccttgtggtcaccaactgctccgcggaacacagccacccagctctgtcctgcaagatggctgctgagttcgacaccttcttggccagtgggcttaggtggttctgccatgtggacgatgacaactatgtgaacccaagggcgctgctgcagcttctgagagccttcccgctggcccgcgacgtctatgtgggaaggcccagcctgaaccggcccatccatgcctcagagccacagccccacaaccgcacgaggctggtacagttctggtttgccactgggggtgctggcttctgcatcaatcgcaaactggctttgaagatggctccgtgggccagtggctcccgtttcatggacacatctgctctcatccggctgcctgatgactgcaccatgggctatatcattgagtgcaagctgggcggccgcctgcagcccagccccctctttcactcccacctggagaccctgcagctgctgaggactgcacagctcccagaacaggtcaccctcagctacggtgtctttgaggggaaactcaacgtcattaagctacagggccccttctccccggaggaggacccctccagatttcgctccctccattgtctgctctatccagatacaccctggtgtccccagctgggtgcccgatgaatcctgaactgctgggcaaaggttgggcagagacttctgggtgtgccttggctcccaaggtggcactgtgggtccctggcaagtgtcttgtgataggcagtccctggcagggccttcgggtggttggcaagcccaggatctgagtggcaattggcactgaaggcaccccaggcccctgggaggtgagttagacagcccaggggaccaggtggaccaggtggtggccagagaggctccaggggctagactccctcaggaggctgaattgaaaaagggcagggggcacttgagctgggctggggctcaggggtcctaaccctttaggcagtgacatggcctctgggtggggtctggccgttggccctggctaatgtctctcagtcattcccctggggctcaagcgctgggccgcccactcctgcctccctcatctgtgtcccgagttcctgaagggacatgggtggaatgatggcagaatccagggtctgcagcacctgctgttgttgccaaccagtctcccaaagctccttgctccccaccccttgcgaacaggaccagattttgtttggagcctcagcatgccggggcccagatgatggagcataacgggtcccagccaattgtgatgatcctttttgctcatttcccagcctttcttgctgttaggggctaccatgggaccagctctggccagagggaactaagcaaatccaatagagatgtttctggggaaggttttgcagcccactccccatcttcctgctataaatgtgggtgtgatggctggatctggggcagccaccttgctaccatgaaggaaaggccaagacaatcatccacagctattccctccagcatctggttctgtacaaaaattaaatgcttatttgtttaagtc

SEQ ID NO: 433145 - DNA, 2026 bp, Homo sapiens
cgggagcaggtggaggactggcggcggtcgagatcgtgctgccatggctcagcctctgggtccagagcctcagctcctacctcttccctccttgccagcccctgatgcctgccagacttttgcctctgctggagcccctgcctgaccagcttcccctccctgtctggttgggatttgggggctgagctgtctggggtcccagggccaaccaatgcagtgccggctcccgcggggcctggctggagccctcctcaccctcctgtgcatggggctcctgtgtctgcggtaccacttgaacctgtccccgcagcgggtacaagggacccccgagctgagccagccgaacccggggccccctaagctacagctacacgatgtcttcattgcagtgaagacgacccgggctttccaccgcttgcgcctggagctgctgcttgacacgtgggtttccaggaccagggaacagggtcccaccttgtggtcaccaactgctccgcggaacacagccacccagctctgtcctgcaagatggctgctgagttcgacaccttcttggccagtgggcttaggtggttctgccatgtggacgatgacaactatgtgaacccaagggcgctgctgcagcttctgagagccttcccgctggcccgcgacgtctatgtgggaaggcccagcctgaaccggcccatccatgcctcagagccacagccccacaaccgcacgaggctggtacagttctggtttgccactgggggtgctggcttctgcatcaatcgcaaactggctttgaagatggctccgtgggccagtggctcccgtttcatggacacatctgctctcatccggctgcctgatgactgcaccatgggctatatcattgagtgcaagctgggcggccgcctgcagcccagccccctctttcactcccacctggagaccctgcagctgctgaggactgcacagctcccagaacaggtcaccctcagctacggtgtctttgaggggaaactcaacgtcattaagctacagggccccttctccccggaggaggacccctccagatttcgctccctccattgtctgctctatccagatacaccctggtgtccccagctgggtgcccgatgaatcctgaactgctgggcaaaggttgggcagagacttctgggtgtgccttggctcccaaggtggcactgtgggtccctggcaagtgtcttgtgataggcagtccctggcagggccttcgggtggttggcaagcccaggatctgagtggcaattggcactgaaggcaccccaggcccctgggaggtgagttagacagcccaggggaccaggtggaccaggtggtggccagagaggctccaggggctagactccctcaggaggctgaattgaaaaagggcagggggcacttgagctgggctggggctcaggggtcctaaccctttaggcagtgacatggcctctgggtggggtctggccgttggccctggctaatgtctctcagtcattcccctggggctcaagcgctgggccgcccactcctgcctccctcatctgtgtcccgagttcctgaagggacatgggtggaatgatggcagaatccagggtctgcagcacctgctgttgttgccaaccagtctcccaaagctccttgctccccaccccttgcgaacaggaccagattttgtttggagcctcagcatgccggggcccagatgatggagcataacgggtcccagccaattgtgatgatcctttttgctcatttcccagcctttcttgctgttaggggctaccatgggaccagctctggccagagggaactaagcaaatccaatagagatgtttctggggaaggttttgcagcccactccccatcttcctgctataaatgtgggtgtgatggctggatctggggcagccaccttgctaccatgaaggaaaggccaagacaatcatccacagctattccctccagcatctggttctgtacaaaaattaaatgcttatttgtttaagtc

SEQ ID NO: 433146 - DNA, 1989 bp, Homo sapiens
cgggagcaggtggaggactggcggcggtcgagatcgtgctgccatggctcagcctctgggtccagagcctcagctcctacctcttccctccttgccagcccctgatgcctgccagacttttgcctctgctggagcccctgcctgaccagcttcccctccctgtctggttgggatttgggggctgagctgtctggggtcccagggccaaccaatgcagtgccggctcccgcggggcctggctggagccctcctcaccctcctgtgcatggggctcctgtgtctgcggtaccacttgaacctgtccccgcagcgggtacaagggacccccgagctgagccagccgaacccggggccccctaagctacagctacacgatgtcttcattgcagtgaagacgacccgggctttccaccgcttgcgcctggagctgctgcttgacacgtgggtttccaggaccagggaacagacatttgtcttcaccgacagcccagacaaaggcctccaggagagactggggtcccaccttgtggtcaccaactgctccgcggaacacagccacccagctctgtcctgcaagatggctgctgagttcgacaccttcttggccagtgggcttaggtggttctgccatgtggacgatgacaactatgtgaacccaagggcgctgctgcagcttctgagagccttcccgctggcccgcgacgtctatgtgggaaggcccagcctgaaccggcccatccatgcctcagagccacagccccacaaccgcacgaggctggtacagttctggtttgccactgggggtgctggcttctgcatcaatcgcaaactggctttgaagatggctccgtgggccagtggctcccgtttcatggacacatctgctctcatccggctgcctgatgactgcaccatgggctatatcattgagtgcaagctgggcggccgcctgcagcccagccccctctttcactcccacctggagaccctgcagctgctgaggactgcacagctcccagaacagatttcgctccctccattgtctgctctatccagatacaccctggtgtccccagctgggtgcccgatgaatcctgaactgctgggcaaaggttgggcagagacttctgggtgtgccttggctcccaaggtggcactgtgggtccctggcaagtgtcttgtgataggcagtccctggcagggccttcgggtggttggcaagcccaggatctgagtggcaattggcactgaaggcaccccaggcccctgggaggtgagttagacagcccaggggaccaggtggaccaggtggtggccagagaggctccaggggctagactccctcaggaggctgaattgaaaaagggcagggggcacttgagctgggctggggctcaggggtcctaaccctttaggcagtgacatggcctctgggtggggtctggccgttggccctggctaatgtctctcagtcattcccctggggctcaagcgctgggccgcccactcctgcctccctcatctgtgtcccgagttcctgaagggacatgggtggaatgatggcagaatccagggtctgcagcacctgctgttgttgccaaccagtctcccaaagctccttgctccccaccccttgcgaacaggaccagattttgtttggagcctcagcatgccggggcccagatgatggagcataacgggtcccagccaattgtgatgatcctttttgctcatttcccagcctttcttgctgttaggggctaccatgggaccagctctggccagagggaactaagcaaatccaatagagatgtttctggggaaggttttgcagcccactccccatcttcctgctataaatgtgggtgtgatggctggatctggggcagccaccttgctaccatgaaggaaaggccaagacaatcatccacagctattccctccagcatctggttctgtacaaaaattaaatgcttatttgtttaagtc

SEQ ID NO: 433147 - DNA, 1919 bp, Homo sapiens
tgtgtgatagaagagggtgagatgctgcccaggtgtgtggctgtggttgggtccctgtggtgctgctctggaaagggggtgagtgtatgtgtttagactgtgggctgtgtacaccctgaagttgtgtgtctacaaaagctgggttgtgtgtgttgtatgttgtcctaaaggagcgtgtgaccatgagaggggtgtgtctgtcactggaggagtacagagtccatctggggcctggtggtggtgggctgtggattggtctggggtgtcccttgggccgatgtgagtcctgaccccttcttctccttcctagacatttgtcttcaccgacagcccagacaaaggcctccaggagagactggggtcccaccttgtggtcaccaactgctccgcggaacacagccacccagctctgtcctgcaagatggctgctgagttcgacaccttcttggccagtgggcttaggtggttctgccatgtggacgatgacaactatgtgaacccaagggcgctgctgcagcttctgagagccttcccgctggcccgcgacgtctatgtgggaaggcccagcctgaaccggcccatccatgcctcagagccacagccccacaaccgcacgaggctggtacagttctggtttgccactgggggtgctggcttctgcatcaatcgcaaactggctttgaagatggctccgtgggccagtggctcccgtttcatggacacatctgctctcatccggctgcctgatgactgcaccatgggctatatcattgagtgcaagctgggcggccgcctgcagcccagccccctctttcactcccacctggagaccctgcagctgctgaggactgcacagctcccagaacaggtcaccctcagctacggtgtctttgaggggaaactcaacgtcattaagctacagggccccttctccccggaggaggacccctccagatttcgctccctccattgtctgctctatccagatacaccctggtgtccccagctgggtgcccgatgaatcctgaactgctgggcaaaggttgggcagagacttctgggtgtgccttggctcccaaggtggcactgtgggtccctggcaagtgtcttgtgataggcagtccctggcagggccttcgggtggttggcaagcccaggatctgagtggcaattggcactgaaggcaccccaggcccctgggaggtgagttagacagcccaggggaccaggtggaccaggtggtggccagagaggctccaggggctagactccctcaggaggctgaattgaaaaagggcagggggcacttgagctgggctggggctcaggggtcctaaccctttaggcagtgacatggcctctgggtggggtctggccgttggccctggctaatgtctctcagtcattcccctggggctcaagcgctgggccgcccactcctgcctccctcatctgtgtcccgagttcctgaagggacatgggtggaatgatggcagaatccagggtctgcagcacctgctgttgttgccaaccagtctcccaaagctccttgctccccaccccttgcgaacaggaccagattttgtttggagcctcagcatgccggggcccagatgatggagcataacgggtcccagccaattgtgatgatcctttttgctcatttcccagcctttcttgctgttaggggctaccatgggaccagctctggccagagggaactaagcaaatccaatagagatgtttctggggaaggttttgcagcccactccccatcttcctgctataaatgtgggtgtgatggctggatctggggcagccaccttgctaccatgaaggaaaggccaagacaatcatccacagctattccctccagcatctggttctgtacaaaaattaaatgcttatttgtttaagtc

SEQ ID NO: 433148 - DNA, 1904 bp, Homo sapiens
cgggagcaggtggaggactggcggcggtcgagatcgtgctgccatggctcagcctctgggtccagagcctcagctcctacctcttccctccttgccagcccctgatgcctgccagacttttgcctctgctggagcccctgcctgaccagcttcctcaccctcctgtgcatggggctcctgtgtctgcggtaccacttgaacctgtccccgcagcgggtacaagggacccccgagctgagccagccgaacccggggccccctaagctacagctacacgatgtcttcattgcagtgaagacgacccgggctttccaccgcttgcgcctggagctgctgcttgacacggtcccaccttgtggtcaccaactgctccgcggaacacagccacccagctctgtcctgcaagatggctgctgagttcgacaccttcttggccagtgggcttaggtggttctgccatgtggacgatgacaactatgtgaacccaagggcgctgctgcagcttctgagagccttcccgctggcccgcgacgtctatgtgggaaggcccagcctgaaccggcccatccatgcctcagagccacagccccacaaccgcacgaggctggtacagttctggtttgccactgggggtgctggcttctgcatcaatcgcaaactggctttgaagatggctccgtgggccagtggctcccgtttcatggacacatctgctctcatccggctgcctgatgactgcaccatgggctatatcattgagtgcaagctgggcggccgcctgcagcccagccccctctttcactcccacctggagaccctgcagctgctgaggactgcacagctcccagaacaggtcaccctcagctacggtgtctttgaggggaaactcaacgtcattaagctacagggccccttctccccggaggaggacccctccagatttcgctccctccattgtctgctctatccagatacaccctggtgtccccagctgggtgcccgatgaatcctgaactgctgggcaaaggttgggcagagacttctgggtgtgccttggctcccaaggtggcactgtgggtccctggcaagtgtcttgtgataggcagtccctggcagggccttcgggtggttggcaagcccaggatctgagtggcaattggcactgaaggcaccccaggcccctgggaggtgagttagacagcccaggggaccaggtggaccaggtggtggccagagaggctccaggggctagactccctcaggaggctgaattgaaaaagggcagggggcacttgagctgggctggggctcaggggtcctaaccctttaggcagtgacatggcctctgggtggggtctggccgttggccctggctaatgtctctcagtcattcccctggggctcaagcgctgggccgcccactcctgcctccctcatctgtgtcccgagttcctgaagggacatgggtggaatgatggcagaatccagggtctgcagcacctgctgttgttgccaaccagtctcccaaagctccttgctccccaccccttgcgaacaggaccagattttgtttggagcctcagcatgccggggcccagatgatggagcataacgggtcccagccaattgtgatgatcctttttgctcatttcccagcctttcttgctgttaggggctaccatgggaccagctctggccagagggaactaagcaaatccaatagagatgtttctggggaaggttttgcagcccactccccatcttcctgctataaatgtgggtgtgatggctggatctggggcagccaccttgctaccatgaaggaaaggccaagacaatcatccacagctattccctccagcatctggttctgtacaaaaattaaatgcttatttgtttaagtc

SEQ ID NO: 433149 - DNA, 1791 bp, Homo sapiens
cgggagcaggtggaggactggcggcggtcgagatcgtgctgccatggctcagcctctgggtccagagcctcagctcctacctcttccctccttgccagcccctgatgcctgccagacttttgcctctgctggagcccctgcctgaccagcttcccctccctgtctggttgggatttgggggctgagctgtctggggtcccagggccaaccaatgcagtgccggctcccgcggggcctggctggagccctccaactgctccgcggaacacagccacccagctctgtcctgcaagatggctgctgagttcgacaccttcttggccagtgggcttaggtggttctgccatgtggacgatgacaactatgtgaacccaagggcgctgctgcagcttctgagagccttcccgctggcccgcgacgtctatgtgggaaggcccagcctgaaccggcccatccatgcctcagagccacagccccacaaccgcacgaggctggtacagttctggtttgccactgggggtgctggcttctgcatcaatcgcaaactggctttgaagatggctccgtgggccagtggctcccgtttcatggacacatctgctctcatccggctgcctgatgactgcaccatgggctatatcattgagtgcaagctgggcggccgcctgcagcccagccccctctttcactcccacctggagaccctgcagctgctgaggactgcacagctcccagaacaggtcaccctcagctacggtgtctttgaggggaaactcaacgtcattaagctacagggccccttctccccggaggaggacccctccagatttcgctccctccattgtctgctctatccagatacaccctggtgtccccagctgggtgcccgatgaatcctgaactgctgggcaaaggttgggcagagacttctgggtgtgccttggctcccaaggtggcactgtgggtccctggcaagtgtcttgtgataggcagtccctggcagggccttcgggtggttggcaagcccaggatctgagtggcaattggcactgaaggcaccccaggcccctgggaggtgagttagacagcccaggggaccaggtggaccaggtggtggccagagaggctccaggggctagactccctcaggaggctgaattgaaaaagggcagggggcacttgagctgggctggggctcaggggtcctaaccctttaggcagtgacatggcctctgggtggggtctggccgttggccctggctaatgtctctcagtcattcccctggggctcaagcgctgggccgcccactcctgcctccctcatctgtgtcccgagttcctgaagggacatgggtggaatgatggcagaatccagggtctgcagcacctgctgttgttgccaaccagtctcccaaagctccttgctccccaccccttgcgaacaggaccagattttgtttggagcctcagcatgccggggcccagatgatggagcataacgggtcccagccaattgtgatgatcctttttgctcatttcccagcctttcttgctgttaggggctaccatgggaccagctctggccagagggaactaagcaaatccaatagagatgtttctggggaaggttttgcagcccactccccatcttcctgctataaatgtgggtgtgatggctggatctggggcagccaccttgctaccatgaaggaaaggccaagacaatcatccacagctattccctccagcatctggttctgtacaaaaattaaatgcttatttgtttaagtc

SEQ ID NO: 433150 - DNA, 1446 bp, Homo sapiens
cgggagcaggtggaggactggcggcggtcgagatcgtgctgccatggctcagcctctgggtccagagcctcagctcctacctcttccctccttgccagcccctgatgcctgccagacttttgcctctgctggagcccctgcctgaccagcttcccctccctgtctggttgggatttgggggctgagctgtctggggtcccagggccaaccaatgcagtgccggctcccgcggggcctggctggagccctcctcaccctcctgtgcatggggctcctgtgtctgcggtaccacttgaacctgtccccgcagcgggtacaagggacccccgagctgagccagccgaacccggggccccctaagctacagctacacgatgtcttcattgcagtgaagacgacccgggctttccaccgcttgcgcctggagctgctgcttgacacgtgggtttccaggaccagggaacagacatttgtcttcaccgacagcccagacaaaggcctccaggagagactggggtcccaccttgtggtcaccaactgctccgcggaacacagccacccagctctgtcctgcaagatggctgctgagttcgacaccttcttggccagtgggcttaggtggttctgccatgtggacgatgacaactatgtgaacccaagggcgctgctgcagcttctgagagccttcccgctggcccgcgacgtctatgtgggaaggcccagcctgaaccggcccatccatgcctcagagccacagccccacaaccgcacgaggctggtacagttctggtttgccactgggggtgctggcttctgcatcaatcgcaaactggctttgaagatggctccgtgggccagtggctcccgtttcatggacacatctgctctcatccggctgcctgatgactgcaccatgggctatatcattgagtgcaagctgggcggccgcctgcagcccagccccctctttcactcccacctggagaccctgcagctgctgaggactgcacagctcccagaacaggtcaccctcagctacggtgtctttgaggggaaactcaacgtcattaagctacagggccccttctccccggaggaggacccctccagatttcgctccctccattgtctgctctatccagatacaccctggtgtccccagctgggtgcccgatgaatcctgaactgctgggcaaagcctttcttgctgttaggggctaccatgggaccagctctggccagagggaactaagcaaatccaatagagatgtttctggggaaggttttgcagcccactccccatcttcctgctataaatgtgggtgtgatggctggatctggggcagccaccttgctaccatgaaggaaaggccaagacaatcatccacagctattccctccagcatctggttctgtacaaaaattaaatgcttatttgtttaagtc

SEQ ID NO: 433151 - DNA, 1358 bp, Homo sapiens
cgggagcaggtggaggactggcggcggtcgagatcgtgctgccatggctcagcctctgggtccagagcctcagctcctacctcttccctccttgccagcccctgatgcctgccagacttttgcctctgctggagcccctgcctgaccagcttcccctccctgtctggttgggatttgggggctgagctgtctggggtcccagggccaaccaatgcagtgccggctcccgcggggcctggctggagccctcctcaccctcctgtgcatggggctcctgtgtctgcggtaccacttgaacctgtccccgcagcgggtacaagggacccccgagctgagccagccgaacccggggccccctaagctacagctacacgatgtcttcattgcagtgaagacgacccgggctttccaccgcttgcgcctggagctgctgcttgacacgtgggtttccaggaccagggaacagacatttgtcttcaccgacagcccagacaaaggcctccaggagagactggggtcccaccttgtggtcaccaactgctccgcggaacacagccacccagctctgtcctgcaagatggctgctgagttcgacaccttcttggccagtgggcttaggtggttctgccatgtggacgatgacaactatgtgaacccaagggcgctgctgcagcttctgagagccttcccgctggcccgcgacgtctatgtgggaaggcccagcctgaaccggcccatccatgcctcagagccacagccccacaaccgcacgaggctggtacagttctggtttgccactgggggtgctggcttctgcatcaatcgcaaactggctttgaagatggctccgtgggccagtggctcccgtttcatggacacatctgctctcatccggctgcctgatgactgcaccatgggctatatcattgagtgcaagctgggcggccgcctgcagcccagccccctctttcactcccacctggagaccctgcagctgctgaggactgcacagctcccagaacaggtcaccctcagctacggtgtctttgaggggaaactcaacgtcattaagctacagggccccttctccccggaggaggacccctccagcctttcttgctgttaggggctaccatgggaccagctctggccagagggaactaagcaaatccaatagagatgtttctggggaaggttttgcagcccactccccatcttcctgctataaatgtgggtgtgatggctggatctggggcagccaccttgctaccatgaaggaaaggccaagacaatcatccacagctattccctccagcatctggttctgtacaaaaattaaatgcttatttgtttaagtc

SEQ ID NO: 433152 - DNA, 1570 bp, Homo sapiens
cgggagcaggtggaggactggcggcggtcgagatcgtgctgccatggctcagcctctgggtccagagcctcagctcctacctcttccctccttgccagcccctgatgcctgccagacttttgcctctgctggagcccctgcctgaccagcttcccctccctgtctggttgggatttgggggctgagctgtctggggtcccagggccaaccaatgcagtgccggctcccgcggggcctggctggagccctcctcaccctcctgtgcatggggctcctgtgtctgcggtaccacttgaacctgtccccgcagcgggtacaagggacccccgagctgagccagccgaacccggggccccctaagctacagctacacgatgtcttcattgcagtgaagacgacccgggctttccaccgcttgcgcctggagctgctgcttgacacgtgggtttccaggaccagggaacagacatttgtcttcaccgacagcccagacaaaggcctccaggagagactggggtcccaccttgtggtcaccaactgctccgcggaacacagccacccagctctgtcctgcaagatggctgctgagttcgacaccttcttggccagtgggcttaggtggttctgccatgtggacgatgacaactatgtgaacccaagggcgctgctgcagcttctgagagccttcccgctggcccgcgacgtctatgtgggaaggcccagcctgaaccggcccatccatgcctcagagccacagccccacaaccgcacgaggctggtacagttctggtttgccactgggggtgctggcttctgcatcaatcgcaaactggctttgaagatggctccgtgggccagtggctcccgtttcatggacacatctgctctcatccggctgcctgatgactgcaccatgggctatatcattgagtgcaagctgggcggccgcctgcagcccagccccctctttcactcccacctggagaccctgcagctgctgaggactgcacagctcccagaacaggtgagctggccttgggggcaggtggcaaatgggaaggggaaccaaaggaacatggggtccccccaaccctccctcctggcgtttgaaagaaacctggaactccagattatgggtcttgggtattccctattgatggggaaactgaggcctagggtggcaaaggacaccctaagggtacacagggactcaaccccttcacctctaaccctcaaggattagcatttgtgaagctgaaattctttgatctggtcctcaaatgccgggaaggacctgaacaaatgagatgaggttgtcttcaggttcccaccaccctgctctccacccatacctctactcagtcttccatcctccccacattcctcccggggagcccagctggctcttctaattttacctgttaggagccccttccttcatcaaaactcccctagcatatgcccatgtcatccggggccagtatggctctgctcagatagagaacatcgagccgttctctgccaaagacctgtccagtcgctcactgggggtccgaatccgggataaaag

SEQ ID NO: 433153 - DNA, 609 bp, Homo sapiens
caacactcttctatctccctgcccaggtcaccctcagctacggtgtctttgaggggaaactcaacgtcattaagctacagggccccttctccccggaggaggacccctccagatttcgctccctccattgtctgctctatccagatacaccctggtgtccccagctgggtgcccgatgaatcctgaactgctgggcaaaggttgggcagagacttctgggtgtgccttggctcccaaggtggcactgtgggtccctggcaagtgtcttgtgataggcagtccctggcagggccttcgggtggttggcaagcccaggatctgagtggcaattggcactgaaggcaccccaggcccctgggagcctttcttgctgttaggggctaccatgggaccagctctggccagagggaactaagcaaatccaatagagatgtttctggggaaggttttgcagcccactccccatcttcctgctataaatgtgggtgtgatggctggatctggggcagccaccttgctaccatgaaggaaaggccaagacaatcatccacagctattccctccagcatctggttctgtacaaaaattaaatgcttatttgtttaagtc

SEQ ID NO: 433154 - DNA, 429 bp, Homo sapiens
tgctccctgctctgtctcccgccagaataggggctgctgttgggggcaggaagcgtttctttctcatctctgtatcctcagccctagcatggtatctggcaccagcaatgaataaatgagtgaatgaatgaatgacaagacagagagagaaggaaaggctacatttataaagggcatcaccttcccattccctgtttaatcctcacgacagctccacgaagacacggccattagcatccccatttcacagaacaggagactgaggctgaggctccccaaggttcctgacttgctcaaggtcatacagtatgcaggaggcaggtgctctgttctgccagcttgtcccagtggagggccttcatggggtggcccacggctctgggtgtggagggcctgggccagcgtctgcagtctggctctgtccctcag

SEQ ID NO: 433155 - DNA, 4005 bp, Homo sapiens
agcggagcttctgtaagagacggagaggcgcagagtgagggcgggtccgcgcgtcctcagagcccgctggaggctcggagctgctacccgcagacttctcccgcacagggctcgcaaagagcgtgattccgagagcctgagactgacgcccgacctggaaaccagagaagacttccttagcctttcggatcgcacttgaggctggaggcatgagtcctgtgaggcgttggggcagcccctgccttttccccttgcagctcttcagcctctgctgggtgctctcagtggcccagagcaaaacagtccgatacagcaccttcgaggaggatgcccccggcacggtcatcgggaccctggccgaggacctgcatatgaaagtatcgggtgacacaagcttccgcctgatgaagcaattcaacagctctctgctccgggtgcgcgaaggcgacgggcagctgaccgtcggggacgccggcctggaccgcgagcggctgtgtggccaggccccgcagtgcgtgctggccttcgatgtggtcagcttctcgcaggagcagttccggctggtgcacgtggaggtagaggtgagggacgtcaacgaccacgcgccgcgcttccccagggcccagatcccggtagaggtgtccgagggtgcggcagtgggcacgcgcatccccttggaggtgccggtggacgaggacgtgggcgccaacgggctgcagaccgtgcgcctggccgagccgcacagcccctttcgcgtggagctgcagacgcgagcggacggcgctcagtgcgcagacctggtgctgctgcaggagctggaccgcgagagccaggccgcctacagcctggagctggtggcccaggacggcggccgcccgccgcgctccgccacggctgccctcagcgtgcgcgtcctggatgcgaatgaccacagcccggccttcccgcagggcgccgtggccgaagtggagctggcggaagacgcgcccgtgggctccctgcttctcgacctggacgcagccgaccccgacgagggacctaacggcgacgtggtgttcgcatttggcgcccgcaccccgccggaggcgcgccgcctctttcggcttgacccgcgatcaggccgcctcaccctggccgggcccgtggactacgagcgtcaggacacctacgagctggacgtgcgggcgcaggaccgcggacccgggccccgcgctgccacctgcaaggtcatcgtgcgcatccgagacgtcaatgacaacgcacccgacatcgccatcaccccgctggccgccccaggcgcgccggcaacctcacccttcgccgctgccgccgccgccgctgcactcgggggagcggacgctagctcgccggcgggagccgggacgccggaggctggtgccacttcgctggtgccggagggggcggcgcgcgagagcctggtggccctggtcagcacctcggacagggactcgggcgccaacgggcaagtgcgctgcgccctctatgggcacgagcacttccggctgcagccggcctacgcgggcagctacctggtggtgaccgcggcgtcgctggaccgcgaacgcatcgccgagtacaacttgacgctggtggccgaggatcgcggcgcgcccccgctgcgcacagtgcggccctacacggtgcgtgtgggcgacgagaacgacaacgcgccgctcttcacgcggccggtctatgaggtgtcggtgcgcgagaacaacccgccaggcgcctacctggccacggtggccgcccgcgaccgggacctgggccgcaacggccaggtcacctaccggctgctggaggccgaggtgggccgcgccgggggcgccgtgtccacttatgtctcggtggacccagctaccggagccatctacgcgctgcgcagcttcgactatgagacgctgcgccaactcgacgttcgcatccaagctagcgacggcggctcccctcagctttccagcagcgccctagtgcaagtgcgcgtgctggaccagaacgaccatgcgccagtcctggtgcacccggcgccagccaatggctccctagaagtggcggtgcctgggcgcaccgcaaaggacacggttgtggcccgtgtgcaggcccgggatgcagacgagggagccaacggggagctggcgttcgagctgcagcagcaggagccgcgcgaagccttcgccatcggccgccgcacgggggagatactgctcaccggcgacctctcgcaggagccacccggtcgcgtgttcagggcgctcctggtcatatccgacggcggccgtcccccgctcaccaccaccgcaactgtcagcttcgtggtaacagcagggggcgggcgtgggccggctgcgcctgccagtgcaggaagcccggagcgttcccgcccgcctggctctcggctcggggtgtccgggtcggtgctgcaatgggacacgccgctgatcgtcatcatcgtgctggccgggagctgcacgctgctgctggccgccatcatcgccatcgccaccacctgcaaccgccgcaagaaggaggtgcgcaaagggggggccctccgggaagagcggcccggggcggcgggcggcggagcctcggctcccggctccccggaggaggccgcccggggagccgggcccaggcccaacatgttcgacgtgctcaccttccctggcaccggcaaagcgccctttggcagccccgcggcggacgcgcctccgcctgcggtcgccgcggccgaagtgccgggctcagagggcggcagcgccactggggaaagcgcctgtcacttcgaggggcagcagcggctccgcggcgcgcacgccgagccctacggtgcctccccgggttttggaaaggagccggcgccccctgtggcggtgtggaaaggacactccttcaacaccatttctggcagagaagcagagaagttcagcggcaaagacagcggtaaaggggacagtgatttcaacgacagcgattccgacatcagcggggacgctctgaaaaaggatctcatcaaccacatgcagagtggactgtgggcgtgcaccgctgagtgtaagatcctgggccactctgaccgctgctggagcccatcctgcagcgggcccaacgcacatccatcgcctcacccaccagcccagatgtcaaccttctgtaagagcacgtcactgcctcgggatcctctgcgcagggacaattactaccaggcccagctgcccaagacagtggggctgcagagcgtctatgagaaagtactgcacagagactatgacaggacagtcactctgctctcccctccccgtccagggaggctcccagacctgcaggagattggagtacccctctaccagtcccctcctggcaggtacctgtccccgaagaagggagccaatgaaaatgtgtaatcccatgctgcatgtcttcacacatatacaggtcactccgagaagcccctaagttattgaccggtttcagtgttgtatatataaatatgcaagatgtgccttacaatgaagttgttggaagctatttccaatcacattggtactgtttggtatttgcaaacaaaaatgtagttaatgtaatttttatgaaatgtgtgcagtatttaatttttcttatgctattgactttgatttcaattgcggcttgccattttcttagtgtttttaacctgtacattgtgtaatgtaatgtttgtatataatgaaattttgttatatttttatataataaaagctaaagtggaagttattgccaaaggaactgtctgtaagacaaaaaacaaaacatgttggaattacttaattgaaatttatctttcacctgaaacaacctagtgtttgagaaattttgccttgccaagtataacttgtatatcttgactctgtggtagatttcaagttcaatgttatttaattacatttggttttccgtaaaccgtgtcacttataagcacagtaataaaagatttgtcatgtgtttgaa

SEQ ID NO: 433156 - DNA, 3714 bp, Homo sapiens
agcggagcttctgtaagagacggagaggcgcagagtgagggcgggtccgcgcgtcctcagagcccgctggaggctcggagctgctacccgcagacttctcccgcacagggctcgcaaagagcgtgattccgagagcctgagactgacgcccgacctggaaaccagagaagacttccttagcctttcggatcgcacttgaggctggaggcatgagtcctgtgaggcgttggggcagcccctgccttttccccttgcagctcttcagcctctgctgggtgctctcagtggcccagagcaaaacagtccgatacagcaccttcgaggaggatgcccccggcacggtcatcgggaccctggccgaggacctgcatatgaaagtatcgggtgacacaagcttccgcctgatgaagcaattcaacagctctctgctccgggtgcgcgaaggcgacgggcagctgaccgtcggggacgccggcctggaccgcgagcggctgtgtggccaggccccgcagtgcgtgctggccttcgatgtggtcagcttctcgcaggagcagttccggctggtgcacgtggaggtagaggtgagggacgtcaacgaccacgcgccgcgcttccccagggcccagatcccggtagaggtgtccgagggtgcggcagtgggcacgcgcatccccttggaggtgccggtggacgaggacgtgggcgccaacgggctgcagaccgtgcgcctggccgagccgcacagcccctttcgcgtggagctgcagacgcgagcggacggcgctcagtgcgcagacctggtgctgctgcaggagctggaccgcgagagccaggccgcctacagcctggagctggtggcccaggacggcggccgcccgccgcgctccgccacggctgccctcagcgtgcgcgtcctggatgcgaatgaccacagcccggccttcccgcagggcgccgtggccgaagtggagctggcggaagacgcgcccgtgggctccctgcttctcgacctggacgcagccgaccccgacgagggacctaacggcgacgtggtgttcgcatttggcgcccgcaccccgccggaggcgcgccgcctctttcggcttgacccgcgatcaggccgcctcaccctggccgggcccgtggactacgagcgtcaggacacctacgagctggacgtgcgggcgcaggaccgcggacccgggccccgcgctgccacctgcaaggtcatcgtgcgcatccgagacgtcaatgacaacgcacccgacatcgccatcaccccgctggccgccccaggcgcgccggcaacctcacccttcgccgctgccgccgccgccgctgcactcgggggagcggacgctagctcgccggcgggagccgggacgccggaggctggtgccacttcgctggtgccggagggggcggcgcgcgagagcctggtggccctggtcagcacctcggacagggactcgggcgccaacgggcaagtgcgctgcgccctctatgggcacgagcacttccggctgcagccggcctacgcgggcagctacctggtggtgaccgcggcgtcgctggaccgcgaacgcatcgccgagtacaacttgacgctggtggccgaggatcgcggcgcgcccccgctgcgcacagtgcggccctacacggtgcgtgtgggcgacgagaacgacaacgcgccgctcttcacgcggccggtctatgaggtgtcggtgcgcgagaacaacccgccaggcgcctacctggccacggtggccgcccgcgaccgggacctgggccgcaacggccaggtcacctaccggctgctggaggccgaggtgggccgcgccgggggcgccgtgtccacttatgtctcggtggacccagctaccggagccatctacgcgctgcgcagcttcgactatgagacgctgcgccaactcgacgttcgcatccaagctagcgacggcggctcccctcagctttccagcagcgccctagtgcaagtgcgcgtgctggaccagaacgaccatgcgccagtcctggtgcacccggcgccagccaatggctccctagaagtggcggtgcctgggcgcaccgcaaaggacacggttgtggcccgtgtgcaggcccgggatgcagacgagggagccaacggggagctggcgttcgagctgcagcagcaggagccgcgcgaagccttcgccatcggccgccgcacgggggagatactgctcaccggcgacctctcgcaggagccacccggtcgcgtgttcagggcgctcctggtcatatccgacggcggccgtcccccgctcaccaccaccgcaactgtcagcttcgtggtaacagcagggggcgggcgtgggccggctgcgcctgccagtgcaggaagcccggagcgttcccgcccgcctggctctcggctcggggtgtccgggtcggtgctgcaatgggacacgccgctgatcgtcatcatcgtgctggccgggagctgcacgctgctgctggccgccatcatcgccatcgccaccacctgcaaccgccgcaagaaggagccctacggtgcctccccgggttttggaaaggagccggcgccccctgtggcggtgtggaaaggacactccttcaacaccatttctggcagagaagcagagaagttcagcggcaaagacagcggtaaaggggacagtgatttcaacgacagcgattccgacatcagcggggacgctctgaaaaaggatctcatcaaccacatgcagagtggactgtgggcgtgcaccgctgagtgtaagatcctgggccactctgaccgctgctggagcccatcctgcagcgggcccaacgcacatccatcgcctcacccaccagcccagatgtcaaccttctgtaagagcacgtcactgcctcgggatcctctgcgcagggacaattactaccaggcccagctgcccaagacagtggggctgcagagcgtctatgagaaagtactgcacagagactatgacaggacagtcactctgctctcccctccccgtccagggaggctcccagacctgcaggagattggagtacccctctaccagtcccctcctggcaggtacctgtccccgaagaagggagccaatgaaaatgtgtaatcccatgctgcatgtcttcacacatatacaggtcactccgagaagcccctaagttattgaccggtttcagtgttgtatatataaatatgcaagatgtgccttacaatgaagttgttggaagctatttccaatcacattggtactgtttggtatttgcaaacaaaaatgtagttaatgtaatttttatgaaatgtgtgcagtatttaatttttcttatgctattgactttgatttcaattgcggcttgccattttcttagtgtttttaacctgtacattgtgtaatgtaatgtttgtatataatgaaattttgttatatttttatataataaaagctaaagtggaagttattgccaaaggaactgtctgtaagacaaaaaacaaaacatgttggaattacttaattgaaatttatctttcacctgaaacaacctagtgtttgagaaattttgccttgccaagtataacttgtatatcttgactctgtggtagatttcaagttcaatgttatttaattacatttggttttccgtaaaccgtgtcacttataagcacagtaataaaagatttgtcatgtgtttgaa

SEQ ID NO: 433157 - DNA, 3502 bp, Homo sapiens
agcggagcttctgtaagagacggagaggcgcagagtgagggcgggtccgcgcgtcctcagagcccgctggaggctcggagctgctacccgcagacttctcccgcacagggctcgcaaagagcgtgattccgagagcctgagactgacgcccgacctggaaaccagagaagacttccttagcctttcggatcgcacttgaggctggaggcatgagtcctgtgaggcgttggggcagcccctgccttttccccttgcagctcttcagcctctgctgggtgctctcagtggcccagagcaaaacagtccgatacagcaccttcgaggaggatgcccccggcacggtcatcgggaccctggccgaggacctgcatatgaaagtatcgggtgacacaagcttccgcctgatgaagcaattcaacagctctctgctccgggtgcgcgaaggcgacgggcagctgaccgtcggggacgccggcctggaccgcgagcggctgtgtggccaggccccgcagtgcgtgctggccttcgatgtggtcagcttctcgcaggagcagttccggctggtgcacgtggaggtagaggtgagggacgtcaacgaccacgcgccgcgcttccccagggcccagatcccggtagaggtgtccgagggtgcggcagtgggcacgcgcatccccttggaggtgccggtggacgaggacgtgggcgccaacgggctgcagaccgtgcgcctggccgagccgcacagcccctttcgcgtggagctgcagacgcgagcggacggcgctcagtgcgcagacctggtgctgctgcaggagctggaccgcgagagccaggccgcctacagcctggagctggtggcccaggacggcggccgcccgccgcgctccgccacggctgccctcagcgtgcgcgtcctggatgcgaatgaccacagcccggccttcccgcagggcgccgtggccgaagtggagctggcggaagacgcgcccgtgggctccctgcttctcgacctggacgcagccgaccccgacgagggacctaacggcgacgtggtgttcgcatttggcgcccgcaccccgccggaggcgcgccgcctctttcggcttgacccgcgatcaggccgcctcaccctggccgggcccgtggactacgagcgtcaggacacctacgagctggacgtgcgggcgcaggaccgcggacccgggccccgcgctgccacctgcaaggtcatcgtgcgcatccgagacgtcaatgacaacgcacccgacatcgccatcaccccgctggccgccccaggcgcgccggcaacctcacccttcgccgctgccgccgccgccgctgcactcgggggagcggacgctagctcgccggcgggagccgggacgccggaggctggtgccacttcgctggtgccggagggggcggcgcgcgagagcctggtggccctggtcagcacctcggacagggactcgggcgccaacgggcaagtgcgctgcgccctctatgggcacgagcacttccggctgcagccggcctacgcgggcagctacctggtggtgaccgcggcgtcgctggaccgcgaacgcatcgccgagtacaacttgacgctggtggccgaggatcgcggcgcgcccccgctgcgcacagtgcggccctacacggtgcgtgtgggcgacgagaacgacaacgcgccgctcttcacgcggccggtctatgaggtgtcggtgcgcgagaacaacccgccaggcgcctacctggccacggtggccgcccgcgaccgggacctgggccgcaacggccaggtcacctaccggctgctggaggccgaggtgggccgcgccgggggcgccgtgtccacttatgtctcggtggacccagctaccggagccatctacgcgctgcgcagcttcgactatgagacgctgcgccaactcgacgttcgcatccaagctagcgacggcggctcccctcagctttccagcagcgccctagtgcaagtgcgcgtgctggaccagaacgaccatgcgccagtcctggtgcacccggcgccagccaatggctccctagaagtggcggtgcctgggcgcaccgcaaaggacacggttgtggcccgtgtgcaggcccgggatgcagacgagggagccaacggggagctggcgttcgagctgcagcagcaggagccgcgcgaagccttcgccatcggccgccgcacgggggagatactgctcaccggcgacctctcgcaggagccacccggtcgcgtgttcagggcgctcctggtcatatccgacggcggccgtcccccgctcaccaccaccgcaactgtcagcttcgtggtaacagcagggggcgggcgtgggccggctgcgcctgccagtgcaggaagcccggagcgttcccgcccgcctggctctcggctcggggtgtccgggtcggtgctgcaatgggacacgccgctgatcgtcatcatcgtgctggccgggagctgcacgctgctgctggccgccatcatcgccatcgccaccacctgcaaccgccgcaagaaggagccctacggtgcctccccgggttttggaaaggagccggcgccccctgtggcggtgtggaaaggacactccttcaacaccatttctggcagagaagcagagaagttcagcggcaaagacagcggtaaaggggacagtgatttcaacgacagcgattccgacatcagcggggacgctctgaaaaaggatctcatcaaccacatgcagagtggactgtgggcgtgcaccgctgagtgtaagatcctgggccactctgaccgctgctggagcccatcctgcagcgggcccaacgcacatccatcgcctcacccaccagcccagatgtcaaccttctgtaagagcacgtcactgcctcgggatcctctgcgcagggacaattactaccaggcccagctgcccaagacagtggggctgcagagcgtctatgagaaagtactgcacagagactatgacaggacagtcactctgctctcccctccccgtccagggaggctcccagacctgcaggagattggagtacccctctaccagtcccctcctggcaggtacctgtccccgaagaagggagccaatgaaaatgtgtaatcccatgctgcatgtcttcacacatatacaggtcactccgagaagcccctaagttattgaccggtttcagtgttgtatatataaatatgcaagatgtgccttacaatgaagttgttggaagctatttccaatcacattggtactgtttggtatttgcaaacaaaaaaacaaaacatgttggaattacttaattgaaatttatctttcacctgaaacaacctagtgtttgagaaattttgccttgccaagtataacttgtatatcttgactctgtggtagatttcaagttcaatgttatttaattacatttggttttccgtaaaccgtgtcacttataagcacagtaataaaagatttgtcatgtgtttgaa

SEQ ID NO: 433158 - DNA, 5990 bp, Homo sapiens
gggccttgcgccgcgggagcggacggcggcggaggagaccctaggctcgcggcccgaggcgggagggctcggcttctcgactgcccgcctccgaggccgccggccgcttctctctcccagagtggccgccgcccctggagactcgccgtgacacgggcctaagccgccgccgcgggagtcctgaccgctcggacccgtcggatcaggccgggtgggagcgagcttgcgggcaggtgccgctcccggagggtgggccggaggcgaggcgcccaccgcgcggctcgcgggccgggctcggcggaggggccgctcgcgcagcacccccaccgcgggccggagcccgggtcgccgccccgccttctcccgggaccgcccggccggagctgcgggggccgagggacgccgcgcccgccgccgccagccgggctcgcgcgggagagcagggaagagaaactttgccttttattgtttttagtccttaagtgcaaggaactctgtgttgggaggaaaaatgtccttcttcaatttccgtaagatcttcaagttggggagcgagaagaagaagaagcagtacgaacacgtgaagagggacctgaaccccgaagacttttgggagattataggagaactgggcgacggagcctttgggaaagtgtacaaggcccagaataaagagaccagtgttttagctgctgcaaaagtgattgacactaaatctgaagaagaacttgaagattacatggtagagattgacatattagcatcttgtgatcacccaaatatagtcaagcttctagatgccttctattatgagaacaatctttggatcctcattgaattttgtgcaggtggagcagtagatgctgtgatgcttgaacttgagagaccattaactgagtcccaaatacaagtagtttgcaagcagactttagatgcattgaactacttacatgataataagatcatccacagagatctgaaggctggcaacattctctttaccttagatggagatatcaaattggcggattttggagtatcagctaaaaacacgaggacaattcaaagaagagattcctttattggtacaccatattggatggctcctgaagtagtcatgtgtgaaacatctaaggacagaccctatgactacaaagctgatgtttggtccctgggtatcactttaatagaaatggctgagatagaaccacctcatcatgaattaaatccaatgcgagtgctgctaaaaatagcaaaatctgagccacctacattagcacagccatccagatggtcttcaaattttaaggactttctaaagaaatgcttagaaaagaatgtggatgccaggtggactacatctcagctgctgcagcatccctttgttactgttgattccaacaaacccatccgagaattgattgcagaggcgaaggctgaagtaacagaagaagttgaagatggcaaagaggaagatgaagaggaggaaacagaaaattctctgccaatacctgcaagtaagcgtgcatcttctgaccttagtatcgccagctctgaagaagataaactttcacaaaatgcttgtattttggagtctgtctcagaaaaaacagaacgtagtaactctgaagataaactcaacagcaaaattcttaatgaaaaacccaccactgatgaacctgaaaaggctgtggaggatattaatgaacatattaccgatgctcagttagaagcaatgactgaactccatgacagaacagcagtaatcaaggagaatgaaagagagaagaggcccaagcttgaaaatctgcctgacacagaagaccaagaaactgtggacattaattcagtcagtgaaggaaaagagaataatataatgataaccttagaaacaaatattgaacataatctaaaatctgaggaagaaaaggatcaggaaaagcaacagatgtttgaaaataagcttataaaatctgaagaaattaaagatactattttgcaaacagtagatttagtttctcaagagactggagaaaaagaggcaaatattcaggcagttgatagtgaagttgggcttacaaaggaagacacccaagagaaattgggggaagacgacaaaactcaaaaagatgtgatcagcaatacaagtgatgtgataggaacatgtgaggcagcagatgtggctcagaaagtggatgaagacagtgctgaggatacgcagagtaatgatgggaaagaagtggtcgaagtaggccagaaattaattaataagcccatggtgggtcctgaggctggtggtactaaggaagttcctattaaagaaatagttgaaatgaatgaaatagaagaaggtaaaaataaggaacaagcaataaacagttcagagaacataatggacatcaatgaggaaccaggaacaactgaaggtgaagaaatcactgagtcaagtagcactgaagaaatggaggtcagaagtgtggtggctgatactgaccaaaaggctttaggaagtgaagttcaggatgcttctaaagtcactactcagatagataaagagaaaaaagaaattccagtgtcaattaaaaaagagcctgaagttactgtagtttcacagcccactgaacctcagcctgttctaatacccagtattaatatcaactctgacagtggagaaaataaagaagaaataggttctttatcaaaaactgaaactattctgccaccagaatctgagaatccaaaggaaaatgataatgattcaggcactggttccactgctgatactagcagtattgacttgaatttatccatctctagctttctaagtaaaactaaagacagtggatcgatatctttacaagaaacaagaagacaaaagaaaacattgaagaaaacacgcaaatttattgttgatggtgtagaagtgagtgtaacaacatcaaagatagttacagatagtgattccaaaactgaagaattgcggtttcttagacgtcaggaacttcgggaattaagatttcttcagaaagaagagcaaagagcccaacaacagctcaatagcaaactacagcaacaacgagaacaaattttccggcgctttgagcaggaaatgatgagtaaaaagcgacaatatgaccaggaaattgagaatctagaaaaacagcagaaacagactatcgaacgcctggaacaagagcacacaaatcgcttgcgagatgaagccaaacgcatcaaaggagaacaagagaaagagttgtccaaatttcagaatatgctgaagaaccgaaagaaggaggaacaagagtttgttcagaaacaacagcaagaattagatggctctctgaaaaagatcatccagcagcagaaggcagagttagctaatattgagagagagtgcctgaataacaagcaacagctcatgagagctcgagaagctgcaatttgggagctcgaagaacgacacttacaagaaaaacaccagctgctcaaacagcagcttaaagatcagtatttcatgcaaagacatcagctacttaagcgccacgagaaggaaacagagcaaatgcagcgttacaatcaaagacttattgaggaattgaaaaacagacagactcaagaaagagcaagactgcccaagattcagcgcagtgaagccaagactcgaatggccatgtttaagaagagtttgagaattaactcaacagccacaccagatcaggaccgtgataaaattaaacagtttgctgcacaagaagaaaagaggcagaaaaatgagagaatggctcagcatcagaaacatgagaatcaaatgcgagatcttcagttgcagtgtgaagccaatgtccgcgaactgcatcagctgcagaatgaaaaatgccacttgttggttgagcatgagactcagaaactgaaggagttagatgaggaacatagccaagaattaaaggagtggagagagaaattgagacctaggaaaaagacactggaagaagagtttgccaggaaactacaggaacaggaagtattctttaaaatgactggggagtctgaatgccttaacccatcaacacagagccggatttccaaattttatcctattcccagcttgcattccaccggatcataacaaagggaagcattctgtgcgtgggtttggctctttcagtatgtcattctgttctcatcttctgccacagtctctcagatagctcatgaagacaatcacctgcctcaccttctaggtgttttccttttttgttttttttgttttgttttgtttttaagcaaagatgaagggaaaacgaactaagacagacgctaggccatgttggcaaagtagcatcttggtgactaaggtgactttgtatattcatcttaaaaattatgttctttagacactgctacctgaaaactgttggagaaataatgtttaaagttatttaagaaaaactgttacatcactaagtattaataaattcttcttacctgacgtaacttctcaatgcctaaattctgtagttgaagctctgctgcagagagttgggataattttcttttggtggatcagctctcataaaaaagctatgatttgctcaaatatgctgttgactcagtaaatgaatatatttttttctttaaataggaacaacctcttttaaaagagaaaaattatttcagtgatttgtcaaaacgaattacctcttttggcatgagctaataattgagggtgctaattttcttaagatagtgcctaaaacactaaatttcagtcaagtcgtaagtaggattttctttttgatcaacagggacaaaaacatctttagaattaaaaacatggttgttttggaatttttgcttctcttaccgtttgatagaaattttcatcctaaaatacatgtacaaagtttggaaagatgaaaaaaagaggtagcttttagattgcaaattggaaatgtaaaactcatgaaatttaagcaatataggtttagctatctgtgtttattttctaaaataatacctgagctggttaaatgatttctctccatcttagctaattctgtttaaaactctgtcagaggcctgcaggctgtgagttatatttataaatatatcttcagaaattaatcttaaaagaggcattagttcagaatacttttttaaaagtttaaattaaatatttaggcacgtcagaaattacttttccttattttgaaatgaggctacttatgtcttggttttattttgttccatgtttaaatcattcactttgatttgagtgggaaaagcctgaagcctttatcatgtggttgctggtgtgtgtaattattaatgaaatgttcactcctagtcccttatgaggcttagaatttcaaccacgtgtcaggtcagacagtattataaactgtactttgctgtctgagacagcacatttgtgaatgatgcttgctgcctgccattttcaacctattctctcttaagagtgctaggtaccaaattgtgaaagtttgttttcagttatattacttttgaggctggtgaaaaatttaaatgtaactttgtgggaacactgattcatatttagaaaatgtaaatgtctgtagcactttcttgcagttaatttgaaaactttggatgctgaaccttgtttgtcagtgatttagatgatttaaaaatgcatgtgtgatttgaattttataattgttttgacaagcataatttacttggacaacttcgtaggtagccttaacttctggccaagtttgttttttatataaatatatatacatatatacatattatgtatggttgtaaattcatacacttatcacatgaatgtgttactgtatacaaaactcttaatgctttattctcaaatgctgggttgaaaaatgttttgaaagccttttaaaatatatatctttataaagtaatattcaggatgatgataaaaattgtttatattgttatgataaaaatgacagtataatgtt

SEQ ID NO: 433159 - DNA, 7363 bp, Homo sapiens
gggccttgcgccgcgggagcggacggcggcggaggagaccctaggctcgcggcccgaggcgggagggctcggcttctcgactgcccgcctccgaggccgccggccgcttctctctcccaagggacgccgcgcccgccgccgccagccgggctcgcgcgggagagcagggaagagaaactttgccttttattgtttttagtccttaagtgcaaggaactctgtgttgggaggaaaaatgtccttcttcaatttccgtaagatcttcaagttggggagcgagaagaagaagaagcagtacgaacacgtgaagagggacctgaaccccgaagacttttgggagattataggagaactgggcgacggagcctttgggaaagtgtacaaggcccagaataaagagaccagtgttttagctgctgcaaaagtgattgacactaaatctgaagaagaacttgaagattacatggtagagattgacatattagcatcttgtgatcacccaaatatagtcaagcttctagatgccttctattatgagaacaatctttggatcctcattgaattttgtgcaggtggagcagtagatgctgtgatgcttgaacttgagagaccattaactgagtcccaaatacaagtagtttgcaagcagactttagatgcattgaactacttacatgataataagatcatccacagagatctgaaggctggcaacattctctttaccttagatggagatatcaaattggcggattttggagtatcagctaaaaacacgaggacaattcaaagaagagattcctttattggtacaccatattggatggctcctgaagtagtcatgtgtgaaacatctaaggacagaccctatgactacaaagctgatgtttggtccctgggtatcactttaatagaaatggctgagatagaaccacctcatcatgaattaaatccaatgcgagtgctgctaaaaatagcaaaatctgagccacctacattagcacagccatccagatggtcttcaaattttaaggactttctaaagaaatgcttagaaaagaatgtggatgccaggtggactacatctcagctgctgcagcatccctttgttactgttgattccaacaaacccatccgagaattgattgcagaggcgaaggctgaagtaacagaagaagttgaagatggcaaagaggaagatgaagaggaggaaacagaaaattctctgccaatacctgcaagtaagcgtgcatcttctgaccttagtatcgccagctctgaagaagataaactttcacaaaatgcttgtattttggagtctgtctcagaaaaaacagaacgtagtaactctgaagataaactcaacagcaaaattcttaatgaaaaacccaccactgatgaacctgaaaaggctgtggaggatattaatgaacatattaccgatgctcagttagaagcaatgactgaactccatgacagaacagcagtaatcaaggagaatgaaagagagaagaggcccaagcttgaaaatctgcctgacacagaagaccaagaaactgtggacattaattcagtcagtgaaggaaaagagaataatataatgataaccttagaaacaaatattgaacataatctaaaatctgaggaagaaaaggatcaggaaaagcaacagatgtttgaaaataagcttataaaatctgaagaaattaaagatactattttgcaaacagtagatttagtttctcaagagactggagaaaaagaggcaaatattcaggcagttgatagtgaagttgggcttacaaaggaagacacccaagagaaattgggggaagacgacaaaactcaaaaagatgtgatcagcaatacaagtgatgtgataggaacatgtgaggcagcagatgtggctcagaaagtggatgaagacagtgctgaggatacgcagagtaatgatgggaaagaagtggtcgaagtaggccagaaattaattaataagcccatggtgggtcctgaggctggtggtactaaggaagttcctattaaagaaatagttgaaatgaatgaaatagaagaaggtaaaaataaggaacaagcaataaacagttcagagaacataatggacatcaatgaggaaccaggaacaactgaaggtgaagaaatcactgagtcaagtagcactgaagaaatggaggtcagaagtgtggtggctgatactgaccaaaaggctttaggaagtgaagttcaggatgcttctaaagtcactactcagatagataaagagaaaaaagaaattccagtgtcaattaaaaaagagcctgaagttactgtagtttcacagcccactgaacctcagcctgttctaatacccagtattaatatcaactctgacagtggagaaaataaagaagaaataggttctttatcaaaaactgaaactattctgccaccagaatctgagaatccaaaggaaaatgataatgattcaggcactggttccactgctgatactagcagtattgacttgaatttatccatctctagctttctaagtaaaactaaagacagtggatcgatatctttacaagaaacaagaagacaaaagaaaacattgaagaaaacacgcaaatttattgttgatggtgtagaagtgagtgtaacaacatcaaagatagttacagatagtgattccaaaactgaagaattgcggtttcttagacgtcaggaacttcgggaattaagatttcttcagaaagaagagcaaagagcccaacaacagctcaatagcaaactacagcaacaacgagaacaaattttccggcgctttgagcaggaaatgatgagtaaaaagcgacaatatgaccaggaaattgagaatctagaaaaacagcagaaacagactatcgaacgcctggaacaagagcacacaaatcgcttgcgagatgaagccaaacgcatcaaaggagaacaagagaaagagttgtccaaatttcagaatatgctgaagaaccgaaagaaggaggaacaagagtttgttcagaaacaacagcaagaattagatggctctctgaaaaagatcatccagcagcagaaggcagagttagctaatattgagagagagtgcctgaataacaagcaacagctcatgagagctcgagaagctgcaatttgggagctcgaagaacgacacttacaagaaaaacaccagctgctcaaacagcagcttaaagatcagtatttcatgcaaagacatcagctacttaagcgccacgagaaggaaacagagcaaatgcagcgttacaatcaaagacttattgaggaattgaaaaacagacagactcaagaaagagcaagactgcccaagattcagcgcagtgaagccaagactcgaatggccatgtttaagaagagtttgagaattaactcaacagccacaccagatcaggaccgtgataaaattaaacagtttgctgcacaagaagaaaagaggcagaaaaatgagagaatggctcagcatcagaaacatgagaatcaaatgcgagatcttcagttgcagtgtgaagccaatgtccgcgaactgcatcagctgcagaatgaaaaatgccacttgttggttgagcatgagactcagaaactgaaggagttagatgaggaacatagccaagaattaaaggagtggagagagaaattgagacctaggaaaaagacactggaagaagagtttgccaggaaactacaggaacaggaagtattctttaaaatgactggggagtctgaatgccttaacccatcaacacagagccggatttccaaattttatcctattcccagcttgcattccaccggatcataacaaagggaagcattctgtgcgtgggtttggctctttcagtatgtcattctgttctcatcttctgccacagtctctcagatagctcatgaagacaatcacctgcctcaccttctaggtgttttccttttttgttttttttgttttgttttgtttttaagcaaagatgaagggaaaacgaactaagacagacgctaggccatgttggcaaagtagcatcttggtgactaaggtgactttgtatattcatcttaaaaattatgttctttagacactgctacctgaaaactgttggagaaataatgtttaaagttatttaagaaaaactgttacatcactaagtattaataaattcttcttacctgacgtaacttctcaatgcctaaattctgtagttgaagctctgctgcagagagttgggataattttcttttggtggatcagctctcataaaaaagctatgatttgctcaaatatgctgttgactcagtaaatgaatatatttttttctttaaataggaacaacctcttttaaaagagaaaaattatttcagtgatttgtcaaaacgaattacctcttttggcatgagctaataattgagggtgctaattttcttaagatagtgcctaaaacactaaatttcagtcaagtcgtaagtaggattttctttttgatcaacagggacaaaaacatctttagaattaaaaacatggttgttttggaatttttgcttctcttaccgtttgatagaaattttcatcctaaaatacatgtacaaagtttggaaagatgaaaaaaagaggtagcttttagattgcaaattggaaatgtaaaactcatgaaatttaagcaatataggtttagctatctgtgtttattttctaaaataatacctgagctggttaaatgatttctctccatcttagctaattctgtttaaaactctgtcagaggcctgcaggctgtgagttatatttataaatatatcttcagaaattaatcttaaaagaggcattagttcagaatacttttttaaaagtttaaattaaatatttaggcacgtcagaaattacttttccttattttgaaatgaggctacttatgtcttggttttattttgttccatgtttaaatcattcactttgatttgagtgggaaaagcctgaagcctttatcatgtggttgctggtgtgtgtaattattaatgaaatgttcactcctagtcccttatgaggcttagaatttcaaccacgtgtcaggtcagacagtattataaactgtactttgctgtctgagacagcacatttgtgaatgatgcttgctgcctgccattttcaacctattctctcttaagagtgctaggtaccaaattgtgaaagtttgttttcagttatattacttttgaggctggtgaaaaatttaaatgtaactttgtgggaacactgattcatatttagaaaatgtaaatgtctgtagcactttcttgcagttaatttgaaaactttggatgctgaaccttgtttgtcagtgatttagatgatttaaaaatgcatgtgtgatttgaattttataattgttttgacaagcataatttacttggacaacttcgtaggtagccttaacttctggccaagtttgttttttatataaatatatatacatatatacatattatgtatggttgtaaattcatacacttatcacatgaatgtgttactgtatacaaaactcttaatgctttattctcaaatgctgggttgaaaaatgttttgaaagccttttaaaatatatatctttataaagtaatattcaggatgatgataaaaattgtttatattgttatgataaaaatgacagtataatgttgcccagtgtatttaatgatttatttgaagagggattgggaaggaacgtcttcataccactttctcctttgaaattttcagtttattgacttttaaaaaatgaatacctcaggcagtagacattttttttctagtatcatttaattgataccctgtgcgctaaatagtgtgtggtgcctgattaatttggtctgaatatttgattctttctgttcctttcaacttgacattcagattattgactcaaggagagaggctcagagtggaatggttggcgctgtgggtaaggttggatctcccttaaaactgccttttggattcagtgtttgtgcttgagttcgctttcaaatatgaccataatcgtgtgggtgcaagactgtacagtgatacatatgtagaggtaaagcattcattttaatacttaaagttatataaatcttttcaaaaagtgttttgttataaaatacgctgtttgtacccataccagcccacctcttctgaggccctgtattcaaatagatgatagtgatctatctttcctgcatgaagtgtaggtggcgagtgggcgaggggcgcagacttctttgaaatcgaagggtacagtcaaatctactgctgatttggttgttttgttgctgtggcagaatatgccatgaaacacatacagacttctccgaacgtgcaccctcatcagccacctcctcccctctttccctgagtgctgtgaacacagcagacctgcacacttctgcagatccagctcctacagcttggggcactaggctgcctttcctagtcctgtcaacaaccatacagtgcgaattgctgaattagctgctattctatgtggagtcacattaagctttttcttatctttttctatggggaagctatagggtgggtaaggaaaaaatgttgaatgcttttactttgctgaaaatattagaactctcttgtgacaggatacagcaaattataattaaatataaattaccagaaccagagctacctctaagtcatacttcctcaagcacaaagctctcaggcatatgagacccaccttaatgaagggtctctgatttcttgagcatcagcgagtttcagaagtgactatttttttgtactcttctagtttccttgtaactatacactttttcccattccacactgtgcttaaatgacaaagactcttctgagaagccaaattctgtccaagtattaactagagatattgttgattaaagaaaatctagaactgaagtgaaagaagagagttccagttctaatagtcttttgattaacaattcttttctgagaaatgatttttataagaaatggggtgattctttaaatgcttttcttaagttgaaggcacaacagttaatggctgtattgttgctattccgttgctgacatgtttttgataaagctttaacattcctgctactaattttggcggagagtgtttgccaggtttcaatgtgggctgcagctttttgtgctccttctctggtttgcagtgtaatgagttcataagctaaattttcagaaagaattttgtttaagattatgcctcttatctacttgagagcaacatgtcttttcaatcatgggattgacacatgaaaaataaagttatttcttaatcaa

SEQ ID NO: 433160 - DNA, 7583 bp, Homo sapiens
gggccttgcgccgcgggagcggacggcggcggaggagaccctaggctcgcggcccgaggcgggagggctcggcttctcgactgcccgcctccgaggccgccggccgcttctctctcccaagggacgccgcgcccgccgccgccagccgggctcgcgcgggagagcagggaagagaaactttgccttttattgtttttagtccttaagtgcaaggaactctgtgttgggaggaaaaatgtccttcttcaatttccgtaagatcttcaagttggggagcgagaagaagaagaagcagtacgaacacgtgaagagggacctgaaccccgaagacttttgggagattataggagaactgggcgacggagcctttgggaaagtgtacaaggcccagaataaagagaccagtgttttagctgctgcaaaagtgattgacactaaatctgaagaagaacttgaagattacatggtagagattgacatattagcatcttgtgatcacccaaatatagtcaagcttctagatgccttctattatgagaacaatctttggatcctcattgaattttgtgcaggtggagcagtagatgctgtgatgcttgaacttgagagaccattaactgagtcccaaatacaagtagtttgcaagcagactttagatgcattgaactacttacatgataataagatcatccacagagatctgaaggctggcaacattctctttaccttagatggagatatcaaattggcggattttggagtatcagctaaaaacacgaggacaattcaaagaagagattcctttattggtacaccatattggatggctcctgaagtagtcatgtgtgaaacatctaaggacagaccctatgactacaaagctgatgtttggtccctgggtatcactttaatagaaatggctgagatagaaccacctcatcatgaattaaatccaatgcgagtgctgctaaaaatagcaaaatctgagccacctacattagcacagccatccagatggtcttcaaattttaaggactttctaaagaaatgcttagaaaagaatgtggatgccaggtggactacatctcagctgctgcagcatccctttgttactgttgattccaacaaacccatccgagaattgattgcagaggcgaaggctgaagtaacagaagaagttgaagatggcaaagaggaagatgaagaggaggaaacagaaaattctctgccaatacctgcaagtaagcgtgcatcttctgaccttagtatcgccagctctgaagaagataaactttcacaaaatgcttgtattttggagtctgtctcagaaaaaacagaacgtagtaactctgaagataaactcaacagcaaaattcttaatgaaaaacccaccactgatgaacctgaaaaggctgtggaggatattaatgaacatattaccgatgctcagttagaagcaatgactgaactccatgacagaacagcagtaatcaaggagaatgaaagagagaagaggcccaagcttgaaaatctgcctgacacagaagaccaagaaactgtggacattaattcagtcagtgaaggaaaagagaataatataatgataaccttagaaacaaatattgaacataatctaaaatctgaggaagaaaaggatcaggaaaagcaacagatgtttgaaaataagcttataaaatctgaagaaattaaagatactattttgcaaacagtagatttagtttctcaagagactggagaaaaagaggcaaatattcaggcagttgatagtgaagttgggcttacaaaggaagacacccaagagaaattgggggaagacgacaaaactcaaaaagatgtgatcagcaatacaagtgatgtgataggaacatgtgaggcagcagatgtggctcagaaagtggatgaagacagtgctgaggatacgcagagtaatgatgggaaagaagtggtcgaagtaggccagaaattaattaataagcccatggtgggtcctgaggctggtggtactaaggaagttcctattaaagaaatagttgaaatgaatgaaatagaagaaggtaaaaataaggaacaagcaataaacagttcagagaacataatggacatcaatgaggaaccaggaacaactgaaggtgaagaaatcactgagtcaagtagcactgaagaaatggaggtcagaagtgtggtggctgatactgaccaaaaggctttaggaagtgaagttcaggatgcttctaaagtcactactcagatagataaagagaaaaaagaaattccagtgtcaattaaaaaagagcctgaagttactgtagtttcacagcccactgaacctcagcctgttctaatacccagtattaatatcaactctgacagtggagaaaataaagaagaaataggttctttatcaaaaactgaaactattctgccaccagaatctgagaatccaaaggaaaatgataatgattcaggcactggttccactgctgatactagcagtattgacttgaatttatccatctctagctttctaagtaaaactaaagacagtggatcgatatctttacaagaaacaagaagacaaaagaaaacattgaagaaaacacgcaaatttattgttgatggtgtagaagtgagtgtaacaacatcaaagatagttacagatagtgattccaaaactgaagaattgcggtttcttaggtgagtagagaaacaacgtaattaaaactggtttgtgacttcttttcagtctctgaaaagtcagaagaatagagaaacaagggtaaattattggctaatttttttttattcttttactaccgttccactcgaaagaaaatttttaaagctttaaaaaaaaacgtatttcagaagtgtaatttttgctgtcttctctatcattaccattaaattttatcagacgtcaggaacttcgggaattaagatttcttcagaaagaagagcaaagagcccaacaacagctcaatagcaaactacagcaacaacgagaacaaattttccggcgctttgagcaggaaatgatgagtaaaaagcgacaatatgaccaggaaattgagaatctagaaaaacagcagaaacagactatcgaacgcctggaacaagagcacacaaatcgcttgcgagatgaagccaaacgcatcaaaggagaacaagagaaagagttgtccaaatttcagaatatgctgaagaaccgaaagaaggaggaacaagagtttgttcagaaacaacagcaagaattagatggctctctgaaaaagatcatccagcagcagaaggcagagttagctaatattgagagagagtgcctgaataacaagcaacagctcatgagagctcgagaagctgcaatttgggagctcgaagaacgacacttacaagaaaaacaccagctgctcaaacagcagcttaaagatcagtatttcatgcaaagacatcagctacttaagcgccacgagaaggaaacagagcaaatgcagcgttacaatcaaagacttattgaggaattgaaaaacagacagactcaagaaagagcaagactgcccaagattcagcgcagtgaagccaagactcgaatggccatgtttaagaagagtttgagaattaactcaacagccacaccagatcaggaccgtgataaaattaaacagtttgctgcacaagaagaaaagaggcagaaaaatgagagaatggctcagcatcagaaacatgagaatcaaatgcgagatcttcagttgcagtgtgaagccaatgtccgcgaactgcatcagctgcagaatgaaaaatgccacttgttggttgagcatgagactcagaaactgaaggagttagatgaggaacatagccaagaattaaaggagtggagagagaaattgagacctaggaaaaagacactggaagaagagtttgccaggaaactacaggaacaggaagtattctttaaaatgactggggagtctgaatgccttaacccatcaacacagagccggatttccaaattttatcctattcccagcttgcattccaccggatcataacaaagggaagcattctgtgcgtgggtttggctctttcagtatgtcattctgttctcatcttctgccacagtctctcagatagctcatgaagacaatcacctgcctcaccttctaggtgttttccttttttgttttttttgttttgttttgtttttaagcaaagatgaagggaaaacgaactaagacagacgctaggccatgttggcaaagtagcatcttggtgactaaggtgactttgtatattcatcttaaaaattatgttctttagacactgctacctgaaaactgttggagaaataatgtttaaagttatttaagaaaaactgttacatcactaagtattaataaattcttcttacctgacgtaacttctcaatgcctaaattctgtagttgaagctctgctgcagagagttgggataattttcttttggtggatcagctctcataaaaaagctatgatttgctcaaatatgctgttgactcagtaaatgaatatatttttttctttaaataggaacaacctcttttaaaagagaaaaattatttcagtgatttgtcaaaacgaattacctcttttggcatgagctaataattgagggtgctaattttcttaagatagtgcctaaaacactaaatttcagtcaagtcgtaagtaggattttctttttgatcaacagggacaaaaacatctttagaattaaaaacatggttgttttggaatttttgcttctcttaccgtttgatagaaattttcatcctaaaatacatgtacaaagtttggaaagatgaaaaaaagaggtagcttttagattgcaaattggaaatgtaaaactcatgaaatttaagcaatataggtttagctatctgtgtttattttctaaaataatacctgagctggttaaatgatttctctccatcttagctaattctgtttaaaactctgtcagaggcctgcaggctgtgagttatatttataaatatatcttcagaaattaatcttaaaagaggcattagttcagaatacttttttaaaagtttaaattaaatatttaggcacgtcagaaattacttttccttattttgaaatgaggctacttatgtcttggttttattttgttccatgtttaaatcattcactttgatttgagtgggaaaagcctgaagcctttatcatgtggttgctggtgtgtgtaattattaatgaaatgttcactcctagtcccttatgaggcttagaatttcaaccacgtgtcaggtcagacagtattataaactgtactttgctgtctgagacagcacatttgtgaatgatgcttgctgcctgccattttcaacctattctctcttaagagtgctaggtaccaaattgtgaaagtttgttttcagttatattacttttgaggctggtgaaaaatttaaatgtaactttgtgggaacactgattcatatttagaaaatgtaaatgtctgtagcactttcttgcagttaatttgaaaactttggatgctgaaccttgtttgtcagtgatttagatgatttaaaaatgcatgtgtgatttgaattttataattgttttgacaagcataatttacttggacaacttcgtaggtagccttaacttctggccaagtttgttttttatataaatatatatacatatatacatattatgtatggttgtaaattcatacacttatcacatgaatgtgttactgtatacaaaactcttaatgctttattctcaaatgctgggttgaaaaatgttttgaaagccttttaaaatatatatctttataaagtaatattcaggatgatgataaaaattgtttatattgttatgataaaaatgacagtataatgttgcccagtgtatttaatgatttatttgaagagggattgggaaggaacgtcttcataccactttctcctttgaaattttcagtttattgacttttaaaaaatgaatacctcaggcagtagacattttttttctagtatcatttaattgataccctgtgcgctaaatagtgtgtggtgcctgattaatttggtctgaatatttgattctttctgttcctttcaacttgacattcagattattgactcaaggagagaggctcagagtggaatggttggcgctgtgggtaaggttggatctcccttaaaactgccttttggattcagtgtttgtgcttgagttcgctttcaaatatgaccataatcgtgtgggtgcaagactgtacagtgatacatatgtagaggtaaagcattcattttaatacttaaagttatataaatcttttcaaaaagtgttttgttataaaatacgctgtttgtacccataccagcccacctcttctgaggccctgtattcaaatagatgatagtgatctatctttcctgcatgaagtgtaggtggcgagtgggcgaggggcgcagacttctttgaaatcgaagggtacagtcaaatctactgctgatttggttgttttgttgctgtggcagaatatgccatgaaacacatacagacttctccgaacgtgcaccctcatcagccacctcctcccctctttccctgagtgctgtgaacacagcagacctgcacacttctgcagatccagctcctacagcttggggcactaggctgcctttcctagtcctgtcaacaaccatacagtgcgaattgctgaattagctgctattctatgtggagtcacattaagctttttcttatctttttctatggggaagctatagggtgggtaaggaaaaaatgttgaatgcttttactttgctgaaaatattagaactctcttgtgacaggatacagcaaattataattaaatataaattaccagaaccagagctacctctaagtcatacttcctcaagcacaaagctctcaggcatatgagacccaccttaatgaagggtctctgatttcttgagcatcagcgagtttcagaagtgactatttttttgtactcttctagtttccttgtaactatacactttttcccattccacactgtgcttaaatgacaaagactcttctgagaagccaaattctgtccaagtattaactagagatattgttgattaaagaaaatctagaactgaagtgaaagaagagagttccagttctaatagtcttttgattaacaattcttttctgagaaatgatttttataagaaatggggtgattctttaaatgcttttcttaagttgaaggcacaacagttaatggctgtattgttgctattccgttgctgacatgtttttgataaagctttaacattcctgctactaattttggcggagagtgtttgccaggtttcaatgtgggctgcagctttttgtgctccttctctggtttgcagtgtaatgagttcataagctaaattttcagaaagaattttgtttaagattatgcctcttatctacttgagagcaacatgtcttttcaatcatgggattgacacatgaaaaataaagttatttcttaatcaa

SEQ ID NO: 433161 - DNA, 7676 bp, Homo sapiens
gggccttgcgccgcgggagcggacggcggcggaggagaccctaggctcgcggcccgaggcgggagggctcggcttctcgactgcccgcctccgaggccgccggccgcttctctctcccaagggacgccgcgcccgccgccgccagccgggctcgcgcgggagagcagggaagagaaactttgccttttattgtttttagtccttaagtgcaaggaactctgtgttgggaggaaaaatgtccttcttcaatttccgtaagatcttcaagttggggagcgagaagaagaagaagcagtacgaacacgtgaagagggacctgaaccccgaagacttttgggagattataggagaactgggcgacggagcctttgggaaagtgtacaaggcccagaataaagagaccagtgttttagctgctgcaaaagtgattgacactaaatctgaagaagaacttgaagattacatggtagagattgacatattagcatcttgtgatcacccaaatatagtcaagcttctagatgccttctattatgagaacaatctttggatcctcattgaattttgtgcaggtggagcagtagatgctgtgatgcttgaacttgagagaccattaactgagtcccaaatacaagtagtttgcaagcagactttagatgcattgaactacttacatgataataagatcatccacagagatctgaaggctggcaacattctctttaccttagatggagatatcaaattggcggattttggagtatcagctaaaaacacgaggacaattcaaagaagagattcctttattggtacaccatattggatggctcctgaagtagtcatgtgtgaaacatctaaggacagaccctatgactacaaagctgatgtttggtccctgggtatcactttaatagaaatggctgagatagaaccacctcatcatgaattaaatccaatgcgagtgctgctaaaaatagcaaaatctgagccacctacattagcacagccatccagatggtcttcaaattttaaggactttctaaagaaatgcttagaaaagaatgtggatgccaggtggactacatctcagctgctgcagcatccctttgttactgttgattccaacaaacccatccgagaattgattgcagaggcgaaggctgaagtaacagaagaagttgaagatggcaaagaggaagatgaagaggaggaaacagaaaattctctgccaatacctgcaagtaagcgtgcatcttctgaccttagtatcgccagctctgaagaagataaactttcacaaaatgcttgtattttggagtctgtctcagaaaaaacagaacgtagtaactctgaagataaactcaacagcaaaattcttaatgaaaaacccaccactgatgaacctgaaaaggctgtggaggatattaatgaacatattaccgatgctcagttagaagcaatgactgaactccatgacagaacagcagtaatcaaggagaatgaaagagagaagaggcccaagcttgaaaatctgcctgacacagaagaccaagaaactgtggacattaattcagtcagtgaaggaaaagagaataatataatgataaccttagaaacaaatattgaacataatctaaaatctgaggaagaaaaggatcaggaaaagcaacagatgtttgaaaataagcttataaaatctgaagaaattaaagatactattttgcaaacagtagatttagtttctcaagagactggagaaaaagaggcaaatattcaggcagttgatagtgaagttgggcttacaaaggaagacacccaagagaaattgggggaagacgacaaaactcaaaaagatgtgatcagcaatacaagtgatgtgataggaacatgtgaggcagcagatgtggctcagaaagtggatgaagacagtgctgaggatacgcagagtaatgatgggaaagaagtggtcgaagtaggccagaaattaattaataagcccatggtgggtcctgaggctggtggtactaaggaagttcctattaaagaaatagttgaaatgaatgaaatagaagaaggtaaaaataaggaacaagcaataaacagttcagagaacataatggacatcaatgaggaaccaggaacaactgaaggtgaagaaatcactgagtcaagtagcactgaagaaatggaggtcagaagtgtggtggctgatactgaccaaaaggctttaggaagtgaagttcaggatgcttctaaagtcactactcagatagataaagagaaaaaagaaattccagtgtcaattaaaaaagagcctgaagttactgtagtttcacagcccactgaacctcagcctgttctaatacccagtattaatatcaactctgacagtggagaaaataaagaagaaataggttctttatcaaaaactgaaactattctgccaccagaatctgagaatccaaaggaaaatgataatgattcaggcactggttccactgctgatactagcagtattgacttgaatttatccatctctagctttctaagtaaaactaaagacagtggatcgatatctttacaagaaacaagaagacaaaagaaaacattgaagaaaacacgcaaatttattgttgatggtgtagaagtgagtgtaacaacatcaaagatagttacagatagtgattccaaaactgaagaattgcggtttcttaggtgagtagagaaacaacgtaattaaaactggtttgtgacttcttttcagtctctgaaaagtcagaagaatagagaaacaagggtaaattattggctaatttttttttattcttttactaccgttccactcgaaagaaaatttttaaagctttaaaaaaaaacgtatttcagaagtgtaatttttgctgtcttctctatcattaccattaaattttatcagacgtcaggaacttcgggaattaagatttcttcagaaagaagagcaaagagcccaacaacagctcaatagcaaactacagcaacaacgagaacaaattttccggcgctttgagcaggaaatgatgagtaaaaagcgacaatatgaccaggaaattgagaatctagaaaaacagcagaaacagactatcgaacgcctggaacaagagcacacaaatcgcttgcgagatgaagccaaacgcatcaaaggagaacaagagaaagagttgtccaaatttcagaatatgctgaagaaccgaaagaaggaggttataaatgaagtggagaaagcacccaaagagctgagaaaagagctcatgaaacgcaggaaagaggagcttgcacaaagccagcatgctcaggaacaagagtttgttcagaaacaacagcaagaattagatggctctctgaaaaagatcatccagcagcagaaggcagagttagctaatattgagagagagtgcctgaataacaagcaacagctcatgagagctcgagaagctgcaatttgggagctcgaagaacgacacttacaagaaaaacaccagctgctcaaacagcagcttaaagatcagtatttcatgcaaagacatcagctacttaagcgccacgagaaggaaacagagcaaatgcagcgttacaatcaaagacttattgaggaattgaaaaacagacagactcaagaaagagcaagactgcccaagattcagcgcagtgaagccaagactcgaatggccatgtttaagaagagtttgagaattaactcaacagccacaccagatcaggaccgtgataaaattaaacagtttgctgcacaagaagaaaagaggcagaaaaatgagagaatggctcagcatcagaaacatgagaatcaaatgcgagatcttcagttgcagtgtgaagccaatgtccgcgaactgcatcagctgcagaatgaaaaatgccacttgttggttgagcatgagactcagaaactgaaggagttagatgaggaacatagccaagaattaaaggagtggagagagaaattgagacctaggaaaaagacactggaagaagagtttgccaggaaactacaggaacaggaagtattctttaaaatgactggggagtctgaatgccttaacccatcaacacagagccggatttccaaattttatcctattcccagcttgcattccaccggatcataacaaagggaagcattctgtgcgtgggtttggctctttcagtatgtcattctgttctcatcttctgccacagtctctcagatagctcatgaagacaatcacctgcctcaccttctaggtgttttccttttttgttttttttgttttgttttgtttttaagcaaagatgaagggaaaacgaactaagacagacgctaggccatgttggcaaagtagcatcttggtgactaaggtgactttgtatattcatcttaaaaattatgttctttagacactgctacctgaaaactgttggagaaataatgtttaaagttatttaagaaaaactgttacatcactaagtattaataaattcttcttacctgacgtaacttctcaatgcctaaattctgtagttgaagctctgctgcagagagttgggataattttcttttggtggatcagctctcataaaaaagctatgatttgctcaaatatgctgttgactcagtaaatgaatatatttttttctttaaataggaacaacctcttttaaaagagaaaaattatttcagtgatttgtcaaaacgaattacctcttttggcatgagctaataattgagggtgctaattttcttaagatagtgcctaaaacactaaatttcagtcaagtcgtaagtaggattttctttttgatcaacagggacaaaaacatctttagaattaaaaacatggttgttttggaatttttgcttctcttaccgtttgatagaaattttcatcctaaaatacatgtacaaagtttggaaagatgaaaaaaagaggtagcttttagattgcaaattggaaatgtaaaactcatgaaatttaagcaatataggtttagctatctgtgtttattttctaaaataatacctgagctggttaaatgatttctctccatcttagctaattctgtttaaaactctgtcagaggcctgcaggctgtgagttatatttataaatatatcttcagaaattaatcttaaaagaggcattagttcagaatacttttttaaaagtttaaattaaatatttaggcacgtcagaaattacttttccttattttgaaatgaggctacttatgtcttggttttattttgttccatgtttaaatcattcactttgatttgagtgggaaaagcctgaagcctttatcatgtggttgctggtgtgtgtaattattaatgaaatgttcactcctagtcccttatgaggcttagaatttcaaccacgtgtcaggtcagacagtattataaactgtactttgctgtctgagacagcacatttgtgaatgatgcttgctgcctgccattttcaacctattctctcttaagagtgctaggtaccaaattgtgaaagtttgttttcagttatattacttttgaggctggtgaaaaatttaaatgtaactttgtgggaacactgattcatatttagaaaatgtaaatgtctgtagcactttcttgcagttaatttgaaaactttggatgctgaaccttgtttgtcagtgatttagatgatttaaaaatgcatgtgtgatttgaattttataattgttttgacaagcataatttacttggacaacttcgtaggtagccttaacttctggccaagtttgttttttatataaatatatatacatatatacatattatgtatggttgtaaattcatacacttatcacatgaatgtgttactgtatacaaaactcttaatgctttattctcaaatgctgggttgaaaaatgttttgaaagccttttaaaatatatatctttataaagtaatattcaggatgatgataaaaattgtttatattgttatgataaaaatgacagtataatgttgcccagtgtatttaatgatttatttgaagagggattgggaaggaacgtcttcataccactttctcctttgaaattttcagtttattgacttttaaaaaatgaatacctcaggcagtagacattttttttctagtatcatttaattgataccctgtgcgctaaatagtgtgtggtgcctgattaatttggtctgaatatttgattctttctgttcctttcaacttgacattcagattattgactcaaggagagaggctcagagtggaatggttggcgctgtgggtaaggttggatctcccttaaaactgccttttggattcagtgtttgtgcttgagttcgctttcaaatatgaccataatcgtgtgggtgcaagactgtacagtgatacatatgtagaggtaaagcattcattttaatacttaaagttatataaatcttttcaaaaagtgttttgttataaaatacgctgtttgtacccataccagcccacctcttctgaggccctgtattcaaatagatgatagtgatctatctttcctgcatgaagtgtaggtggcgagtgggcgaggggcgcagacttctttgaaatcgaagggtacagtcaaatctactgctgatttggttgttttgttgctgtggcagaatatgccatgaaacacatacagacttctccgaacgtgcaccctcatcagccacctcctcccctctttccctgagtgctgtgaacacagcagacctgcacacttctgcagatccagctcctacagcttggggcactaggctgcctttcctagtcctgtcaacaaccatacagtgcgaattgctgaattagctgctattctatgtggagtcacattaagctttttcttatctttttctatggggaagctatagggtgggtaaggaaaaaatgttgaatgcttttactttgctgaaaatattagaactctcttgtgacaggatacagcaaattataattaaatataaattaccagaaccagagctacctctaagtcatacttcctcaagcacaaagctctcaggcatatgagacccaccttaatgaagggtctctgatttcttgagcatcagcgagtttcagaagtgactatttttttgtactcttctagtttccttgtaactatacactttttcccattccacactgtgcttaaatgacaaagactcttctgagaagccaaattctgtccaagtattaactagagatattgttgattaaagaaaatctagaactgaagtgaaagaagagagttccagttctaatagtcttttgattaacaattcttttctgagaaatgatttttataagaaatggggtgattctttaaatgcttttcttaagttgaaggcacaacagttaatggctgtattgttgctattccgttgctgacatgtttttgataaagctttaacattcctgctactaattttggcggagagtgtttgccaggtttcaatgtgggctgcagctttttgtgctccttctctggtttgcagtgtaatgagttcataagctaaattttcagaaagaattttgtttaagattatgcctcttatctacttgagagcaacatgtcttttcaatcatgggattgacacatgaaaaataaagttatttcttaatcaa

SEQ ID NO: 433162 - DNA, 5807 bp, Homo sapiens
gggccttgcgccgcgggagcggacggcggcggaggagaccctaggctcgcggcccgaggcgggagggctcggcttctcgactgcccgcctccgaggccgccggccgcttctctctcccaagggacgccgcgcccgccgccgccagccgggctcgcgcgggagagcagggaagagaaactttgccttttattgtttttagtccttaagtgcaaggaactctgtgttgggaggaaaaatgtccttcttcaatttccgtaagatcttcaagttggggagcgagaagaagaagaagcagtacgaacacgtgaagagggacctgaaccccgaagacttttgggagattataggagaactgggcgacggagcctttgggaaagtgtacaaggcccagaataaagagaccagtgttttagctgctgcaaaagtgattgacactaaatctgaagaagaacttgaagattacatggtagagattgacatattagcatcttgtgatcacccaaatatagtcaagcttctagatgccttctattatgagaacaatctttggatcctcattgaattttgtgcaggtggagcagtagatgctgtgatgcttgaacttgagagaccattaactgagtcccaaatacaagtagtttgcaagcagactttagatgcattgaactacttacatgataataagatcatccacagagatctgaaggctggcaacattctctttaccttagatggagatatcaaattggcggattttggagtatcagctaaaaacacgaggacaattcaaagaagagattcctttattggtacaccatattggatggctcctgaagtagtcatgtgtgaaacatctaaggacagaccctatgactacaaagctgatgtttggtccctgggtatcactttaatagaaatggctgagatagaaccacctcatcatgaattaaatccaatgcgagtgctgctaaaaatagcaaaatctgagccacctacattagcacagccatccagatggtcttcaaattttaaggactttctaaagaaatgcttagaaaagaatgtggatgccaggtggactacatctcagctgctgcagcatccctttgttactgttgattccaacaaacccatccgagaattgattgcagaggcgaaggctgaagtaacagaagaagttgaagatggcaaagaggaagatgaagaggaggaaacagaaaattctctgccaatacctgcaagtaagcgtgcatcttctgaccttagtatcgccagctctgaagaagataaactttcacaaaatgcttgtattttggagtctgtctcagaaaaaacagaacgtagtaactctgaagataaactcaacagcaaaattcttaatgaaaaacccaccactgatgaacctgaaaaggctgtggaggatattaatgaacatattaccgatgctcagttagaagcaatgactgaactccatgacagaacagcagtaatcaaggagaatgaaagagagaagaggcccaagcttgaaaatctgcctgacacagaagaccaagaaactgtggacattaattcagtcagtgaaggaaaagagaataatataatgataaccttagaaacaaatattgaacataatctaaaatctgaggaagaaaaggatcaggaaaagcaacagatgtttgaaaataagcttataaaatctgaagaaattaaagatactattttgcaaacagtagatttagtttctcaagagactggagaaaaagaggcaaatattcaggcagttgatagtgaagttgggcttacaaaggaagacacccaagagaaattgggggaagacgacaaaactcaaaaagatgtgatcagcaatacaagtgatgtgataggaacatgtgaggcagcagatgtggctcagaaagtggatgaagacagtgctgaggatacgcagagtaatgatgggaaagaagtggtcgaagtaggccagaaattaattaataagcccatggtgggtcctgaggctggtggtactaaggaagttcctattaaagaaatagttgaaatgaatgaaatagaagaaggtaaaaataaggaacaagcaataaacagttcagagaacataatggacatcaatgaggaaccaggaacaactgaaggtgaagaaatcactgagtcaagtagcactgaagaaatggaggtcagaagtgtggtggctgatactgaccaaaaggctttaggaagtgaagttcaggatgcttctaaagtcactactcagatagataaagagaaaaaagaaattccagtgtcaattaaaaaagagcctgaagttactgtagtttcacagcccactgaacctcagcctgttctaatacccagtattaatatcaactctgacagtggagaaaataaagaagaaataggttctttatcaaaaactgaaactattctgccaccagaatctgagaatccaaaggaaaatgataatgattcaggcactggttccactgctgatactagcagtattgacttgaatttatccatctctagctttctaagtaaaactaaagacagtggatcgatatctttacaagaaacaagaagacaaaagaaaacattgaagaaaacacgcaaatttattgttgatggtgtagaagtgagtgtaacaacatcaaagatagttacagatagtgattccaaaactgaagaattgcggtttcttagacgtcaggaacttcgggaattaagatttcttcagaaagaagagcaaagagcccaacaacagctcaatagcaaactacagcaacaacgagaacaaattttccggcgctttgagcaggaaatgatgagtaaaaagcgacaatatgaccaggaaattgagaatctagaaaaacagcagaaacagactatcgaacgcctggaacaagagcacacaaatcgcttgcgagatgaagccaaacgcatcaaaggagaacaagagaaagagttgtccaaatttcagaatatgctgaagaaccgaaagaaggaggttataaatgaagtggagaaagcacccaaagagctgagaaaagagctcatgaaacgcaggaaagaggagcttgcacaaagccagcatgctcaggaacaagagtttgttcagaaacaacagcaagaattagatggctctctgaaaaagatcatccagcagcagaaggcagagttagctaatattgagagagagtgcctgaataacaagcaacagctcatgagagctcgagaagctgcaatttgggagctcgaagaacgacacttacaagaaaaacaccagctgctcaaacagcagcttaaagatcagtatttcatgcaaagacatcagctacttaagcgccacgagaaggaaacagagcaaatgcagcgttacaatcaaagacttattgaggaattgaaaaacagacagactcaagaaagagcaagactgcccaagattcagcgcagtgaagccaagactcgaatggccatgtttaagaagagtttgagaattaactcaacagccacaccagatcaggaccgtgataaaattaaacagtttgctgcacaagaagaaaagaggcagaaaaatgagagaatggctcagcatcagaaacatgagaatcaaatgcgagatcttcagttgcagtgtgaagccaatgtccgcgaactgcatcagctgcagaatgaaaaatgccacttgttggttgagcatgagactcagaaactgaaggagttagatgaggaacatagccaagaattaaaggagtggagagagaaattgagacctaggaaaaagacactggaagaagagtttgccaggaaactacaggaacaggaagtattctttaaaatgactggggagtctgaatgccttaacccatcaacacagagccggatttccaaattttatcctattcccagcttgcattccaccggatcataacaaagggaagcattctgtgcgtgggtttggctctttcagtatgtcattctgttctcatcttctgccacagtctctcagatagctcatgaagacaatcacctgcctcaccttctaggtgttttccttttttgttttttttgttttgttttgtttttaagcaaagatgaagggaaaacgaactaagacagacgctaggccatgttggcaaagtagcatcttggtgactaaggtgactttgtatattcatcttaaaaattatgttctttagacactgctacctgaaaactgttggagaaataatgtttaaagttatttaagaaaaactgttacatcactaagtattaataaattcttcttacctgacgtaacttctcaatgcctaaattctgtagttgaagctctgctgcagagagttgggataattttcttttggtggatcagctctcataaaaaagctatgatttgctcaaatatgctgttgactcagtaaatgaatatatttttttctttaaataggaacaacctcttttaaaagagaaaaattatttcagtgatttgtcaaaacgaattacctcttttggcatgagctaataattgagggtgctaattttcttaagatagtgcctaaaacactaaatttcagtcaagtcgtaagtaggattttctttttgatcaacagggacaaaaacatctttagaattaaaaacatggttgttttggaatttttgcttctcttaccgtttgatagaaattttcatcctaaaatacatgtacaaagtttggaaagatgaaaaaaagaggtagcttttagattgcaaattggaaatgtaaaactcatgaaatttaagcaatataggtttagctatctgtgtttattttctaaaataatacctgagctggttaaatgatttctctccatcttagctaattctgtttaaaactctgtcagaggcctgcaggctgtgagttatatttataaatatatcttcagaaattaatcttaaaagaggcattagttcagaatacttttttaaaagtttaaattaaatatttaggcacgtcagaaattacttttccttattttgaaatgaggctacttatgtcttggttttattttgttccatgtttaaatcattcactttgatttgagtgggaaaagcctgaagcctttatcatgtggttgctggtgtgtgtaattattaatgaaatgttcactcctagtcccttatgaggcttagaatttcaaccacgtgtcaggtcagacagtattataaactgtactttgctgtctgagacagcacatttgtgaatgatgcttgctgcctgccattttcaacctattctctcttaagagtgctaggtaccaaattgtgaaagtttgttttcagttatattacttttgaggctggtgaaaaatttaaatgtaactttgtgggaacactgattcatatttagaaaatgtaaatgtctgtagcactttcttgcagttaatttgaaaactttggatgctgaaccttgtttgtcagtgatttagatgatttaaaaatgcatgtgtgatttgaattttataattgttttgacaagcataatttacttggacaacttcgtaggtagccttaacttctggccaagtttgttttttatataaatatatatacatatatacatattatgtatggttgtaaattcatacacttatcacatgaatgtgttactgtatacaaaactcttaatgctttattctcaaatgctgggttgaaaaatgttttgaaagccttttaaaatatatatctttataaagtaatattcaggatgatgataaaaattgtttatattgttatgataaaaatgacagtataatgtt

SEQ ID NO: 433163 - DNA, 4400 bp, Homo sapiens
aagtgtcgaatgctgatccaggagaatcaagagctgcacaaagccagcatgctcaggaacaagagtttgttcagaaacaacagcaagaattagatggctctctgaaaaagatcatccagcagcagaaggcagagttagctaatattgagagagagtgcctgaataacaagcaacagctcatgagagctcgagaagctgcaatttgggagctcgaagaacgacacttacaagaaaaacaccagctgctcaaacagcagcttaaagatcagtatttcatgcaaagacatcagctacttaagcgccacgagaaggaaacagagcaaatgcagcgttacaatcaaagacttattgaggaattgaaaaacagacagactcaagaaagagcaagactgcccaagattcagcgcagtgaagccaagactcgaatggccatgtttaagaagagtttgagaattaactcaacagccacaccagatcaggaccgtgataaaattaaacagtttgctgcacaagaagaaaagaggcagaaaaatgagagaatggctcagcatcagaaacatgagaatcaaatgcgagatcttcagttgcagtgtgaagccaatgtccgcgaactgcatcagctgcagaatgaaaaatgccacttgttggttgagcatgagactcagaaactgaaggagttagatgaggaacatagccaagaattaaaggagtggagagagaaattgagacctaggaaaaagacactggaagaagagtttgccaggaaactacaggaacaggaagtattctttaaaatgactggggagtctgaatgccttaacccatcaacacagagccggatttccaaattttatcctattcccagcttgcattccaccggatcataacaaagggaagcattctgtgcgtgggtttggctctttcagtatgtcattctgttctcatcttctgccacagtctctcagatagctcatgaagacaatcacctgcctcaccttctaggtgttttccttttttgttttttttgttttgttttgtttttaagcaaagatgaagggaaaacgaactaagacagacgctaggccatgttggcaaagtagcatcttggtgactaaggtgactttgtatattcatcttaaaaattatgttctttagacactgctacctgaaaactgttggagaaataatgtttaaagttatttaagaaaaactgttacatcactaagtattaataaattcttcttacctgacgtaacttctcaatgcctaaattctgtagttgaagctctgctgcagagagttgggataattttcttttggtggatcagctctcataaaaaagctatgatttgctcaaatatgctgttgactcagtaaatgaatatatttttttctttaaataggaacaacctcttttaaaagagaaaaattatttcagtgatttgtcaaaacgaattacctcttttggcatgagctaataattgagggtgctaattttcttaagatagtgcctaaaacactaaatttcagtcaagtcgtaagtaggattttctttttgatcaacagggacaaaaacatctttagaattaaaaacatggttgttttggaatttttgcttctcttaccgtttgatagaaattttcatcctaaaatacatgtacaaagtttggaaagatgaaaaaaagaggtagcttttagattgcaaattggaaatgtaaaactcatgaaatttaagcaatataggtttagctatctgtgtttattttctaaaataatacctgagctggttaaatgatttctctccatcttagctaattctgtttaaaactctgtcagaggcctgcaggctgtgagttatatttataaatatatcttcagaaattaatcttaaaagaggcattagttcagaatacttttttaaaagtttaaattaaatatttaggcacgtcagaaattacttttccttattttgaaatgaggctacttatgtcttggttttattttgttccatgtttaaatcattcactttgatttgagtgggaaaagcctgaagcctttatcatgtggttgctggtgtgtgtaattattaatgaaatgttcactcctagtcccttatgaggcttagaatttcaaccacgtgtcaggtcagacagtattataaactgtactttgctgtctgagacagcacatttgtgaatgatgcttgctgcctgccattttcaacctattctctcttaagagtgctaggtaccaaattgtgaaagtttgttttcagttatattacttttgaggctggtgaaaaatttaaatgtaactttgtgggaacactgattcatatttagaaaatgtaaatgtctgtagcactttcttgcagttaatttgaaaactttggatgctgaaccttgtttgtcagtgatttagatgatttaaaaatgcatgtgtgatttgaattttataattgttttgacaagcataatttacttggacaacttcgtaggtagccttaacttctggccaagtttgttttttatataaatatatatacatatatacatattatgtatggttgtaaattcatacacttatcacatgaatgtgttactgtatacaaaactcttaatgctttattctcaaatgctgggttgaaaaatgttttgaaagccttttaaaatatatatctttataaagtaatattcaggatgatgataaaaattgtttatattgttatgataaaaatgacagtataatgttgcccagtgtatttaatgatttatttgaagagggattgggaaggaacgtcttcataccactttctcctttgaaattttcagtttattgacttttaaaaaatgaatacctcaggcagtagacattttttttctagtatcatttaattgataccctgtgcgctaaatagtgtgtggtgcctgattaatttggtctgaatatttgattctttctgttcctttcaacttgacattcagattattgactcaaggagagaggctcagagtggaatggttggcgctgtgggtaaggttggatctcccttaaaactgccttttggattcagtgtttgtgcttgagttcgctttcaaatatgaccataatcgtgtgggtgcaagactgtacagtgatacatatgtagaggtaaagcattcattttaatacttaaagttatataaatcttttcaaaaagtgttttgttataaaatacgctgtttgtacccataccagcccacctcttctgaggccctgtattcaaatagatgatagtgatctatctttcctgcatgaagtgtaggtggcgagtgggcgaggggcgcagacttctttgaaatcgaagggtacagtcaaatctactgctgatttggttgttttgttgctgtggcagaatatgccatgaaacacatacagacttctccgaacgtgcaccctcatcagccacctcctcccctctttccctgagtgctgtgaacacagcagacctgcacacttctgcagatccagctcctacagcttggggcactaggctgcctttcctagtcctgtcaacaaccatacagtgcgaattgctgaattagctgctattctatgtggagtcacattaagctttttcttatctttttctatggggaagctatagggtgggtaaggaaaaaatgttgaatgcttttactttgctgaaaatattagaactctcttgtgacaggatacagcaaattataattaaatataaattaccagaaccagagctacctctaagtcatacttcctcaagcacaaagctctcaggcatatgagacccaccttaatgaagggtctctgatttcttgagcatcagcgagtttcagaagtgactatttttttgtactcttctagtttccttgtaactatacactttttcccattccacactgtgcttaaatgacaaagactcttctgagaagccaaattctgtccaagtattaactagagatattgttgattaaagaaaatctagaactgaagtgaaagaagagagttccagttctaatagtcttttgattaacaattcttttctgagaaatgatttttataagaaatggggtgattctttaaatgcttttcttaagttgaaggcacaacagttaatggctgtattgttgctattccgttgctgacatgtttttgataaagctttaacattcctgctactaattttggcggagagtgtttgccaggtttcaatgtgggctgcagctttttgtgctccttctctggtttgcagtgtaatgagttcataagctaaattttcagaaagaattttgtttaagattatgcctcttatctacttgagagcaacatgtcttttcaatcatgggattgacacatgaaaaataaagttatttcttaatcaa

SEQ ID NO: 433164 - DNA, 3440 bp, Homo sapiens
gccgcctcacgacgaggatacagtgcgctgaatcatgaccggtcttgctctttcttgagtctgtctgttttgttttgtttttaagcaaagatgaagggaaaacgaactaagacagacgctaggccatgttggcaaagtagcatcttggtgactaaggtgactttgtatattcatcttaaaaattatgttctttagacactgctacctgaaaactgttggagaaataatgtttaaagttatttaagaaaaactgttacatcactaagtattaataaattcttcttacctgacgtaacttctcaatgcctaaattctgtagttgaagctctgctgcagagagttgggataattttcttttggtggatcagctctcataaaaaagctatgatttgctcaaatatgctgttgactcagtaaatgaatatatttttttctttaaataggaacaacctcttttaaaagagaaaaattatttcagtgatttgtcaaaacgaattacctcttttggcatgagctaataattgagggtgctaattttcttaagatagtgcctaaaacactaaatttcagtcaagtcgtaagtaggattttctttttgatcaacagggacaaaaacatctttagaattaaaaacatggttgttttggaatttttgcttctcttaccgtttgatagaaattttcatcctaaaatacatgtacaaagtttggaaagatgaaaaaaagaggtagcttttagattgcaaattggaaatgtaaaactcatgaaatttaagcaatataggtttagctatctgtgtttattttctaaaataatacctgagctggttaaatgatttctctccatcttagctaattctgtttaaaactctgtcagaggcctgcaggctgtgagttatatttataaatatatcttcagaaattaatcttaaaagaggcattagttcagaatacttttttaaaagtttaaattaaatatttaggcacgtcagaaattacttttccttattttgaaatgaggctacttatgtcttggttttattttgttccatgtttaaatcattcactttgatttgagtgggaaaagcctgaagcctttatcatgtggttgctggtgtgtgtaattattaatgaaatgttcactcctagtcccttatgaggcttagaatttcaaccacgtgtcaggtcagacagtattataaactgtactttgctgtctgagacagcacatttgtgaatgatgcttgctgcctgccattttcaacctattctctcttaagagtgctaggtaccaaattgtgaaagtttgttttcagttatattacttttgaggctggtgaaaaatttaaatgtaactttgtgggaacactgattcatatttagaaaatgtaaatgtctgtagcactttcttgcagttaatttgaaaactttggatgctgaaccttgtttgtcagtgatttagatgatttaaaaatgcatgtgtgatttgaattttataattgttttgacaagcataatttacttggacaacttcgtaggtagccttaacttctggccaagtttgttttttatataaatatatatacatatatacatattatgtatggttgtaaattcatacacttatcacatgaatgtgttactgtatacaaaactcttaatgctttattctcaaatgctgggttgaaaaatgttttgaaagccttttaaaatatatatctttataaagtaatattcaggatgatgataaaaattgtttatattgttatgataaaaatgacagtataatgttgcccagtgtatttaatgatttatttgaagagggattgggaaggaacgtcttcataccactttctcctttgaaattttcagtttattgacttttaaaaaatgaatacctcaggcagtagacattttttttctagtatcatttaattgataccctgtgcgctaaatagtgtgtggtgcctgattaatttggtctgaatatttgattctttctgttcctttcaacttgacattcagattattgactcaaggagagaggctcagagtggaatggttggcgctgtgggtaaggttggatctcccttaaaactgccttttggattcagtgtttgtgcttgagttcgctttcaaatatgaccataatcgtgtgggtgcaagactgtacagtgatacatatgtagaggtaaagcattcattttaatacttaaagttatataaatcttttcaaaaagtgttttgttataaaatacgctgtttgtacccataccagcccacctcttctgaggccctgtattcaaatagatgatagtgatctatctttcctgcatgaagtgtaggtggcgagtgggcgaggggcgcagacttctttgaaatcgaagggtacagtcaaatctactgctgatttggttgttttgttgctgtggcagaatatgccatgaaacacatacagacttctccgaacgtgcaccctcatcagccacctcctcccctctttccctgagtgctgtgaacacagcagacctgcacacttctgcagatccagctcctacagcttggggcactaggctgcctttcctagtcctgtcaacaaccatacagtgcgaattgctgaattagctgctattctatgtggagtcacattaagctttttcttatctttttctatggggaagctatagggtgggtaaggaaaaaatgttgaatgcttttactttgctgaaaatattagaactctcttgtgacaggatacagcaaattataattaaatataaattaccagaaccagagctacctctaagtcatacttcctcaagcacaaagctctcaggcatatgagacccaccttaatgaagggtctctgatttcttgagcatcagcgagtttcagaagtgactatttttttgtactcttctagtttccttgtaactatacactttttcccattccacactgtgcttaaatgacaaagactcttctgagaagccaaattctgtccaagtattaactagagatattgttgattaaagaaaatctagaactgaagtgaaagaagagagttccagttctaatagtcttttgattaacaattcttttctgagaaatgatttttataagaaatggggtgattctttaaatgcttttcttaagttgaaggcacaacagttaatggctgtattgttgctattccgttgctgacatgtttttgataaagctttaacattcctgctactaattttggcggagagtgtttgccaggtttcaatgtgggctgcagctttttgtgctccttctctggtttgcagtgtaatgagttcataagctaaattttcagaaagaattttgtttaagattatgcctcttatctacttgagagcaacatgtcttttcaatcatgggattgacacatgaaaaataaagttatttcttaatcaa

SEQ ID NO: 433165 - DNA, 6046 bp, Homo sapiens
gggccttgcgccgcgggagcggacggcggcggaggagaccctaggctcgcggcccgaggcgggagggctcggcttctcgactgcccgcctccgaggccgccggccgcttctctctcccaagggacgccgcgcccgccgccgccagccgggctcgcgcgggagagcagggaagagaaactttgccttttattgtttttagtccttaagtgcaaggaactctgtgttgggaggaaaaatgtccttcttcaatttccgtaagatcttcaagttggggagcgagaagaagaagaagcagtacgaacacgtgaagagggacctgaaccccgaagacttttgggagattataggagaactgggcgacggagcctttgggaaagtgtacaaggcccagaataaagagaccagtgttttagctgctgcaaaagtgattgacactaaatctgaagaagaacttgaagattacatggtagagattgacatattagcatcttgtgatcacccaaatatagtcaagcttctagatgccttctattatgagaacaatctttggatcctcattgaattttgtgcaggtggagcagtagatgctgtgatgcttgaacttgagagaccattaactgagtcccaaatacaagtagtttgcaagcagactttagatgcattgaactacttacatgataataagatcatccacagagatctgaaggctggcaacattctctttaccttagatggagatatcaaattggcggattttggagtatcagctaaaaacacgaggacaattcaaagaagagattcctttattggtacaccatattggatggctcctgaagtagtcatgtgtgaaacatctaaggacagaccctatgactacaaagctgatgtttggtccctgggtatcactttaatagaaatggctgagatagaaccacctcatcatgaattaaatccaatgcgagtgctgctaaaaatagcaaaatctgagccacctacattagcacagccatccagatggtcttcaaattttaaggactttctaaagaaatgcttagaaaagaatgtggatgccaggtggactacatctcagctgctgcagcatccctttgttactgttgattccaacaaacccatccgagaattgattgcagaggcgaaggctgaagtaacagaagaagttgaagatggcaaagaggaagatgaagaggaggaaacagaaaattctctgccaatacctgcaagtaagcgtgcatcttctgaccttagtatcgccagctctgaagaagataaactttcacaaaatgcttgtattttggagtctgtctcagaaaaaacagaacgtagtaactctgaagataaactcaacagcaaaattcttaatgaaaaacccaccactgatgaacctgaaaaggctgtggaggatattaatgaacatattaccgatgctcagttagaagcaatgactgaactccatgacagaacagcagtaatcaaggagaatgaaagagagaagaggcccaagcttgaaaatctgcctgacacagaagaccaagaaactgtggacattaattcagtcagtgaaggaaaagagaataatataatgataaccttagaaacaaatattgaacataatctaaaatctgaggaagaaaaggatcaggaaaagcaacagatgtttgaaaataagcttataaaatctgaagaaattaaagatactattttgcaaacagtagatttagtttctcaagagactggagaaaaagaggcaaatattcaggcagttgatagtgaagttgggcttacaaaggaagacacccaagagaaattgggggaagacgacaaaactcaaaaagatgtgatcagcaatacaagtgatgtgataggaacatgtgaggcagcagatgtggctcagaaagtggatgaagacagtgctgaggatacgcagagtaatgatgggaaagaagtggtcgaagtaggccagaaattaattaataagcccatggtgggtcctgaggctggtggtactaaggaagttcctattaaagaaatagttgaaatgaatgaaatagaagaaggtaaaaataaggaacaagcaataaacagttcagagaacataatggacatcaatgaggaaccaggaacaactgaaggtgaagaaatcactgagtcaagtagcactgaagaaatggaggtcagaagtgtggtggctgatactgaccaaaaggctttaggaagtgaagttcaggatgcttctaaagtcactactcagatagataaagagaaaaaagaaattccagtgtcaattaaaaaagagcctgaagttactgtagtttcacagcccactgaacctcagcctgttctaatacccagtattaatatcaactctgacagtggagaaaataaagaagaaataggttctttatcaaaaactgaaactattctgccaccagaatctgagaatccaaaggaaaatgataatgattcaggcactggttccactgctgatactagcagtattgacttgaatttatccatctctagctttctaagtaaaactaaagacagtggatcgatatctttacaagaaacaagaagacaaaagaaaacattgaagaaaacacgcaaatttattgttgatggtgtagaagtgagtgtaacaacatcaaagatagttacagatagtgattccaaaactgaagaattgcggtttcttagacgtcaggaacttcgggaattaagatttcttcagaaagaagagcaaagagcccaacaacagctcaatagcaaactacagcaacaacgagaacaaattttccggcgctttgagcaggaaatgatgagtaaaaagcgacaatatgaccaggaaattgagaatctagaaaaacagcagaaacagactatcgaacgcctggaacaagagcacacaaatcgcttgcgagatgaagccaaacgcatcaaaggagaacaagagaaagagttgtccaaatttcagaatatgctgaagaaccgaaagaaggaggaacaagagtttgttcagaaacaacagcaagaattagatggctctctgaaaaagatcatccagcagcagaaggcagagttagctaatattgagagagagtgcctgaataacaagcaacagctcatgagagctcgagaagctgcaatttgggagctcgaagaacgacacttacaagaaaaacaccagctgctcaaacagcagcttaaagatcagtatttcatgcaaagacatcagctacttaagcgccacgagaaggaaacagagcaaatgcagcgttacaatcaaagacttattgaggaattgaaaaacagacagactcaagaaagagcaagactgcccaagattcagcgcagtgaagccaagactcgaatggccatgtttaagaagagtttgagaattaactcaacagccacaccagatcaggaccgtgataaaattaaacagtttgctgcacaagaagaaaagaggcagaaaaatgagagaatggctcagcatcagaaacatgagaatcaaatgcgagatcttcagttgcagtgtgaagccaatgtccgcgaactgcatcagctgcagaatgaaaaatgccacttgttggttgagcatgagactcagaaactgaaggagttagatgaggaacatagccaagaattaaaggagtggagagagaaattgagacctaggaaaaagacactggaagaagagtttgccaggaaactacaggaacaggaagtattctttaaaatgactggggagtctgaatgccttaacccatcaacacagagccggatttccaaattttatcctattcccagcttgcattccaccggatcataacaaagggaagcattctgtgcgtgggtttggctctttcagtatgtcattctgttctcatcttctgccacagtctctcagatagctcatgaagacaatcacctgcctcaccttctaggtgttttccttttttgttttttttgttttgttttgtttttaagcaaagatgaagggaaaacgaactaagacagacgctaggccatgttggcaaagtagcatcttggtgactaaggtgactttgtatattcatcttaaaaattatgttctttagacactgctacctgaaaactgttggagaaataatgtttaaagttatttaagaaaaactgttacatcactaagtattaataaattcttcttacctgacgtaacttctcaatgcctaaattctgtagttgaagctctgctgcagagagttgggataattttcttttggtggatcagctctcataaaaaagctatgatttgctcaaatatgctgttgactcagtaaatgaatatatttttttctttaaataggaacaacctcttttaaaagagaaaaattatttcagtgatttgtcaaaacgaattacctcttttggcatgagctaataattgagggtgctaattttcttaagatagtgcctaaaacactaaatttcagtcaagtcgtaagtaggattttctttttgatcaacagggacaaaaacatctttagaattaaaaacatggttgttttggaatttttgcttctcttaccgtttgatagaaattttcatcctaaaatacatgtacaaagtttggaaagatgaaaaaaagaggtagcttttagattgcaaattggaaatgtaaaactcatgaaatttaagcaatataggtttagctatctgtgtttattttctaaaataatacctgagctggttaaatgatttctctccatcttagctaattctgtttaaaactctgtcagaggcctgcaggctgtgagttatatttataaatatatcttcagaaattaatcttaaaagaggcattagttcagaatacttttttaaaagtttaaattaaatatttaggcacgtcagaaattacttttccttattttgaaatgaggctacttatgtcttggttttattttgttccatgtttaaatcattcactttgatttgagtgggaaaagcctgaagcctttatcatgtggttgctggtgtgtgtaattattaatgaaatgttcactcctagtcccttatgaggcttagaatttcaaccacgtgtcaggtcagacagtattataaactgtactttgctgtctgagacagcacatttgtgaatgatgcttgctgcctgccattttcaacctattctctcttaagagtgctaggtaccaaattgtgaaagtttgttttcagttatattacttttgaggctggtgaaaaatttaaatgtaactttgtgggaacactgattcatatttagaaaatgttgaatgcttttactttgctgaaaatattagaactctcttgtgacaggatacagcaaattataattaaatataaattaccagaaccagagctacctctaagtcatacttcctcaagcacaaagctctcaggcatatgagacccaccttaatgaagggtctctgatttcttgagcatcagcgagtttcagaagtgactatttttttgtactcttctagtttccttgtaactatacactttttcccattccacactgtgcttaaatgacaaagactcttctgagaagccaaattctgtccaagtattaactagagatattgttgattaaagaaaatctagaactgaagtgaaagaagagagttccagttctaatagtcttttgattaacaattcttttctgagaaatgatttttataagaaatggggtgattctttaaatgcttttcttaagttgaaggcacaacagttaatggctgtattgttgctattccgttgctgacatgtttttgataaagctttaacattcctgctactaattttggcggagagtgtttgccaggtttcaatgtgggctgcagctttttgtgctccttctctggtttgcagtgtaatgagttcataagctaaattttcagaaagaattttgtttaagattatgcctcttatctacttgagagcaacatgtcttttcaatcatgggattgacacatgaaaaataaagttatttcttaatcaa

SEQ ID NO: 433166 - DNA, 6164 bp, Homo sapiens
gggccttgcgccgcgggagcggacggcggcggaggagaccctaggctcgcggcccgaggcgggagggctcggcttctcgactgcccgcctccgaggccgccggccgcttctctctcccaagggacgccgcgcccgccgccgccagccgggctcgcgcgggagagcagggaagagaaactttgccttttattgtttttagtccttaagtgcaaggaactctgtgttgggaggaaaaatgtccttcttcaatttccgtaagatcttcaagttggggagcgagaagaagaagaagcagtacgaacacgtgaagagggacctgaaccccgaagacttttgggagattataggagaactgggcgacggagcctttgggaaagtgtacaaggcccagaataaagagaccagtgttttagctgctgcaaaagtgattgacactaaatctgaagaagaacttgaagattacatggtagagattgacatattagcatcttgtgatcacccaaatatagtcaagcttctagatgccttctattatgagaacaatctttggatcctcattgaattttgtgcaggtggagcagtagatgctgtgatgcttgaacttgagagaccattaactgagtcccaaatacaagtagtttgcaagcagactttagatgcattgaactacttacatgataataagatcatccacagagatctgaaggctggcaacattctctttaccttagatggagatatcaaattggcggattttggagtatcagctaaaaacacgaggacaattcaaagaagagattcctttattggtacaccatattggatggctcctgaagtagtcatgtgtgaaacatctaaggacagaccctatgactacaaagctgatgtttggtccctgggtatcactttaatagaaatggctgagatagaaccacctcatcatgaattaaatccaatgcgagtgctgctaaaaatagcaaaatctgagccacctacattagcacagccatccagatggtcttcaaattttaaggactttctaaagaaatgcttagaaaagaatgtggatgccaggtggactacatctcagctgctgcagcatccctttgttactgttgattccaacaaacccatccgagaattgattgcagaggcgaaggctgaagtaacagaagaagttgaagatggcaaagaggaagatgaagaggaggaaacagaaaattctctgccaatacctgcaagtaagcgtgcatcttctgaccttagtatcgccagctctgaagaagataaactttcacaaaatgcttgtattttggagtctgtctcagaaaaaacagaacgtagtaactctgaagataaactcaacagcaaaattcttaatgaaaaacccaccactgatgaacctgaaaaggctgtggaggatattaatgaacatattaccgatgctcagttagaagcaatgactgaactccatgacagaacagcagtaatcaaggagaatgaaagagagaagaggcccaagcttgaaaatctgcctgacacagaagaccaagaaactgtggacattaattcagtcagtgaaggaaaagagaataatataatgataaccttagaaacaaatattgaacataatctaaaatctgaggaagaaaaggatcaggaaaagcaacagatgtttgaaaataagcttataaaatctgaagaaattaaagatactattttgcaaacagtagatttagtttctcaagagactggagaaaaagaggcaaatattcaggcagttgatagtgaagttgggcttacaaaggaagacacccaagagaaattgggggaagacgacaaaactcaaaaagatgtgatcagcaatacaagtgatgtgataggaacatgtgaggcagcagatgtggctcagaaagtggatgaagacagtgctgaggatacgcagagtaatgatgggaaagaagtggtcgaagtaggccagaaattaattaataagcccatggtgggtcctgaggctggtggtactaaggaagttcctattaaagaaatagttgaaatgaatgaaatagaagaaggtaaaaataaggaacaagcaataaacagttcagagaacataatggacatcaatgaggaaccaggaacaactgaaggtgaagaaatcactgagtcaagtagcactgaagaaatggaggtcagaagtgtggtggctgatactgaccaaaaggctttaggaagtgaagttcaggatgcttctaaagtcactactcagatagataaagagaaaaaagaaattccagtgtcaattaaaaaagagcctgaagttactgtagtttcacagcccactgaacctcagcctgttctaatacccagtattaatatcaactctgacagtggagaaaataaagaagaaataggttctttatcaaaaactgaaactattctgccaccagaatctgagaatccaaaggaaaatgataatgattcaggcactggttccactgctgatactagcagtattgacttgaatttatccatctctagctttctaagtaaaactaaagacagtggatcgatatctttacaagaaacaagaagacaaaagaaaacattgaagaaaacacgcaaatttattgttgatggtgtagaagtgagtgtaacaacatcaaagatagttacagatagtgattccaaaactgaagaattgcggtttcttagacgtcaggaacttcgggaattaagatttcttcagaaagaagagcaaagagcccaacaacagctcaatagcaaactacagcaacaacgagaacaaattttccggcgctttgagcaggaaatgatgagtaaaaagcgacaatatgaccaggaaattgagaatctagaaaaacagcagaaacagactatcgaacgcctggaacaagagcacacaaatcgcttgcgagatgaagccaaacgcatcaaaggagaacaagagaaagagttgtccaaatttcagaatatgctgaagaaccgaaagaaggaggaacaagagtttgttcagaaacaacagcaagaattagatggctctctgaaaaagatcatccagcagcagaaggcagagttagctaatattgagagagagtgcctgaataacaagcaacagctcatgagagctcgagaagctgcaatttgggagctcgaagaacgacacttacaagaaaaacaccagctgctcaaacagcagcttaaagatcagtatttcatgcaaagacatcagctacttaagcgccacgagaaggaaacagagcaaatgcagcgttacaatcaaagacttattgaggaattgaaaaacagacagactcaagaaagagcaagactgcccaagattcagcgcagtgaagccaagactcgaatggccatgtttaagaagagtttgagaattaactcaacagccacaccagatcaggaccgtgataaaattaaacagtttgctgcacaagaagaaaagaggcagaaaaatgagagaatggctcagcatcagaaacatgagaatcaaatgcgagatcttcagttgcagtgtgaagccaatgtccgcgaactgcatcagctgcagaatgaaaaatgccacttgttggttgagcatgagactcagaaactgaaggagttagatgaggaacatagccaagaattaaaggagtggagagagaaattgagacctaggaaaaagacactggaagaagagtttgccaggaaactacaggaacaggaagtattctttaaaatgactggggagtctgaatgccttaacccatcaacacagagccggatttccaaattttatcctattcccagcttgcattccaccggatcataacaaagggaagcattctgtgcgtgggtttggctctttcagtatgtcattctgttctcatcttctgccacagtctctcagatagctcatgaagacaatcacctgcctcaccttctaggtgttttccttttttgttttttttgttttgttttgtttttaagcaaagatgaagggaaaacgaactaagacagacgctaggccatgttggcaaagtagcatcttggtgactaaggtgactttgtatattcatcttaaaaattatgttctttagacactgctacctgaaaactgttggagaaataatgtttaaagttatttaagaaaaactgttacatcactaagtattaataaattcttcttacctgacgtaacttctcaatgcctaaattctgtagttgaagctctgctgcagagagttgggataattttcttttggtggatcagctctcataaaaaagctatgatttgctcaaatatgctgttgactcagtaaatgaatatatttttttctttaaataggaacaacctcttttaaaagagaaaaattatttcagtgatttgtcaaaacgaattacctcttttggcatgagctaataattgagggtgctaattttcttaagatagtgcctaaaacactaaatttcagtcaagtcgtaagtaggattttctttttgatcaacagggacaaaaacatctttagaattaaaaacatggttgttttggaatttttgcttctcttaccgtttgatagaaattttcatcctaaaatacatgtacaaagtttggaaagatgaaaaaaagaggtagcttttagattgcaaattggaaatgtaaaactcatgaaatttaagcaatataggtttagctatctgtgtttattttctaaaataatacctgagctggttaaatgatttctctccatcttagctaattctgtttaaaactctgtcagaggcctgcaggctgtgagttatatttataaatatatcttcagaaattaatcttaaaagaggcattagttcagaatacttttttaaaagtttaaattaaatatttaggcacgtcagaaattacttttccttattttgaaatgaggctacttatgtcttggttttattttgttccatgtttaaatcattcactttgatttgagtgggaaaagcctgaagcctttatcatgtggttgctggtgtgtgtaattattaatgaaatgttcactcctagtcccttatgaggcttagaatttcaaccacgtgtcaggtcagacagtattataaactgtactttgctgtctgagacagcacatttgtgaatgatgcttgctgcctgccattttcaacctattctctcttaagagtgctaggtaccaaattgtgaaagtttgttttcagttatattacttttgaggctggtgaaaaatttaaatgtaactttgtgggaacactgattcatatttagaaaatgtaaatgtctgtagcactttcttgcagttaatttgaaaactttggatgctgaaccttgtttgtcagtgatttagatgatttaaaaatgcatgtgtgatttgaattttataattgttttgacaagcataatttacttggacaacttcgtaggtagccttaacttctggccaagtttgttttttatataaatatatatacatatatacatattatgtatggttgtaaattcatacacttatcacatgaatgtgttactgtatacaaaactcttaatgctttattctcaaatgctgggttgaaaaatgttttgaaagccttttaaaatatatatctttataaagtaatattcaggatgatgataaaaattgtttatattgttatgataaaaatgacagtataatgttgcccagtgtatttaatgatttatttgaagagggattgggaaggaacgtcttcataccactttctcctttgaaattttcagtttattgacttttaaaaaatgaatacctcaggcagtagacattttttttctagtatcatttaattgataccctgtgcgctaaatagtgtgtggtgcctgattaatttggtctgaatatttgattctttctgttcctttcaacttgacattcagattattgactcaaggagagaggctcagagtggaatggttggcgctgtgggtaaggttggatctcccttaaaactgccttttggattcagtgtttgtgcttgagttcgctttcaaatatgaccataatcgtgtgggtgcaagactgtacagtgatacatatgtagaggtaaagcattcattttaatacttaaagttatataaatcttttcaaaaagtg

SEQ ID NO: 433167 - DNA, 6223 bp, Homo sapiens
gggccttgcgccgcgggagcggacggcggcggaggagaccctaggctcgcggcccgaggcgggagggctcggcttctcgactgcccgcctccgaggccgccggccgcttctctctcccaagggacgccgcgcccgccgccgccagccgggctcgcgcgggagagcagggaagagaaactttgccttttattgtttttagtccttaagtgcaaggaactctgtgttgggaggaaaaatgtccttcttcaatttccgtaagatcttcaagttggggagcgagaagaagaagaagcagtacgaacacgtgaagagggacctgaaccccgaagacttttgggagattataggagaactgggcgacggagcctttgggaaagtgtacaaggcccagaataaagagaccagtgttttagctgctgcaaaagtgattgacactaaatctgaagaagaacttgaagattacatggtagagattgacatattagcatcttgtgatcacccaaatatagtcaagcttctagatgccttctattatgagaacaatctttggatcctcattgaattttgtgcaggtggagcagtagatgctgtgatgcttgaacttgagagaccattaactgagtcccaaatacaagtagtttgcaagcagactttagatgcattgaactacttacatgataataagatcatccacagagatctgaaggctggcaacattctctttaccttagatggagatatcaaattggcggattttggagtatcagctaaaaacacgaggacaattcaaagaagagattcctttattggtacaccatattggatggctcctgaagtagtcatgtgtgaaacatctaaggacagaccctatgactacaaagctgatgtttggtccctgggtatcactttaatagaaatggctgagatagaaccacctcatcatgaattaaatccaatgcgagtgctgctaaaaatagcaaaatctgagccacctacattagcacagccatccagatggtcttcaaattttaaggactttctaaagaaatgcttagaaaagaatgtggatgccaggtggactacatctcagctgctgcagcatccctttgttactgttgattccaacaaacccatccgagaattgattgcagaggcgaaggctgaagtaacagaagaagttgaagatggcaaagaggaagatgaagaggaggaaacagaaaattctctgccaatacctgcaagtaagcgtgcatcttctgaccttagtatcgccagctctgaagaagataaactttcacaaaatgcttgtattttggagtctgtctcagaaaaaacagaacgtagtaactctgaagataaactcaacagcaaaattcttaatgaaaaacccaccactgatgaacctgaaaaggctgtggaggatattaatgaacatattaccgatgctcagttagaagcaatgactgaactccatgacagaacagcagtaatcaaggagaatgaaagagagaagaggcccaagcttgaaaatctgcctgacacagaagaccaagaaactgtggacattaattcagtcagtgaaggaaaagagaataatataatgataaccttagaaacaaatattgaacataatctaaaatctgaggaagaaaaggatcaggaaaagcaacagatgtttgaaaataagcttataaaatctgaagaaattaaagatactattttgcaaacagtagatttagtttctcaagagactggagaaaaagaggcaaatattcaggcagttgatagtgaagttgggcttacaaaggaagacacccaagagaaattgggggaagacgacaaaactcaaaaagatgtgatcagcaatacaagtgatgtgataggaacatgtgaggcagcagatgtggctcagaaagtggatgaagacagtgctgaggatacgcagagtaatgatgggaaagaagtggtcgaagtaggccagaaattaattaataagcccatggtgggtcctgaggctggtggtactaaggaagttcctattaaagaaatagttgaaatgaatgaaatagaagaaggtaaaaataaggaacaagcaataaacagttcagagaacataatggacatcaatgaggaaccaggaacaactgaaggtgaagaaatcactgagtcaagtagcactgaagaaatggaggtcagaagtgtggtggctgatactgaccaaaaggctttaggaagtgaagttcaggatgcttctaaagtcactactcagatagataaagagaaaaaagaaattccagtgtcaattaaaaaagagcctgaagttactgtagtttcacagcccactgaacctcagcctgttctaatacccagtattaatatcaactctgacagtggagaaaataaagaagaaataggttctttatcaaaaactgaaactattctgccaccagaatctgagaatccaaaggaaaatgataatgattcaggcactggttccactgctgatactagcagtattgacttgaatttatccatctctagctttctaagtaaaactaaagacagtggatcgatatctttacaagaaacaagaagacaaaagaaaacattgaagaaaacacgcaaatttattgttgatggtgtagaagtgagtgtaacaacatcaaagatagttacagatagtgattccaaaactgaagaattgcggtttcttagacgtcaggaacttcgggaattaagatttcttcagaaagaagagcaaagagcccaacaacagctcaatagcaaactacagcaacaacgagaacaaattttccggcgctttgagcaggaaatgatgagtaaaaagcgacaatatgaccaggaaattgagaatctagaaaaacagcagaaacagactatcgaacgcctggaacaagagcacacaaatcgcttgcgagatgaagccaaacgcatcaaaggagaacaagagaaagagttgtccaaatttcagaatatgctgaagaaccgaaagaaggaggaacaagagtttgttcagaaacaacagcaagaattagatggctctctgaaaaagatcatccagcagcagaaggcagagttagctaatattgagagagagtgcctgaataacaagcaacagctcatgagagctcgagaagctgcaatttgggagctcgaagaacgacacttacaagaaaaacaccagctgctcaaacagcagcttaaagatcagtatttcatgcaaagacatcagctacttaagcgccacgagaaggaaacagagcaaatgcagcgttacaatcaaagacttattgaggaattgaaaaacagacagactcaagaaagagcaagactgcccaagattcagcgcagtgaagccaagactcgaatggccatgtttaagaagagtttgagaattaactcaacagccacaccagatcaggaccgtgataaaattaaacagtttgctgcacaagaagaaaagaggcagaaaaatgagagaatggctcagcatcagaaacatgagaatcaaatgcgagatcttcagttgcagtgtgaagccaatgtccgcgaactgcatcagctgcagaatgaaaaatgccacttgttggttgagcatgagactcagaaactgaaggagttagatgaggaacatagccaagaattaaaggagtggagagagaaattgagacctaggaaaaagacactggaagaagagtttgccaggaaactacaggaacaggaagtattctttaaaatgactggggagtctgaatgccttaacccatcaacacagagccggatttccaaattttatcctattcccagcttgcattccaccggatcataacaaagggaagcattctgtgcgtgggtttggctctttcagtatgtcattctgttctcatcttctgccacagtctctcagatagctcatgaagacaatcacctgcctcaccttctaggtgttttccttttttgttttttttgttttgttttgtttttaagcaaagatgaagggaaaacgaactaagacagacgctaggccatgttggcaaagtagcatcttggtgactaaggtgactttgtatattcatcttaaaaattatgttctttagacactgctacctgaaaactgttggagaaataatgtttaaagttatttaagaaaaactgttacatcactaagtattaataaattcttcttacctgacgtaacttctcaatgcctaaattctgtagttgaagctctgctgcagagagttgggataattttcttttggtggatcagctctcataaaaaagctatgatttgctcaaatatgctgttgactcagtaaatgaatatatttttttctttaaataggaacaacctcttttaaaagagaaaaattatttcagtgatttgtcaaaacgaattacctcttttggcatgagctaataattgagggtgctaattttcttaagatagtgcctaaaacactaaatttcagtcaagtcgtaagtaggattttctttttgatcaacagggacaaaaacatctttagaattaaaaacatggttgttttggaatttttgcttctcttaccgtttgatagaaattttcatcctaaaatacatgtacaaagtttggaaagatgaaaaaaagaggtagcttttagattgcaaattggaaatgtaaaactcatgaaatttaagcaatataggtttagctatctgtgtttattttctaaaataatacctgagctggttaaatgatttctctccatcttagctaattctgtttaaaactctgtcagaggcctgcaggctgtgagttatatttataaatatatcttcagaaattaatcttaaaagaggcattagttcagaatacttttttaaaagtttaaattaaatatttaggcacgtcagaaattacttttccttattttgaaatgaggctacttatgtcttggttttattttgttccatgtttaaatcattcactttgatttgagtgggaaaagcctgaagcctttatcatgtggttgctggtgtgtgtaattattaatgaaatgttcactcctagtcccttatgaggcttagaatttcaaccacgtgtcaggtcagacagtattataaactgtactttgctgtctgagacagcacatttgtgaatgatgcttgctgcctgccattttcaacctattctctcttaagagtgctaggtaccaaattgtgaaagtttgttttcagttatattacttttgaggctggtgaaaaatttaaatgtaactttgtgggaacactgattcatatttagaaaatgtaaatgtctgtagcactttcttgcagttaatttgaaaactttggatgctgaaccttgtttgtcagtgatttagatgatttaaaaatgcatgtgtgatttgaattttataattgttttgacaagcataatttacttggacaacttcgtaggtagccttaacttctggccaagtttgttttttatataaatatatatacatatatacatattatgtatggttgtaaattcatacacttatcacatgaatgtgttactgtatacaaaactcttaatgctttattctcaaatgctgggttgaaaaatgttttgaaagccttttaaaatatatatctttataaagtaatattcaggatgatgataaaaattgtttatattgttatgataaaaatgacagtataatgttgcccagtgtatttaatgatttatttgaagagggattgggaaggaacgtcttcataccactttctcctttgaaattttcagtttattgacttttaaaaaatgaatacctcaggcagtagacattttttttctagtatcatttaattgataccctgtgcgctaaatagtgtgtggtgcctgattaatttggtctgaatatttgattctttctgttcctttcaacttgacattcagattattgactcaaggagagaggctcagagtggaatggtttatgctgtgatcgtggtgatttagagggtgaactcactggaacggggatgcttgcatgtgtaatcttactaagagctaatagaaaggctaggacctaacctataatagtttatgctgtaatagtttatgctgtaatagtttatgctgtaatagtttatgctgtaatagtttatgctgtaatagtttatgctgtaatagtttatgctgtatagtttatgctgtaatagtttatacttt

SEQ ID NO: 433168 - DNA, 3294 bp, Homo sapiens
gggccttgcgccgcgggagcggacggcggcggaggagaccctaggctcgcggcccgaggcgggagggctcggcttctcgactgcccgcctccgaggccgccggccgcttctctctcccaagggacgccgcgcccgccgccgccagccgggctcgcgcgggagagcagggaagagaaactttgccttttattgtttttagtccttaagtgcaaggaactctgtgttgggaggaaaaatgtccttcttcaatttccgtaagatcttcaagttggggagcgagaagaagaagaagcagtacgaacacgtgaagagggacctgaaccccgaagacttttgggagattataggagaactgggcgacggagcctttgggaaagtgtacaaggcccagaataaagagaccagtgttttagctgctgcaaaagtgattgacactaaatctgaagaagaacttgaagattacatggtagagattgacatattagcatcttgtgatcacccaaatatagtcaagcttctagatgccttctattatgagaacaatctttggatcctcattgaattttgtgcaggtggagcagtagatgctgtgatgcttgaacttgagagaccattaactgagtcccaaatacaagtagtttgcaagcagactttagatgcattgaactacttacatgataataagatcatccacagagatctgaaggctggcaacattctctttaccttagatggagatatcaaattggcggattttggagtatcagctaaaaacacgaggacaattcaaagaagagattcctttattggtacaccatattggatggctcctgaagtagtcatgtgtgaaacatctaaggacagaccctatgactacaaagctgatgtttggtccctgggtatcactttaatagaaatggctgagatagaaccacctcatcatgaattaaatccaatgcgagtgctgctaaaaatagcaaaatctgagccacctacattagcacagccatccagatggtcttcaaattttaaggactttctaaagaaatgcttagaaaagaatgtggatgccaggtggactacatctcagctgctgcagcatccctttgttactgttgattccaacaaacccatccgagaattgattgcagaggcgaaggctgaagtaacagaagaagttgaagatggcaaagaggaagatgaagaggaggaaacagaaaattctctgccaatacctgcaagtaagcgtgcatcttctgaccttagtatcgccagctctgaagaagataaactttcacaaaatgcttgtattttggagtctgtctcagaaaaaacagaacgtagtaactctgaagataaactcaacagcaaaattcttaatgaaaaacccaccactgatgaacctgaaaaggctgtggaggatattaatgaacatattaccgatgctcagttagaagcaatgactgaactccatgacagaacagcagtaatcaaggagaatgaaagagagaagaggcccaagcttgaaaatctgcctgacacagaagaccaagaaactgtggacattaattcagtcagtgaaggaaaagagaataatataatgataaccttagaaacaaatattgaacataatctaaaatctgaggaagaaaaggatcaggaaaagcaacagatgtttgaaaataagcttataaaatctgaagaaattaaagatactattttgcaaacagtagatttagtttctcaagagactggagaaaaagaggcaaatattcaggcagttgatagtgaagttgggcttacaaaggaagacacccaagagaaattgggggaagacgacaaaactcaaaaagatgtgatcagcaatacaagtgatgtgataggaacatgtgaggcagcagatgtggctcagaaagtggatgaagacagtgctgaggatacgcagagtaatgatgggaaagaagtggtcgaagtaggccagaaattaattaataagcccatggtgggtcctgaggctggtggtactaaggaagttcctattaaagaaatagttgaaatgaatgaaatagaagaaggtaaaaataaggaacaagcaataaacagttcagagaacataatggacatcaatgaggaaccaggaacaactgaaggtgaagaaatcactgagtcaagtagcactgaagaaatggaggtcagaagtgtggtggctgatactgaccaaaaggctttaggaagtgaagttcaggatgcttctaaagtcactactcagatagataaagagaaaaaagaaattccagtgtcaattaaaaaagagcctgaagttactgtagtttcacagcccactgaacctcagcctgttctaatacccagtattaatatcaactctgacagtggagaaaataaagaagaaataggttctttatcaaaaactgaaactattctgccaccagaatctgagaatccaaaggaaaatgataatgattcaggcactggttccactgctgatactagcagtattgacttgaatttatccatctctagctttctaagtaaaactaaagacagtggatcgatatctttacaagaaacaagaagacaaaagaaaacattgaagaaaacacgcaaatttattgttgatggtgtagaagtgagtgtaacaacatcaaagatagttacagatagtgattccaaaactgaagaattgcggtttcttaggtgagtagagaaacaacgtaattaaaactggtttgtgacttcttttcagtctctgaaaagtcagaagaatagagaaacaagggtaaattattggctaatttttttttattcttttactaccgttccactcgaaagaaaatttttaaagctttaaaaaaaaacgtatttcagaagtgtaatttttgctgtcttctctatcattaccattaaattttatcagacgtcaggaacttcgggaattaagatttcttcagaaagaagagcaaagagcccaacaacagctcaatagcaaactacagcaacaacgagaacaaattttccggcgctttgagcaggaaatgatgagtaaaaagcgacaatatgaccaggaaattgagaatctagaaaaacagcagaaacagactatcgaacgcctggaacaagagcacacaaatcgcttgcgagatgaagccaaacgcatcaaaggagaacaagagaaagagttgtccaaatttcagaatatgctgaagaaccgaaagaaggagaacaagagttagtacagcatattctgaaattgggacaactctttctcttgctccc

SEQ ID NO: 433169 - DNA, 246 bp, Homo sapiens
ctatgtcagcctcccaaagtgctgggattacaggtgtcagccaccagacctagcctaacttcttacaagttattttgtgcctagtattttgctggtcactgcaacaagggagagggtaattataggaaacaacaataacaaaatgacatatttgaatatgcatgtgggtactgactattgtttctgcgtcactggattctatttaaaactttcataggaaacagagcaaatgcagcgttacaatca

SEQ ID NO: 433170 - DNA, 543 bp, Homo sapiens
gaacaagcaataaacagttcagagaacataatggacatcaatgaggaaccaggaacaactgaaggtgaagaaatcactgagtcaagtagcactgaagaaatggaggtcagaagtgtggtggctgatactgaccaaaaggctttaggaagtgaagttcaggatgcttctaaagtcactactcagatagataaagagaaaaaagaaattccagtgtcaattaaaaaagagcctgaagttactgtagtttcacagcccactgaacctcagcctgttctaatacccagtattaatatcaactctgacagtggagaaaataaagaagaaataggttctttatcaaaaactgaaactattctgccaccagaatctgagaatccaaaggaaaatgataatgattcaggcactggttccactgctgatactagcagtattgacttgaatttatccatctctagctttctaagtaaaactaaagacagtggatcgatatctttacaagtaagtgtacatgagtcattgtttgggttttcctttgccattttc

SEQ ID NO: 433171 - DNA, 1162 bp, Homo sapiens
gggaattgctggatttatttatttatttatttatttaatttatttatttattttgagacagagtctccctctgttgctcaggctggagcacagcgttcacaactcatggttatggagccttacctgggcatgccccccgctgacacctgtggaaaggcatgggacagccccggcccatcccctgctgcctgagccctcccctcctctgaccttcctccttccatgaccctgctgccaggggggcttcccaaaaaagatcttgagtcttagcgatgtggtcgacacgcagagaacttggagcctcatgccagggccccctcccagagattcctggcgcccatgtctccttggggggtgactgaaggggatgggtccagactcacttgatcaacaggacatgggcctgcagcttcctgatggaatgcgcacacagctccctgctgacgaagtcaatgctgttctctgcctgcagagacaaaaacatggtgaattctcgtcacaaggcacaggcactctcgtgggcacgaaacccatctctgttggggtggctaagccctggcgagggcaccttagccacccaccctgggtctgagcccaggaccccacatcactgcctcatcgaaggctctttagcccctggtggccagagactcctgccctctccaagtctgttctcccctcttcctgggctcgtggctacccagcctgactccatttccaatactcctttgccaccaggtatggctgtgtgattaaagtcagagaagtgagttgggccaccttttgggcctggattttaggacttaggtgtggcccttccacacccctttcccagtccataggctgcacctcacgctgtcccctgccagcctgggacaggcttcttgccaggagaaagaaacttgctgggaccacagtgcaggatgggcactccgtgatggccccagccagcctcctccgcggccctgcctgccctgtcttgtgactgttttacgtctggatggcggggatgtggccagcttgagtgagatgtgctgtaggtgtgacacgaagctggatttggaaaacagcatgcaaaataatgcaatcaagctttatgttgattacatcttaaatcacattgtggatgttaaataaaaatatgagaagaatttatagaacc

SEQ ID NO: 433172 - DNA, 922 bp, Homo sapiens
  misc_feature (771)..(771): n is a, c, g, or t
  misc_feature (778)..(778): n is a, c, g, or t
  misc_feature (811)..(811): n is a, c, g, or t
  misc_feature (821)..(821): n is a, c, g, or t
  misc_feature (859)..(859): n is a, c, g, or t
ggagtaagagagagagaaagagagacagcactgtgcgtcatgtaccagcgccggaagttggtctcgacacctggactagccgggttgtatttggaaacgcggagtgagtttttccgtgctgtgtaggggctaacaatggacacccagaaggacgttcaacctccaaagcagcaaccaatgatatatatctgtggagagtgtcacacagaaaatgaaataaaatctagggatccaatcagatgcagagaatgtggatacagaataatgtacaagaaaaggactaaaagattggtcgtttttgatgctcgatgaatgctgggaattcagaggaatgtcttcacttatacttggatttgctctcttcccatttctgattgttgtatagctttcgattttgcttacagtagttcccccttatcttcgggagatacattccaaggcccccagtgaactcctgaaacctcaaacagtaccaaacctttatacactgttttttccatatatatatacctatgataaagtataatgtataaattaagcatagcaagagattaataataatgtaatagaacaatgataacatactataataaaagttatgtgaatgtggttggtctctcttgctttcaaaatatcttcttgtacagtactcacctattttagaatgtggttgactacaggtaaccaaaaccacagaaagggaaactttggatgaggggggcactactgtacttaggaatacacttatttcatttgattatttagactatnatttggntctactaacctttggttaggcatttggcctacngatttggttngtttgttttcccaaaggggggtccccccattttcaacnaattggcgaaggggtgacccggtggtaattgcgaaaaaaaaaggggcccaaaaactggcgaag

SEQ ID NO: 433173 - DNA, 584 bp, Homo sapiens
ggagtaagagagagagaaagagagacagcactgtgcgtcatgtaccagcgccggaagttggtctcgacacctggactagccgggttgtatttggaaacgcggagtgagtttttccgtgctgtgtaggggctaacaatggacacccagaaggacgttcaacctccaaagcagcaaccaatgatatatatctgtggagagtgtcacacagaaaatgaaataaaatctagggatccaatcagatgcagagaatgtggatacagaataatgtacaagaaaaggactaaaagatatgtatccttttaacgatgctttctaaatatgagttaggaggaaatgaataatgctggggttgataaagattaatttctggttaaaatgataactttctggattacagtacttaaaaaacaaacatgattagcattttcatggaccaatgcataggctctaaataatctaaataatgctagttgattttggttctcataaatttattttttagggattctgtgcagtcaagcttgaggatagggatacattctgagaattgtgtccttaagcaatttcatcattcctacagaaac

SEQ ID NO: 433174 - DNA, 1064 bp, Homo sapiens
ggagtaagagagagagaaagagagacagcactgtgcgtcatgtaccagcgccggaagttggtctcgacacctggactagccgggttgtatttggaaacgcggagtgagtttttccgtgctgtgtaggggctaacaatggacacccagaaggacgttcaacctccaaagcagcaaccaatgatatatatctgtggagagtgtcacacagaaaatgaaataaaatctagggatccaatcagatgcagagaatgtggatacagaataatgtacaagaaaaggactaaaagattggtcgtttttgatgctcgatgaatgctgggaattcagaggaatgtcttcacttatacttggatttgctctcttcccatttctgattgttgtatagctttcgattttgcttacagtagttcccccttatcttcgggagatacattccaaggcccccagtgaactcctgaaacctcaaacagtaccaaacctttatacactgttttttccatatatatatacctatgataaagtataatgtataaattaagcatagcaagagattaataataatgtaatagaacaatgataacatactataataaaagttatgtgaatgtggttggtctctcttgctttcaaaatatcttcttgtacagtactcacctattttagaatgtggttgactacaggtaaccaaaaccacagaaagggaaactttggatgaggggggcactactgtacttaggaatacaactatatacatatgattttatttttaagaccatattatatttgggtatctactaatattttgtataaagcaattttttgttccattacgtgactttttgttttattgtatatgtaatttaacacacaataaagggtaaagttgcttccccaaaccacacttttaatcaaaacctagaatcatctgcagtccttgttaaaaatgcaggtttctagaaccctctgaagttctgattaaataaatttattgcaaaccccaaaaaaaaaaaaatcacaaaaaaccacgtccccccgccttgaccacccgaaagcctcgggcgccc

SEQ ID NO: 433175 - DNA, 943 bp, Homo sapiens
ggagtaagagagagagaaagagagacagcactgtgcgtcatgtaccagcgccggaagttggtctcgacacctggactagccgggttgtatttggaaacgcggagtgagtttttccgtgctgtgtaggggctaacaatggacacccagaaggacgttcaacctccaaagcagcaaccaatgatatatatctgtggagagtgtcacacagaaaatgaaataaaatctagggatccaatcagatgcagagaatgtggatacagaataatgtacaagaaaaggactaaaagattggtcgtttttgatgctcgatgaatgctgggaattcagaggaatgtcttcacttatacttggatttgctctcttcccatttctgattgttgtatagctttcgattttgcttacagtagttcccccttatcttcgggagatacattccaaggcccccagtgaactcctgaaacctcaaacagtaccaaacctttatacactgttttttccatatatatatacctatgataaagtataatgtataaattaagcatagcaagagattaataataatgtaatagaacaatgataacatactataataaaagttatgtgaatgtggttggtctctcttgctttcaaaatatcttcttgtacagtactcacctattttagaatgtggttgactacaggtaaccaaaactatatacatatgattttatttttaagaccatattatatttgggtatctactaatattttgtataaagcaattttttgttccattacgtgactttttgttttattgtatatgtaatttaacacacaataaagggtaaagttgcttccccaaaccacacttttaatcaaaacctagaatcatctgcagtccttgttaaaaatgcaggtttctagaaccctctgaagttctgattaaataaatttattgcaaacc

SEQ ID NO: 433176 - DNA, 845 bp, Homo sapiens
cgtgcgtaatctagaaattataccaatgatatatatctgtggagagtgtcacacagaaaatgaaataaaatctagggatccaatcagatgcagagaatgtggatacagaataatgtacaagaaaaggactaaaagattggtcgtttttgatgctcgatgaatgctgggaattcagaggaatgtcttcacttatacttggatttgctctcttcccatttctgattgttgtatagctttcgattttgcttacagtagttcccccttatcttcgggagatacattccaaggcccccagtgaactcctgaaacctcaaacagtaccaaacctttatacactgttttttccatatatatatacctatgataaagtataatgtataaattaagcatagcaagagattaataataatgtaatagaacaatgataacatactataataaaagttatgtgaatgtggttggtctctcttgctttcaaaatatcttcttgtacagtactcacctattttagaatgtggttgactacaggtaaccaaaaccacagaaagggaaactttggatgaggggggcactactgtacttaggaatacaactatatacatatgattttatttttaagaccatattatatttgggtatctactaatattttgtataaagcaattttttgttccattacgtgactttttgttttattgtatatgtaatttaacacacaataaagggtaaagttgcttccccaaaccacacttttaatcaaaacctagaatcatctgcagtccttgttaaaaatgcaggtttctagaaccctctgaagttctgattaaataaatttattgcaaacc

SEQ ID NO: 433177 - DNA, 951 bp, Homo sapiens
ggagtaagagagagagaaagagagacagcactgtgcgtcatgtaccagcgccggaagttggtctcgacacctggactagccgggttgtatttggaaacgcggagtgagtttttccgtgctgtgtaggggctaacaatggacacccagaaggacgttcaacctccaaagcagcaaccaatgatatatatctgtggagagtgtcacacagaaaatgaaataaaatctagggatccaatcagatgcagagaatgtggatacagaataatgtacaagaaaaggactaaaagatcttcacttatacttggatttgctctcttcccatttctgattgttgtatagctttcgattttgcttacagtagttcccccttatcttcgggagatacattccaaggcccccagtgaactcctgaaacctcaaacagtaccaaacctttatacactgttttttccatatatatatacctatgataaagtataatgtataaattaagcatagcaagagattaataataatgtaatagaacaatgataacatactataataaaagttatgtgaatgtggttggtctctcttgctttcaaaatatcttcttgtacagtactcacctattttagaatgtggttgactacaggtaaccaaaaccacagaaagggaaactttggatgaggggggcactactgtacttaggaatacaactatatacatatgattttatttttaagaccatattatatttgggtatctactaatattttgtataaagcaattttttgttccattacgtgactttttgttttattgtatatgtaatttaacacacaataaagggtaaagttgcttccccaaaccacacttttaatcaaaacctagaatcatctgcagtccttgttaaaaatgcaggtttctagaaccctctgaagttctgattaaataaatttattgcaaacc

SEQ ID NO: 433178 - DNA, 732 bp, Homo sapiens
tgtccttaactcaaattaatacagtggtcgtttttgatgctcgatgaatgctgggaattcagaggaatgtcttcacttatacttggatttgctctcttcccatttctgattgttgtatagctttcgattttgcttacagtagttcccccttatcttcgggagatacattccaaggcccccagtgaactcctgaaacctcaaacagtaccaaacctttatacactgttttttccatatatatatacctatgataaagtataatgtataaattaagcatagcaagagattaataataatgtaatagaacaatgataacatactataataaaagttatgtgaatgtggttggtctctcttgctttcaaaatatcttcttgtacagtactcacctattttagaatgtggttgactacaggtaaccaaaaccacagaaagggaaactttggatgaggggggcactactgtacttaggaatacaactatatacatatgattttatttttaagaccatattatatttgggtatctactaatattttgtataaagcaattttttgttccattacgtgactttttgttttattgtatatgtaatttaacacacaataaagggtaaagttgcttccccaaaccacacttttaatcaaaacctagaatcatctgcagtccttgttaaaaatgcaggtttctagaaccctctgaagttctgattaaataaatttattgcaaacc

SEQ ID NO: 433179 - DNA, 732 bp, Homo sapiens
gcggccgcctactactactaaattggcggcccgtcgaccgacacctggactagccgggttgtatttggaaacgcggagtgagtttttccgtgctgtgtaggtaagcgaattggcgggttgaggtttgtggtggatatttgggccaaaactggaaagacacttggggtaaaaaggtccggtatgggggtagagttgagagtggctggggatacggtccatgctatcgctcttttccctattttcttttagtttagatgtttagccagtaggagttatttcattgttcttcgctcggtgagcctgttcccctgttgagggatataattttttttggctaacttctgctagagtttgggaaaatagaacttgtgttaaacgagaacgcgagctttacagtcagatctgtatccctttgacttttagtagctgagtgatcctgcggaaattaacatgtctaagtatcggttgcgtcctctgtaaaacaagagtgatgtctcctaggattgttatgaagattataatggcctaacacgtatgaagtagttattatgtccagtttggggtaaacgctcaatacttgtgtgtatgcgtttcgtccttgagacctaacccataggatttggggaaaggaacagattaggaattggatctttgtagcttttcctgagaaaaatgggcccggatggacttgtgagaagcccttttgagatattcagtatttgagtctgtgat

SEQ ID NO: 433180 - DNA, 971 bp, Homo sapiens
gcggccgcctactactactaaattggcggcccgtcgaccgacacctggactagccgggttgtatttggaaacgcggagtgagtttttccgtgctgtgtaggggctaacaatggacacccagaaggacgttcaacctccaaagcagcaaccaatgatatatatctgtggagagtgtcacacagaaaatgaaataaaatctagggatccaatcagatgcagagaatgtggatacagaataatgtacaagaaaaggactaaaagattggtcgtttttgatgctcgatgaatgctgggaattcagaggaatgtcttcacttatacttggatttgctctcttcccatttctgattgttgtatagctttcgattttgcttacagtagttcccccttatcttcgggagatacattccaaggcccccagtgaactcctgaaacctcaaacagtaccaaacctttatacactgttttttccatatatatatacctatgataaagtataatgtataaattaagcatagcaagagattaataataatgtaatagaacaatgataacatactataataaaagttatgtgaatgtggttggtctctcttgctttcaaaatatcttcttgtacagtactcacctattttagaatgtggttgactacaggtaaccaaaaccacagaaagggaaactttggatgaggggggcactactgtacttaggaatacaactatatacatatgattttatttttaagaccatattatatttgggtatctactaatattttgtataaagcaattttttgttccattacgtgactttttgttttattgtatatgtaatttaacacacaataaagggtaaagttgcttccccaaaccacacttttaatcaaaacctagaatcatctgcagtccttgttaaaaatgcaggtttctagaaccctctgaagttctgattaaataaatttattgcaaacc

SEQ ID NO: 433181 - DNA, 609 bp, Homo sapiens
ggagtaagagagagagaaagagagacagcactgtgcgtcatgtaccagcgccggaagttggtctcgacacctggactagccgggttgtatttggaaacgcggagtgagtttttccgtgctgtgtaggggctaacaatggacacccagaaggacgttcaacctccaaagcagcaaccaatgatatatatctgtggagagtgtcacacagaaaatgaaataaaatctagggatccaatcagatgcagagaatgtggatacagaataatgtacaagaaaaggactaaaagattggtcgtttttgatgctcgatgaatgctgggaattcagaggaatgtcttcacttatacttggatttgctctcttcccatttctgattgttgtatagctttcgattttgcttacagtagttcccccttatcttcgggagatacattccaaggcccccagtgaactcctgaaacctcaaacagtaccaaacctttatacactgttttttccatatatatatacctatgataaagtataatgtataaattaagcatagcaagagattaataataatgtaatagaacaatgataacatactataataaaagttatgtgaatgtg

SEQ ID NO: 433182 - DNA, 997 bp, Homo sapiens
ggagtaagagagagagaaagagagacagcactgtgcgtcatgtaccagcgccggaagttggtctcgacacctggactagccgggttgtatttggaaacgcggagtgagtttttccgtgctgtgtaggggctaacaatggacacccagaaggacgttcaacctccaaagcagcaaccaatgatatatatctgtggagagtgtcacacagaaaatgaaataaaatctagggatccaatcagatgcagagaatgtggatacagaataatgtacaagaaaaggactaaaagattggtcgtttttgatgctcgatgaatgctgggaattcagaggaatgtcttcacttatacttggatttgctctcttcccatttctgattgttgtatagctttcgattttgcttacagtagttcccccttatcttcgggagatacattccaaggcccccagtgaactcctgaaacctcaaacagtaccaaacctttatacactgttttttccatatatatatacctatgataaagtataatgtataaattaagcatagcaagagattaataataatgtaatagaacaatgataacatactataataaaagttatgtgaatgtggttggtctctcttgctttcaaaatatcttcttgtacagtactcacctattttagaatgtggttgactacaggtaaccaaaaccacagaaagggaaactttggatgaggggggcactactgtacttaggaatacaactatatacatatgattttatttttaagaccatattatatttgggtatctactaatattttgtataaagcaattttttgttccattacgtgactttttgttttattgtatatgtaatttaacacacaataaagggtaaagttgcttccccaaaccacacttttaatcaaaacctagaatcatctgcagtccttgttaaaaatgcaggtttctagaaccctctgaagttctgattaaataaatttattgcaaacc

SEQ ID NO: 433183 - DNA, 561 bp, Homo sapiens
gcgcgacgcgaaggttgtcgggatccgcggcagcagcggctgcttgagatctgtttctggggcctctggcggtggcggcctggggcggcgcgacggctggtgcgcaggtacactgatgctgaagtactatgagccttcggaacttgtggagagactacaaagttttggttgttatggtccctttagttgggctcatacatttggggtggtacagaatcaaaagcagccctgttttccaaatacctaaaaacgacgacattcctgagcaagatagtctgggactttcaaatcttcagaagagccaaatccaggggaagtagcaggcttgcaatcttcaggtaaagaagcagctttgaatctgagcttcatatcgaaagaagagatgaaaaataccagttggattagaaagaactggcttcttgtagctgggatatctttcataggtgtccatcttggaacatactttttgcagaggtctgcaaagcagtctgtaaaatttcagtctcaaagcaaacaaaagagtattgaagagtgaagtaaaataaatatttggaattacta

SEQ ID NO: 433184 - DNA, 701 bp, Homo sapiens
gagggagagggaaaacactttaggttgagtgctgagagaaaggctctctgagtaggtgacatctgaactaagagctgaagcagaagaataagccatcctctgtggaccaaaggggacaagattctctacttttctgctacgcactaggaatatagcagagaagacaagtggctgctaccttctgttatcgtgggtggcagtgactagtttttctagatcttgactccctgccgtaactaaagatggagtacactgatgctgaagtactatgagccttcggaacttgtggagagactacaaagttttggttgttatggtccctttagttgggctcatacatttggggtggtacagaatcaaaagcagccctgttttccaaatacctaaaaacgacgacattcctgagcaagatagtctgggactttcaaatcttcagaagagccaaatccaggggaagtagcaggcttgcaatcttcaggtaaagaagcagctttgaatctgagcttcatatcgaaagaagagatgaaaaataccagttggattagaaagaactggcttcttgtagctgggatatctttcataggtgtccatcttggaacatactttttgcagaggtctgcaaagcagtctgtaaaatttcagtctcaaagcaaacaaaagagtattgaagagtgaagtaaaataaatatttggaattacta

SEQ ID NO: 433185 - DNA, 2531 bp, Homo sapiens
gcgcgacgcgaaggttgtcgggatccgcggcagcagcggctgcttgagatctgtttctggggcctctggcggtggcggcctggggcggcgcgacggctggtgcgcaggtacactgatgctgaagtactatgagccttcggaacttgtggagagactacaaagttttggttgttatggtccctttagttgggctcatacatttggggtggtacagaatcaaaagcagccctgttttccaaatacctaaaaacgacgacattcctgagcaagatagtctgggactttcaaatcttcagaagagccaaatccaggggaagtagcaggcttgcaatcttcaggtaaagaagcagctttgaatctgagcttcatatcgaaagaagagatgaaaaataccagttggattagaaagaactggcttcttgtagctgggatatctttcataggtgtccatcttggaacatactttttgcagaggtctgcaaagcagtctgtaaaatttcagtctcaaagcaaacaaaagagtattgaagagtgaagtaaaataaatatttggaattactaatttgtcattaaatcattctatgctgattagcttcataaacattgaactttttgattttatagccacaatgctgcatattcatactttaattcctaaagaataatttttaatgttaaaacgtgataatgcaataaatagaaaaatgtggtttacaaaataaaaacggtcttcactagttaccacctgaagtaagatgtctcgtttggaagctaagaagccatcattgtgtaagagtgaaccactgacaactgagagagtcaggaccacactttctgtcttgaaaagaattgtaacatcatgctatggcccctcaggtaggctgaagcagctgcacaatggctttggaggttacgtgtgtacaacctcacagtcctcagctctgctcagtcaccttttggtcacacatcccattttaaagatcctgacagcctccatacagaatcatgtgtcaagcttcagtgattgtggcttattcacagctattctttgctgcaacctgattgaaaatgttcagagattaggcttgacacccaccactgtcattagattaaataaacatcttttgagtctttgcatcagttatctcaagtctgagacctgtggttgtcgaatcccagtggactttagtagtactcagatcctcctttgtttggtgcgtagtatattaacaagtaaacctgcctgtatgctcaccagaaaggaaacagagcatgtcagtgctttgatcctgagagcctttttgcttacaattccagaaaatgctgaaggccacatcattttaggaaagagtttaattgtacctttaaaaggtcaaagagttatagattccactgtattacctgggatactcattgaaatgtcagaagttcaattaatgaggctattacctatcaaaaaatcaactgccctcaaggtggcactcttttgtacaactttatccggagacacttctgacactggagaaggaactgtggtggtcagttatggggtttctcttgaaaatgcagtcttggaccagctgcttaacctaggaaggcagctaatcagtgaccacgtagatcttgtcctgtgccaaaaagttatacatccatctttgaagcagtttctcaatatgcatcgtattattgccatagacagaattggagtgactctgatggaacccctgactaaaatgacaggaacacagcctattggatccctaggctcaatatgtcctaatagttatggaagtgtgaaagatgtgtgcactgcaaaatttggctccaaacatttttttcatcttattcctaatgaagcaacaatctgcagcttgcttctctgcaacagaaatgacactgcctgggatgagctgaagctcacgtgtcagacggcactgcatgtcctgcagttaacactcaaggaaccatgggctttgttgggaggtggctgtactgaaactcatttggctgcatatatcagacacaagactcacaacgacccagaaagcattctcaaagatgatgaatgtactcaaacagaacttcaattaattgctgaagcattttgcagtgccctagaatctgttgttggctctttagaacatgatggaggtgaaattctcactgacatgaagtatggacacctttggtcagttcaggcagattctccctgtgttgctaactggccagatttgctttcacagtgtggctgtggattatacaatagccaggaagaactcaactggtctttcttaagaagcacacgtcgtccatttgtgccacaaagctgccttccacatgaagctgtgggctcagccagcaacctgaccttggactgtttgactgcaaagcttagtggcctacaggtggctgtagagacagccaatttgattttggatctttcatatgttattgaagataaaaactaagagaatagcatgttcgtattacaagagaaacaaataaactagtctgttggcaattgaaaaaaa

SEQ ID NO: 433186 - DNA, 2671 bp, Homo sapiens
gagggagagggaaaacactttaggttgagtgctgagagaaaggctctctgagtaggtgacatctgaactaagagctgaagcagaagaataagccatcctctgtggaccaaaggggacaagattctctacttttctgctacgcactaggaatatagcagagaagacaagtggctgctaccttctgttatcgtgggtggcagtgactagtttttctagatcttgactccctgccgtaactaaagatggagtacactgatgctgaagtactatgagccttcggaacttgtggagagactacaaagttttggttgttatggtccctttagttgggctcatacatttggggtggtacagaatcaaaagcagccctgttttccaaatacctaaaaacgacgacattcctgagcaagatagtctgggactttcaaatcttcagaagagccaaatccaggggaagtagcaggcttgcaatcttcaggtaaagaagcagctttgaatctgagcttcatatcgaaagaagagatgaaaaataccagttggattagaaagaactggcttcttgtagctgggatatctttcataggtgtccatcttggaacatactttttgcagaggtctgcaaagcagtctgtaaaatttcagtctcaaagcaaacaaaagagtattgaagagtgaagtaaaataaatatttggaattactaatttgtcattaaatcattctatgctgattagcttcataaacattgaactttttgattttatagccacaatgctgcatattcatactttaattcctaaagaataatttttaatgttaaaacgtgataatgcaataaatagaaaaatgtggtttacaaaataaaaacggtcttcactagttaccacctgaagtaagatgtctcgtttggaagctaagaagccatcattgtgtaagagtgaaccactgacaactgagagagtcaggaccacactttctgtcttgaaaagaattgtaacatcatgctatggcccctcaggtaggctgaagcagctgcacaatggctttggaggttacgtgtgtacaacctcacagtcctcagctctgctcagtcaccttttggtcacacatcccattttaaagatcctgacagcctccatacagaatcatgtgtcaagcttcagtgattgtggcttattcacagctattctttgctgcaacctgattgaaaatgttcagagattaggcttgacacccaccactgtcattagattaaataaacatcttttgagtctttgcatcagttatctcaagtctgagacctgtggttgtcgaatcccagtggactttagtagtactcagatcctcctttgtttggtgcgtagtatattaacaagtaaacctgcctgtatgctcaccagaaaggaaacagagcatgtcagtgctttgatcctgagagcctttttgcttacaattccagaaaatgctgaaggccacatcattttaggaaagagtttaattgtacctttaaaaggtcaaagagttatagattccactgtattacctgggatactcattgaaatgtcagaagttcaattaatgaggctattacctatcaaaaaatcaactgccctcaaggtggcactcttttgtacaactttatccggagacacttctgacactggagaaggaactgtggtggtcagttatggggtttctcttgaaaatgcagtcttggaccagctgcttaacctaggaaggcagctaatcagtgaccacgtagatcttgtcctgtgccaaaaagttatacatccatctttgaagcagtttctcaatatgcatcgtattattgccatagacagaattggagtgactctgatggaacccctgactaaaatgacaggaacacagcctattggatccctaggctcaatatgtcctaatagttatggaagtgtgaaagatgtgtgcactgcaaaatttggctccaaacatttttttcatcttattcctaatgaagcaacaatctgcagcttgcttctctgcaacagaaatgacactgcctgggatgagctgaagctcacgtgtcagacggcactgcatgtcctgcagttaacactcaaggaaccatgggctttgttgggaggtggctgtactgaaactcatttggctgcatatatcagacacaagactcacaacgacccagaaagcattctcaaagatgatgaatgtactcaaacagaacttcaattaattgctgaagcattttgcagtgccctagaatctgttgttggctctttagaacatgatggaggtgaaattctcactgacatgaagtatggacacctttggtcagttcaggcagattctccctgtgttgctaactggccagatttgctttcacagtgtggctgtggattatacaatagccaggaagaactcaactggtctttcttaagaagcacacgtcgtccatttgtgccacaaagctgccttccacatgaagctgtgggctcagccagcaacctgaccttggactgtttgactgcaaagcttagtggcctacaggtggctgtagagacagccaatttgattttggatctttcatatgttattgaagataaaaactaagagaatagcatgttcgtattacaagagaaacaaataaactagtctgttggcaattgaaaaaaa

SEQ ID NO: 433187 - DNA, 740 bp, Homo sapiens
gcgcgacgcgaaggttgtcgggatccgcggcagcagcggctgcttgagatctgtttctggggcctctggcggtggcggcctggggcggcgcgacggctggtgcgcaggtacactgatgctgaagtactatgagccttcggaacttgtggagagactacaaagttttggttgttatggtccctttagttgggctcatacatttggggtggtacagaatcaaaagcagccctgttttccaaatacctaaaaacgacgacattcctgagcaagatagtctgggactttcaaatcttcagaagagccaaatccaggggaagtagcaggcttgcaatcttcaggtaaagaagcagctttgaatctgagcttcatatcgaaagaagagatgaaaaataccagttggattagaaagaactggcttcttgtagctgggatatctttcataggtgtccatcttggaacatactttttgcagaggtctgcaaagcagtctgtaaaatttcagtctcaaagcaaacaaaagagtattgaagagtgaagtaaaataaatatttggaattactaatttgtcattaaatcattctatgctgattagcttcataaacattgaactttttgattttatagccacaatgctgcatattcatactttaattcctaaagaataatttttaatgttaaaacgtgataatgcaataaatagaaaaatgtggtttacaaaataaaaacggtcttcactagtt

SEQ ID NO: 433188 - DNA, 977 bp, Homo sapiens
gcgcgacgcgaaggttgtcgggatccgcggcagcagcggctgcttgagatctgtttctggggcctctggcggtggcggcctggggcggcgcgacggctggtgcgcaggtacactgatgctgaagtactatgagccttcggaacttgtggagagactacaaagttttggttgttatggtccctttagttgggctcatacatttggggtggtacagaatcaaaagcagccctgttttccaaatacctaaaaacgacgacattcctgagcaagatagtctgggactttcaaatcttcagaagagccaaatccaggggaagtagcaggcttgcaatcttcaggtaaagaagcagctttgaatctgagcttcatatcgaaagaagagatgaaaaataccagttggattagaaagaactggcttcttgtagctgggatatctttcataggtgtccatcttggaacatactttttgcagaggtctgcaaagcagtctgtaaaatttcagtctcaaagcaaacaaaagagtattgaagagtgaagtaaaataaatatttggaattactaccaaaaaaaaaaaaaaaaaaaaaaaaaaaaaaaaaaaagggggggggggggaaaaaagtttccccgggggggcgccaagtttggggttccccgtttttttgtgacaaggggggcccctagggggggggatttaaaggaaggacgggccgcggttaaacaggctgtggcgcgggcacccggccgccgggctcttggacagacctccctctggccggggccaattcggacccaccctcagagataaccggctaaggaacataccttcacggatacggttaccccgcgatcggtcggggaagtggcggttgtatagtgcggccactcagcaacagggagggacgaaaggcaccctcaaaggcaacacacagacagcaacagcgagagcgaaaaacaacaggcatgaacaggcgccgcta

SEQ ID NO: 433189 - DNA, 410 bp, Homo sapiens
gttctagaggacccccaagcagttaatacagactcacaacgacccagaaagcattctcaaagatgatgaatgtactcaaacagaacttcaattaattgctgaagcattttgcagtgccctagaatctgttgttggctctttagaacatgatggaggtgaaattctcactgacatgaagtatggacacctttggtcagttcaggcagattctccctgtgttgctaactggccagatttgctttcacagtgtggctgtggattatacaatagccaggaagaactcaactggtctttcttaagaagcacacgtcgtccatttgtgccacaaagctgccttccacatgaagctgtgggctcagccagcaacctgacctgagtctgtattaactgcttggggatcctctaacgtc

SEQ ID NO: 433190 - DNA, 462 bp, Homo sapiens
  misc_feature (1)..(1): n is a, c, g, or t
  misc_feature (6)..(6): n is a, c, g, or t
  misc_feature (443)..(444): n is a, c, g, or t
  misc_feature (450)..(450): n is a, c, g, or t
ncgaanggtaaccgttcgtacgagaatcgctgtcctctccttgcggccgccagtgtggtggaagtctgcaaagcagtctgtaaaatttcagtctcaaagcaaacaaaagagtattgaagagtgaagtaaaataaatatttggaattactaatttgtcattaaatcattctatgctgattagcttcataaacattgaactttttgattttatagccacaatgctgcatattcatactttaattcctaaagaataatttttaatgttaaaacgtgataatgcaataaatagaaaaatgtggtttacaaaataaaaacggtcttcactagttaccacctgaagtaagatgtctcgtttggaagctaagaagccatcattgtgtaagagtgaaccactgacaactcatacagtctgccctggctccagtatccctcaaaggtgtttnnactggncccggtatagac

SEQ ID NO: 433191 - DNA, 2120 bp, Homo sapiens
  misc_feature (1)..(1): n is a, c, g, or t
  misc_feature (6)..(6): n is a, c, g, or t
ncgaanggtaaccgttcgtacgagaatcgctgtcctctccttgcggccgccagtgtggtggaagtctgcaaagcagtctgtaaaatttcagtctcaaagcaaacaaaagagtattgaagagtgaagtaaaataaatatttggaattactaatttgtcattaaatcattctatgctgattagcttcataaacattgaactttttgattttatagccacaatgctgcatattcatactttaattcctaaagaataatttttaatgttaaaacgtgataatgcaataaatagaaaaatgtggtttacaaaataaaaacggtcttcactagttaccacctgaagtaagatgtctcgtttggaagctaagaagccatcattgtgtaagagtgaaccactgacaactgagagagtcaggaccacactttctgtcttgaaaagaattgtaacatcatgctatggcccctcaggtaggctgaagcagctgcacaatggctttggaggttacgtgtgtacaacctcacagtcctcagctctgctcagtcaccttttggtcacacatcccattttaaagatcctgacagcctccatacagaatcatgtgtcaagcttcagtgattgtggcttattcacagctattctttgctgcaacctgattgaaaatgttcagagattaggcttgacacccaccactgtcattagattaaataaacatcttttgagtctttgcatcagttatctcaagtctgagacctgtggttgtcgaatcccagtggactttagtagtactcagatcctcctttgtttggtgcgtagtatattaacaagtaaacctgcctgtatgctcaccagaaaggaaacagagcatgtcagtgctttgatcctgagagcctttttgcttacaattccagaaaatgctgaaggccacatcattttaggaaagagtttaattgtacctttaaaaggtcaaagagttatagattccactgtattacctgggatactcattgaaatgtcagaagttcaattaatgaggctattacctatcaaaaaatcaactgccctcaaggtggcactcttttgtacaactttatccggagacacttctgacactggagaaggaactgtggtggtcagttatggggtttctcttgaaaatgcagtcttggaccagctgcttaacctaggaaggcagctaatcagtgaccacgtagatcttgtcctgtgccaaaaagttatacatccatctttgaagcagtttctcaatatgcatcgtattattgccatagacagaattggagtgactctgatggaacccctgactaaaatgacaggaacacagcctattggatccctaggctcaatatgtcctaatagttatggaagtgtgaaagatgtgtgcactgcaaaatttggctccaaacatttttttcatcttattcctaatgaagcaacaatctgcagcttgcttctctgcaacagaaatgacactgcctgggatgagctgaagctcacgtgtcagacggcactgcatgtcctgcagttaacactcaaggaaccatgggctttgttgggaggtggctgtactgaaactcatttggctgcatatatcagacacaagactcacaacgacccagaaagcattctcaaagatgatgaatgtactcaaacagaacttcaattaattgctgaagcattttgcagtgccctagaatctgttgttggctctttagaacatgatggaggtgaaattctcactgacatgaagtatggacacctttggtcagttcaggcagattctccctgtgttgctaactggccagatttgctttcacagtgtggctgtggattatacaatagccaggaagaactcaactggtctttcttaagaagcacacgtcgtccatttgtgccacaaagctgccttccacatgaagctgtgggctcagccagcaacctgaccttggactgtttgactgcaaagcttagtggcctacaggtggctgtagagacagccaatttgattttggatctttcatatgttattgaagataaaaactaagagaatagcatgttcgtattacaagagaaacaaataaactagtctgttggcaattgaaaaaaa

SEQ ID NO: 433192 - DNA, 1888 bp, Homo sapiens
  misc_feature (1)..(1): n is a, c, g, or t
  misc_feature (6)..(6): n is a, c, g, or t
ncgaanggtaaccgttcgtacgagaatcgctgtcctctccttgcggccgccagtgtggtggaagtggtttacaaaataaaaacggtcttcactagttaccacctgaagtaagatgtctcgtttggaagctaagaagccatcattgtgtaagagtgaaccactgacaactgagagagtcaggaccacactttctgtcttgaaaagaattgtaacatcatgctatggcccctcaggtaggctgaagcagctgcacaatggctttggaggttacgtgtgtacaacctcacagtcctcagctctgctcagtcaccttttggtcacacatcccattttaaagatcctgacagcctccatacagaatcatgtgtcaagcttcagtgattgtggcttattcacagctattctttgctgcaacctgattgaaaatgttcagagattaggcttgacacccaccactgtcattagattaaataaacatcttttgagtctttgcatcagttatctcaagtctgagacctgtggttgtcgaatcccagtggactttagtagtactcagatcctcctttgtttggtgcgtagtatattaacaagtaaacctgcctgtatgctcaccagaaaggaaacagagcatgtcagtgctttgatcctgagagcctttttgcttacaattccagaaaatgctgaaggccacatcattttaggaaagagtttaattgtacctttaaaaggtcaaagagttatagattccactgtattacctgggatactcattgaaatgtcagaagttcaattaatgaggctattacctatcaaaaaatcaactgccctcaaggtggcactcttttgtacaactttatccggagacacttctgacactggagaaggaactgtggtggtcagttatggggtttctcttgaaaatgcagtcttggaccagctgcttaacctaggaaggcagctaatcagtgaccacgtagatcttgtcctgtgccaaaaagttatacatccatctttgaagcagtttctcaatatgcatcgtattattgccatagacagaattggagtgactctgatggaacccctgactaaaatgacaggaacacagcctattggatccctaggctcaatatgtcctaatagttatggaagtgtgaaagatgtgtgcactgcaaaatttggctccaaacatttttttcatcttattcctaatgaagcaacaatctgcagcttgcttctctgcaacagaaatgacactgcctgggatgagctgaagctcacgtgtcagacggcactgcatgtcctgcagttaacactcaaggaaccatgggctttgttgggaggtggctgtactgaaactcatttggctgcatatatcagacacaagactcacaacgacccagaaagcattctcaaagatgatgaatgtactcaaacagaacttcaattaattgctgaagcattttgcagtgccctagaatctgttgttggctctttagaacatgatggaggtgaaattctcactgacatgaagtatggacacctttggtcagttcaggcagattctccctgtgttgctaactggccagatttgctttcacagtgtggctgtggattatacaatagccaggaagaactcaactggtctttcttaagaagcacacgtcgtccatttgtgccacaaagctgccttccacatgaagctgtgggctcagccagcaacctgaccttggactgtttgactgcaaagcttagtggcctacaggtggctgtagagacagccaatttgattttggatctttcatatgttattgaagataaaaactaagagaatagcatgttcgtattacaagagaaacaaataaactagtctgttggcaattgaaaaaaa

SEQ ID NO: 433193 - DNA, 1129 bp, Homo sapiens
gcgcgacgcgaaggttgtcgggatccgcggcagcagcggctgcttgagatctgtttctggggcctctggcggtggcggcctggggcggcgcgacggctggtgcgcaggtacactgatgctgaagtactatgagccttcggaacttgtggagagactacaaagttttggttgttatggtccctttagttgggctcatacatttggggtggtacagaatcaaaagcagccctgttttccaaatacctaaaaacgacgacattcctgagcaagatagtctgggactttcaaatcttcagaagagccaaatccaggggaagtagcaggcttgcaatcttcaggaacacagcctattggatccctaggctcaatatgtcctaatagttatggaagtgtgaaagatgtgtgcactgcaaaatttggctccaaacatttttttcatcttattcctaatgaagcaacaatctgcagcttgcttctctgcaacagaaatgacactgcctgggatgagctgaagctcacgtgtcagacggcactgcatgtcctgcagttaacactcaaggaaccatgggctttgttgggaggtggctgtactgaaactcatttggctgcatatatcagacacaagactcacaacgacccagaaagcattctcaaagatgatgaatgtactcaaacagaacttcaattaattgctgaagcattttgcagtgccctagaatctgttgttggctctttagaacatgatggaggtgaaattctcactgacatgaagtatggacacctttggtcagttcaggcagattctccctgtgttgctaactggccagatttgctttcacagtgtggctgtggattatacaatagccaggaagaactcaactggtctttcttaagaagcacacgtcgtccatttgtgccacaaagctgccttccacatgaagctgtgggctcagccagcaacctgaccttggactgtttgactgcaaagcttagtggcctacaggtggctgtagagacagccaatttgattttggatctttcatatgttattgaagataaaaactaagagaatagcatgttcgtattacaagagaaacaaataaactagtctgttggcaattgaaaaaaa

SEQ ID NO: 433194 - DNA, 672 bp, Homo sapiens
taacactcctatatatcggtaatacacactaacagtcactcccaccgtggagttttactcacgtgtcagacggcactgcatgtcctgcagttaacactcaaggaaccatgggctttgttgggaggtggctgtactgaaactcatttggctgcatatatcagacacaagactcacaacgacccagaaagcattctcaaagatgatgaatgtactcaaacagaacttcaattaattgctgaagcattttgcagtgccctagaatctgttgttggctctttagaacatgatggaggtgaaattctcactgacatgaagtatggacacctttggtcagttcaggcagattctccctgtgttgctaactggccagatttgctttcacagtgtggctgtggattatacaatagccaggaagaactcaactggtctttcttaagaagcacacgtcgtccatttgtgccacaaagctgccttccacatgaagctgtgggctcagccagcaacctgaccttggactgtttgactgcaaagcttagtggcctacaggtggctgtagagacagccaatttgattttggatctttcatatgttattgaagataaaaactaagagaatagcatgttcgtattacaagagaaacaaataaactagtctgttggcaattgaaaaaaa

SEQ ID NO: 433195 - DNA, 386 bp, Homo sapiens
tgacagatacgatcgagccggtacccgatgagtaatctggccagttcaaggcggcagattctccctgtgttgctaactggccagatttgctttcacagtgtggctgtggattatacaatagccaggaagaactcaactggtctttcttaagaagcacacgtcgtccatttgtgccacaaagctgccttccacatgaagctgtgggctcagccagcaacctgaccttggactgtttgactgcaaagcttagtggcctacaggtggctgtagagacagccaatttgattttggatctttcatatgttattgaagataaaaactaagagaatagcatgttcgtattacaagagaaacaaataaactagtctgttggcaattgaaaaaaa

SEQ ID NO: 433196 - DNA, 435 bp, Homo sapiens
ttccacatgaagctgtgggctcagccagcaacctgaccttggactgtttgactgcaaagcttagtggcctacaggtggctgtagagacagccaatttgattttggatctttcatatgttattgaagataaaaactaagagaatagcatgttcgtattacaagagaaacaaataaactagtctgttggcaattgaaaaaaattgtgagtgtatttgttttctcccaaagccctgttctacatatttggacaaatgactcataaaattatagatacacttatttaggaaaaaaggtgattcgtgaatggaaatgccatgaaacaataaaaatatgaagcattatttatttaaaaatattatagttatcttagggattctatactggctgctgtacattgttctaaatttttgttatgttggcatcattttgagagca

SEQ ID NO: 433197 - DNA, 5984 bp, Homo sapiens
tttttttttttttcggcggagatcctcgttggggctgggaaactcctgcaaaactcgagaccaggaagccagcccgcaccccaacccccaccaaagccacctactcttcttctgtgggaggccagtccacatccgctctcacccgagagagatattcagctggatccaaagtgactgatgaagggaaggaaatcatgtcaagcgaagccttgaaaaagctgccctgagacggtgtcccgccgaaagaatgttggctcaattaagaaacatcagggagataaattcaacccagtgtgtctaaaaatgactacaaaacgaagtttgtttgtgcggttggtaccatgtcgctgtctacgaggggaagaggagactgtcactactcttgattattctcattgcagcttagaacaagttccgaaagagatttttacttttgaaaaaaccttggaggaactctatttagatgctaatcagattgaagagcttccaaagcaactttttaactgtcagtctttacacaaactgagtttgccagacaatgatttaacaacgttaccagcatccattgcaaaccttattaatctcagggaactggatgtcagcaagaatggaatacaggagtttccagaaaatataaaaaattgtaaagttttgacaattgtggaggccagtgtaaaccctatttccaagctccctgatggattttctcagctgttaaacctaacccagttgtatctgaatgatgcttttcttgagttcttgccagcaaattttggcagattaactaaactccaaatattagagcttagagaaaaccagttaaaaatgttgcctaaaactatgaatagactgacccagctggaaagattggatttgggaagtaacgaattcacggaagtgcctgaagtacttgagcaactaagtggattgaaagagttttggatggatgctaatagactgacttttattccagggtttattggtagtttgaaacagctcacatatttggatgtttctaaaaataatattgaaatggttgaagaaggaatttcaacatgtgaaaaccttcaagacctcctattatcaagcaattcacttcagcagcttcctgagactattggttcgttgaagaatataacaacgcttaaaatagatgaaaaccagttaatgtatctgccagactctataggagggttaatatcagtagaagaactggattgtagtttcaatgaagttgaagctttgccttcatctattgggcagcttactaacttaagaacttttgctgctgatcataattacttacagcagttgcccccagagattggaagctggaaaaatataactgtgctgtttctccattccaataaacttgagacacttccagaggaaatgggtgatatgcaaaaattaaaagtcattaatttaagtgataatagattaaagaatttaccctttagctttacaaagctacagcaattgacagctatgtggctctcagataatcagtccaaacccctgatacctcttcaaaaagaaactgattcagagacccagaaaatggtgcttaccaactacatgttccctcaacagccaaggactgaggatgttatgtttatatcagataatgaaagttttaacccttcattgtgggaggaacagaggaaacagcgggctcaagttgcatttgaatgtgatgaagacaaagatgaaagggaggcacctcccagggagggaaatttaaaaagatatccaacaccatacccagatgagcttaagaatatggtcaaaactgttcaaaccattgtacatagattaaaagatgaagagaccaatgaagactcaggaagagatttgaaaccacatgaagatcaacaagatataaataaagatgtgggtgtgaagacctcagaaagtactactacagtaaaaagcaaagttgatgaaagagaaaaatatatgataggaaactctgtacagaagatcagtgaacctgaagctgagattagtcctgggagtttaccagtgactgcaaatatgaaagcctctgagaacttgaagcatattgttaaccatgatgatgtttttgaggaatctgaagaactttcttctgatgaagagatgaaaatggcggagatgcgaccaccattaattgaaacctctattaaccagccaaaagtcgtagcacttagtaataacaaaaaagatgatacaaaggaaacagattctttatcagatgaagttacacacaatagcaatcagaataacagcaattgttcttctccatctcggatgtctgattcagtttctcttaatactgatagtagtcaagacacctcactctgctctccagtgaaacaaactcatattgatattaattccaaaatcaggcaagaagatgaaaattttaacagccttttacaaaatggagatattttaaacagttcaacagaggaaaagttcaaagctcatgataaaaaagattttaacttacctgaatatgatttgaatgttgaagagcgattagttctaattgagaaaagtgttgactcaacagccacagctgatgacactcacaaattagatcatatcaatatgaatcttaataaacttataactaatgatacatttcaaccagagatcatggaaagatcaaaaacacaggatattgtgcttggaacaagctttttaagcattaattctaaagaggaaactgagcacttggaaaatggaaacaagtatcctaatttggaatccgtaaataaggtaaatggacattctgaggaaacttcccagtctcctaataggactgaaccacatgacagtgattgttctgttgacttaggtatttccaaaagcactgaagatctctcccctcagaaaagtggtccagttggatctgttgtgaaatctcatagcataactaatatggagattggagggctaaaaatctatgatattcttagtgataatggacctcagcagccaagtacaaccgttaaaatcacatctgctgttgatggaaaaaatatagtcaggagcaagtctgccacactgttgtatgatcaaccattgcaggtatttactggttcttcctcatcttctgatttaatatcaggaacaaaggcaattttcaagtttgattcaaatcataatcccgaagagccaaatataataagaggccccacaagtggcccacaatctgcacctcaaatatatggtcctccacagtataatatccaatacagtagcagtgctgcagtcaaagacactttgtggcactccaaacaaaatccccaaatagaccatgccagttttcctcctcagctccttcctagatcagagagcacagaaaatcaaagttatgctaaacattctgccaatatgaatttctctaatcataacaatgttcgagctaatactgcataccatttacatcagagacttggcccagcaagacatggggaaatgtgggccatctcaccaaacgaccgacttattcctgcagtaactcgaagtacaatccagcgacaaagtagtgtgtcctccacagcctctgtaaatcttggtgatccaggctctacaaggcgggctcagattcctgaaggagattatttatcatacagagagttccactcagcgggaagaactcctccaatgatgccaggatcacagagacccctttctgcacgaacatacagcatagatggtccaaatgcatcaagacctcagagtgctcgaccctctattaatgaaataccagagagaactatgtcagttagtgatttcaattattcacggactagtccttcaaaaagaccaaatgcaagggttggttctgagcattctttattagatcctccaggaaaaagtaaagttcctcgtgactggagagaacaagtacttcgacatattgaagccaaaaagttagaaaagaagcatccccagacatccagttcaggagatccttgtcaagatggtatattcatttcaggacagcagaactactcatcagccacacttagtcacaaagatgttcctccagacagcttgatgaaaatgcctttgagtaatggacagatgggccagcctctcaggcctcaggcaaattatagtcaaatacatcacccccctcaggcatctgtggcaaggcatccctctagagaacaactaattgattacttgatgctgaaagtggcccaccagcctccatatacacagccccattgttctcctagacaaggccatgaactggcaaaacaagagattcgagtgagggttgaaaaggatccagaacttggatttagcatatcaggtggtgtcgggggtagaggaaacccattcagacctgatgatgatggtatatttgtaacaagggtacaacctgaaggaccagcatcaaaattactgcagccaggtgataaaattattcaggctaatggctacagttttataaatattgaacatggacaagcagtgtccttgctaaaaactttccagaatacagttgaactcatcattgtacgagaagtttcctcataagcactgtggacaaaaaaagcggggaagacagcaagatttattggaagatacttacaggggaaattaatattttgactatttttatatataaagaagaactcaaaaaattatgttcaaatttgtacattaatgaaataatggaacttgtggttagagggaaagaaccactgtacagaatataaaggagactgttgaattcataccatataaaacttgttaggtttttaaacatagcaatcaaggctacaaaaacaaacctgtgttgtttttgtatagattgtaggtttatttttggatttcatatacatgactgaactgtgtgcaaggcaatagttagccttgattttagcccagagacagatggcagagctatctctctcatagcttttatgcccttatttttattcaactggtattaatgtttttctcctgaaactactttttttgatgtgggcaagagatttgaagtgttggcttttgctatgtgcatattgaattgaagagtgagtaggtgaaggtggtgctggtgggttcactttccaaggccagactaaaacagttattttctataaaaatctggaagcaaagaatggggatggggagagctacgtggtagtatgtttttattaggagaataatgcaataaaatatgtaatgtcttttttataaagcaaaaaagacaataattgcatttatgagctcggcaggatctgttcttgtcatagccattgactatacatttgctactggtgattcagtttttaattttttagtcacaggaaatttttaactctactgtagatgcatgtccatgcattttctgtgttatggaaatccactgatttttttttttttttcaaatggtggtacttgcaatctgttttataattagtgctccatttaaatctaatttataatttttattttaagcagcaaatgaaacaaaaatggccagttttaagattgtgttgcctgtaacacaaaatgttacgaaggtttaggaaagcctctttgatttttgtttggccttgcattgccttggtaaagtaaaaggaaacagtacacttggagctaggaaaccaaagcaagctttgtgaaactggcacagtgatagagaattgctgtggagagttatagagcaaagggatgggtccttgaggcctgccagtgtgtaaaggtgttcaaataaagggctgtttctacaggtaacattaaatgtgaactcaacacttccagagtctttaaagggtttctatgtgtatcagtgtaatagtgttttaccaccaactgcctttctttgttcctagttactgtaacaaatatttgatgatagaggtttattaattttgtttatccagaccattaattttatttgtttttgttctatgtaatcaaataaaatttgagtaacatgtaatggtaaggattaatgcatggttatt

SEQ ID NO: 433198 - DNA, 2155 bp, Homo sapiens
  misc_feature (612)..(612): n is a, c, g, or t
taccaagaaatccagaaatagagaatagttagcattaattcagcattaattgcttagcaatgctgtttgaaaccccagcttgttttgtttttttcctctgtcagtcttatttattggctggttattaatcctcatccttgttgacttacggtaataggatggttgttgcagcactagatactgtgtacacatacgaggctagaaaaatgggagagtggtggtgtcagatgtatttgctcccttttatcaggaaagcaaatgtttttccagaattaaccggcacttcacccccaaagcagacttcagaatataagtctttgattttcactgtgttacccatttcttgtttacccctccaggcatggaaagctcaaaagtggtaattgagctgggccccttactgccctgaatagtctagagtcttgaaaggaaggccaggtcacacctgtaaacccagcactttgggaggctgaattgagtgggaggattgctgagccaggagtttgagaccagcttgggcaacatagtgagagactgtctacacacacacacacacacacacacacacgaaaaaagaaaaacaggttagctgggtgtggtggtgcacgcttntagtcccagccactcaagaggctaaggcaggagaatcctttgagcccaggaggttgaggctgaagtgagccgtgattgtgccactgcattccagcctgggtgacagagcaagaccctgtctcaaaaaaaagtccaggcgtggtggctcacgcctgttaatcccagaacttcgggaggccaaggtggttggatcacttgaggtcaggagtttgagaccagcctggccaatatggcaaaaccccgtctctctaaagagttagccaggtgttgtggtgcacacctgtaatcccacctactcggcaggctgaggcaggagaatcgcttgaacctaggaagtggaggttgcagtgagctgagattgtaccactgtactccagcctgggcaacagagtgatacgtctccaaaaaaaaaaaaaaaatcttagaagggaaaataaatcccataaacaattaacagtgcctgccacatagaactatgaaaaattactaaaatataattggccattcgagtttatttgcttggaaagttatttctcagtaagttcaaattaatggcattttaatggtaggtgaaagagtatttatataatgagggctctcaagagtttataaatgtatgaagactatccactataaagatagccatttggctgggtgcagtgtctcacgtttgtaatcccagcactttgggagactgaggtgggagaatcgcttaaggccaggagttcaagaccagcatggccaacatagtgagaccctgtctctaaaaaagtttttttaaaattagctgcgtatggtggtatacacctgtagtcctagcttctcaggaggctgaggtgggaggattgattgtgcccaggagtttgaggccgcagtcagtcatgtttgtgccattgggctgcagtctaggtgacagagtgagacccagtctcttaaaaaaaaaaaaagctagtcatttatttagaagctggtaaatatgtgtgtgtgtgtgtgtgcatacacttgtgtgtgcgtttttaagaggctaatattttggtttgactatttggtcttaactgttttcagtttacagaggttaatttttgagaagtttaatttaacttttatataaattaggtatttaaagagatgttccttaaagtcataaagatccgtttttattgttaattttggttctttttttgctttccatagaatgttggctcaattaagaaacatcagggagataaattcaacccagtggtaagtaacttcaatttcttttggtagaaagttttcagcagccagttgcagtggcacatgcctctaatcccagcactttgggaggtcagtgcaggagtttgagaccagcctgggtaacatggcgaaacccccatctctgtagaaattacaaaaattagccaggcatggtggctggtggcatggtagtacccttgggaggctgaggtgggaggatcgcttgagcctgggagatcgaggctgcagtgagccaagatcgcaccactgcactccagcctgggcaacagagtgtgaccctgtttcc

SEQ ID NO: 433199 - DNA, 323 bp, Homo sapiens
tttttttttttttcggcggagatcctcgttggggctgggaaactcctgcaaaactcgagaccaggaagccagcccgcaccccaacccccaccaaagccacctactcttcttctgtgggaggccagtccacatccgctctcacccgagagagatattcagctggatccaaagtgactgatgaagggaaggaaatcatgtcaagcgaagccttgaaaaagctgccctgagacggtgtcccgccgaaagtctttcagctcacagcaggatgctaatccatgaaggtgacctcgcagtactggttaattaagctttattgctcactg

SEQ ID NO: 433200 - DNA, 7589 bp, Homo sapiens
tttttttttttttcggcggagatcctcgttggggctgggaaactcctgcaaaactcgagaccaggaagccagcccgcaccccaacccccaccaaagccacctactcttcttctgtgggaggccagtccacatccgctctcacccgagagagatattcagctggatccaaagtgactgatgaagggaaggaaatcatgtcaagcgaagccttgaaaaagctgccctgagacggtgtcccgccgaaagaatgttggctcaattaagaaacatcagggagataaattcaacccagtgtgtctaaaaatgactacaaaacgaagtttgtttgtgcggttggtaccatgtcgctgtctacgaggggaagaggagactgtcactactcttgattattctcattgcagcttagaacaagttccgaaagagatttttacttttgaaaaaaccttggaggaactctatttagatgctaatcagattgaagagcttccaaagcaactttttaactgtcagtctttacacaaactgagtttgccagacaatgatttaacaacgttaccagcatccattgcaaaccttattaatctcagggaactggatgtcagcaagaatggaatacaggagtttccagaaaatataaaaaattgtaaagttttgacaattgtggaggccagtgtaaaccctatttccaagctccctgatggattttctcagctgttaaacctaacccagttgtatctgaatgatgcttttcttgagttcttgccagcaaattttggcagattaactaaactccaaatattagagcttagagaaaaccagttaaaaatgttgcctaaaactatgaatagactgacccagctggaaagattggatttgggaagtaacgaattcacggaagtgcctgaagtacttgagcaactaagtggattgaaagagttttggatggatgctaatagactgacttttattccagggtttattggtagtttgaaacagctcacatatttggatgtttctaaaaataatattgaaatggttgaagaaggaatttcaacatgtgaaaaccttcaagacctcctattatcaagcaattcacttcagcagcttcctgagactattggttcgttgaagaatataacaacgcttaaaatagatgaaaaccagttaatgtatctgccagactctataggagggttaatatcagtagaagaactggattgtagtttcaatgaagttgaagctttgccttcatctattgggcagcttactaacttaagaacttttgctgctgatcataattacttacagcagttgcccccagagattggaagctggaaaaatataactgtgctgtttctccattccaataaacttgagacacttccagaggaaatgggtgatatgcaaaaattaaaagtcattaatttaagtgataatagattaaagaatttaccctttagctttacaaagctacagcaattgacagctatgtggctctcagataatcagtccaaacccctgatacctcttcaaaaagaaactgattcagagacccagaaaatggtgcttaccaactacatgttccctcaacagccaaggactgaggatgttatgtttatatcagataatgaaagttttaacccttcattgtgggaggaacagaggaaacagcgggctcaagttgcatttgaatgtgatgaagacaaagatgaaagggaggcacctcccagggagggaaatttaaaaagatatccaacaccatacccagatgagcttaagaatatggtcaaaactgttcaaaccattgtacatagattaaaagatgaagagaccaatgaagactcaggaagagatttgaaaccacatgaagatcaacaagatataaataaagatgtgggtgtgaagacctcagaaagtactactacagtaaaaagcaaagttgatgaaagagaaaaatatatgataggaaactctgtacagaagatcagtgaacctgaagctgagattagtcctgggagtttaccagtgactgcaaatatgaaagcctctgagaacttgaagcatattgttaaccatgatgatgtttttgaggaatctgaagaactttcttctgatgaagagatgaaaatggcggagatgcgaccaccattaattgaaacctctattaaccagccaaaagtcgtagcacttagtaataacaaaaaagatgatacaaaggaaacagattctttatcagatgaagttacacacaatagcaatcagaataacagcaattgttcttctccatctcggatgtctgattcagtttctcttaatactgatagtagtcaagacacctcactctgctctccagtgaaacaaactcatattgatattaattccaaaatcaggcaagaagatgaaaattttaacagccttttacaaaatggagatattttaaacagttcaacagaggaaaagttcaaagctcatgataaaaaagattttaacttacctgaatatgatttgaatgttgaagagcgattagttctaattgagaaaagtgttgactcaacagccacagctgatgacactcacaaattagatcatatcaatatgaatcttaataaacttataactaatgatacatttcaaccagagatcatggaaagatcaaaaacacaggatattgtgcttggaacaagctttttaagcattaattctaaagaggaaactgagcacttggaaaatggaaacaagtatcctaatttggaatccgtaaataaggtaaatggacattctgaggaaacttcccagtctcctaataggactgaaccacatgacagtgattgttctgttgacttaggtatttccaaaagcactgaagatctctcccctcagaaaagtggtccagttggatctgttgtgaaatctcatagcataactaatatggagattggagggctaaaaatctatgatattcttagtgataatggacctcagcagccaagtacaaccgttaaaatcacatctgctgttgatggaaaaaatatagtcaggagcaagtctgccacactgttgtatgatcaaccattgcaggtatttactggttcttcctcatcttctgatttaatatcaggaacaaaggcaattttcaagtttgattcaaatcataatcccgaagagccaaatataataagaggccccacaagtggcccacaatctgcacctcaaatatatggtcctccacagtataatatccaatacagtagcagtgctgcagtcaaagacactttgtggcactccaaacaaaatccccaaatagaccatgccagttttcctcctcagctccttcctagatcagagagcacagaaaatcaaagttatgctaaacattctgccaatatgaatttctctaatcataacaatgttcgagctaatactgcataccatttacatcagagacttggcccagcaagacatggggaaatgtgggccatctcaccaaacgaccgacttattcctgcagtaactcgaagtacaatccagcgacaaagtagtgtgtcctccacagcctctgtaaatcttggtgatccaggctctacaaggcgggctcagattcctgaaggagattatttatcatacagagagttccactcagcgggaagaactcctccaatgatgccaggatcacagagacccctttctgcacgaacatacagcatagatggtccaaatgcatcaagacctcagagtgctcgaccctctattaatgaaataccagagagaactatgtcagttagtgatttcaattattcacggactagtccttcaaaaagaccaaatgcaagggttggttctgagcattctttattagatcctccaggaaaaagtaaagttcctcgtgactggagagaacaagtacttcgacatattgaagccaaaaagttagaaaagatgcctttgagtaatggacagatgggccagcctctcaggcctcaggcaaattatagtcaaatacatcacccccctcaggcatctgtggcaaggcatccctctagagaacaactaattgattacttgatgctgaaagtggcccaccagcctccatatacacagccccattgttctcctagacaaggccatgaactggcaaaacaagagattcgagtgagggttgaaaaggatccagaacttggatttagcatatcaggtggtgtcgggggtagaggaaacccattcagacctgatgatgatggtatatttgtaacaagggtacaacctgaaggaccagcatcaaaattactgcagccaggtgataaaattattcaggctaatggctacagttttataaatattgaacatggacaagcagtgtccttgctaaaaactttccagaatacagttgaactcatcattgtacgagaagtttcctcataagcactgtggacaaaaaaagcggggaagacagcaagatttattggaagatacttacaggggaaattaatattttgactatttttatatataaagaagaactcaaaaaattatgttcaaatttgtacattaatgaaataatggataaaggagactgttgaattcataccatataaaacttgttaggtttttaaacatagcaatcaaggctacaaaaacaaacctgtgttgtttttgtatagattgtaggtttatttttggatttcatatacatgactgaactgtgtgcaaggcaatagttagccttgattttagcccagagacagatggcagagctatctctctcatagcttttatgcccttatttttattcaactggtattaatgtttttctcctgaaactactttttttgatgtgggcaagagatttgaagtgttggcttttgctatgtgcatattgaattgaagagtgagtaggtgaaggtggtgctggtgggttcactttccaaggccagactaaaacagttattttctataaaaatctggaagcaaagaatggggatggggagagctacgtggtagtatgtttttattaggagaataatgcaataaaatatgtaatgtcttttttataaagcaaaaaagacaataattgcatttatgagctcggcaggatctgttcttgtcatagccattgactatacatttgctactggtgattcagtttttaattttttagtcacaggaaatttttaactctactgtagatgcatgtccatgcattttctgtgttatggaaatccactgatttttttttttttttcaaatggtggtacttgcaatctgttttataattagtgctccatttaaatctaatttataatttttattttaagcagcaaatgaaacaaaaatggccagttttaagattgtgttgcctgtaacacaaaatgttacgaaggtttaggaaagcctctttgatttttgtttggccttgcattgccttggtaaagtaaaaggaaacagtacacttggagctaggaaaccaaagcaagctttgtgaaactggcacagtgatagagaattgctgtggagagttatagagcaaagggatgggtccttgaggcctgccagtgtgtaaaggtgttcaaataaagggctgtttctacaggtaacattaaatgtgaactcaacacttccagagtctttaaagggtttctatgtgtatcagtgtaatagtgttttaccaccaactgcctttctttgttcctagttactgtaacaaatatttgatgatagaggtttattaattttgtttatccagaccattaattttatttgtttttgttctatgtaatcaaataaaatttgagtaacatgtaatggtaaggattaatgcatggttatttggaccagaaaaaagtgccatagaagaccaataactgtttagttgaggctagtctggaacctttcattagagcaatatttggttattgcacttcatttttatttactaagaaatgcaatttgggaatttttaatctgttatgctttgtttatcaaccttgattttaattaagacttttataagactagcttaaaacaccaaccaacattatttttgcaaaagtgagttggactcactttccattcttgctagtcagagtaagtaggcagcacttttaaaaatatgtgaactcaaatattgcacttctttcaagatgttatcaattggttattgtactgtatagttttaataattttgattgaaaccctttaacaactctttgtaaattttaactcattttagttgattttcagtactatttacataggaattgatttttatggatatagtagaagaaatgtgctgtattttgataaaattcacttattgtatgtgtgttgtaatctaaaaaaaaaaagaatgacaaacagcttctttaaaaaaaaactcggtgttccctttattcttagtttgtttttaaatattaatttgggcattctaaaatagctaacatttcttttattgatttcagattttcacaggcacattctacttttaatcagaaatatatttaataagtataattgtgaagttttcaactactttaccttgaaccacatataccaattataattttggaaaaggaattaagcctcacggaacaatggatcttcagcaaaccttaacttcattgtctgcacattacattgaagtattataaatgcaacagatgttatatgcactggcattttatcctactctagttagttaaaattttatagtattcttgcaacacataaagttgcgtaagaaactttaccaagaggagtattatagccaagttttctttgaaagtattggaaaactaaaattaaatgacaaggactttgaattagaattttgctgtaataaagtttcaaaatttgaataaaataattaaattttttgaaaaaaaaaaaataaaaaaaataaaagaaaataaaaaaataataaaataataaaagataaaaaaaaataacaataaaaagaaaaaaaaaaaaaaatgaacacaaaacaagaagacgtcgaacgaacaaagacacaaaacactagaaagataagacgaaaagtagaaaaacaagagaagggacagaaatcaacagaaacgtacaaaaaacagacaatcagaacccagaacaaaatcaacagaatcaaaagaagagagatccagaggcaatcagaagcaacacaacaaagaaacaacacacaaccaaaggaacgcacgaacatcacaaacaaacgaacgctaaaagaacatatcaaactccaacacgcaacaaataagcagcaggtacaaaggcacacaaaaaactaggcacaaaccgcacgacattaagatacagactgaaaaagacacaggccatgagcatgtagccggcgaagcacatccagcacagccacaccgggccaacaagaaaacacaaacaggaatgcaaaacaaacaggagagcaagaaagaacaacaggaaagcagacagacacagaacaaaaatacacagagacaaaacgacagcaccacaccaaccactgacagaacaactacacacaaaaagacgaaaaccaaacaccaacaacacacaacagagagacaaacgagaaccaaaaacaaaacatcaagacacaacaa

SEQ ID NO: 433201 - DNA, 7626 bp, Homo sapiens
tttttttttttttcggcggagatcctcgttggggctgggaaactcctgcaaaactcgagaccaggaagccagcccgcaccccaacccccaccaaagccacctactcttcttctgtgggaggccagtccacatccgctctcacccgagagagatattcagctggatccaaagtgactgatgaagggaaggaaatcatgtcaagcgaagccttgaaaaagctgccctgagacggtgtcccgccgaaagaatgttggctcaattaagaaacatcagggagataaattcaacccagtgtgtctaaaaatgactacaaaacgaagtttgtttgtgcggttggtaccatgtcgctgtctacgaggggaagaggagactgtcactactcttgattattctcattgcagcttagaacaagttccgaaagagatttttacttttgaaaaaaccttggaggaactctatttagatgctaatcagattgaagagcttccaaagcaactttttaactgtcagtctttacacaaactgagtttgccagacaatgatttaacaacgttaccagcatccattgcaaaccttattaatctcagggaactggatgtcagcaagaatggaatacaggagtttccagaaaatataaaaaattgtaaagttttgacaattgtggaggccagtgtaaaccctatttccaagctccctgatggattttctcagctgttaaacctaacccagttgtatctgaatgatgcttttcttgagttcttgccagcaaattttggcagattaactaaactccaaatattagagcttagagaaaaccagttaaaaatgttgcctaaaactatgaatagactgacccagctggaaagattggatttgggaagtaacgaattcacggaagtgcctgaagtacttgagcaactaagtggattgaaagagttttggatggatgctaatagactgacttttattccagggtttattggtagtttgaaacagctcacatatttggatgtttctaaaaataatattgaaatggttgaagaaggaatttcaacatgtgaaaaccttcaagacctcctattatcaagcaattcacttcagcagcttcctgagactattggttcgttgaagaatataacaacgcttaaaatagatgaaaaccagttaatgtatctgccagactctataggagggttaatatcagtagaagaactggattgtagtttcaatgaagttgaagctttgccttcatctattgggcagcttactaacttaagaacttttgctgctgatcataattacttacagcagttgcccccagagattggaagctggaaaaatataactgtgctgtttctccattccaataaacttgagacacttccagaggaaatgggtgatatgcaaaaattaaaagtcattaatttaagtgataatagattaaagaatttaccctttagctttacaaagctacagcaattgacagctatgtggctctcagataatcagtccaaacccctgatacctcttcaaaaagaaactgattcagagacccagaaaatggtgcttaccaactacatgttccctcaacagccaaggactgaggatgttatgtttatatcagataatgaaagttttaacccttcattgtgggaggaacagaggaaacagcgggctcaagttgcatttgaatgtgatgaagacaaagatgaaagggaggcacctcccagggagggaaatttaaaaagatatccaacaccatacccagatgagcttaagaatatggtcaaaactgttcaaaccattgtacatagattaaaagatgaagagaccaatgaagactcaggaagagatttgaaaccacatgaagatcaacaagatataaataaagatgtgggtgtgaagacctcagaaagtactactacagtaaaaagcaaagttgatgaaagagaaaaatatatgataggaaactctgtacagaagatcagtgaacctgaagctgagattagtcctgggagtttaccagtgactgcaaatatgaaagcctctgagaacttgaagcatattgttaaccatgatgatgtttttgaggaatctgaagaactttcttctgatgaagagatgaaaatggcggagatgcgaccaccattaattgaaacctctattaaccagccaaaagtcgtagcacttagtaataacaaaaaagatgatacaaaggaaacagattctttatcagatgaagttacacacaatagcaatcagaataacagcaattgttcttctccatctcggatgtctgattcagtttctcttaatactgatagtagtcaagacacctcactctgctctccagtgaaacaaactcatattgatattaattccaaaatcaggcaagaagatgaaaattttaacagccttttacaaaatggagatattttaaacagttcaacagaggaaaagttcaaagctcatgataaaaaagattttaacttacctgaatatgatttgaatgttgaagagcgattagttctaattgagaaaagtgttgactcaacagccacagctgatgacactcacaaattagatcatatcaatatgaatcttaataaacttataactaatgatacatttcaaccagagatcatggaaagatcaaaaacacaggatattgtgcttggaacaagctttttaagcattaattctaaagaggaaactgagcacttggaaaatggaaacaagtatcctaatttggaatccgtaaataaggtaaatggacattctgaggaaacttcccagtctcctaataggactgaaccacatgacagtgattgttctgttgacttaggtatttccaaaagcactgaagatctctcccctcagaaaagtggtccagttggatctgttgtgaaatctcatagcataactaatatggagattggagggctaaaaatctatgatattcttagtgataatggacctcagcagccaagtacaaccgttaaaatcacatctgctgttgatggaaaaaatatagtcaggagcaagtctgccacactgttgtatgatcaaccattgcaggtatttactggttcttcctcatcttctgatttaatatcaggaacaaaggcaattttcaagtttgattcaaatcataatcccgaagagccaaatataataagaggccccacaagtggcccacaatctgcacctcaaatatatggtcctccacagtataatatccaatacagtagcagtgctgcagtcaaagacactttgtggcactccaaacaaaatccccaaatagaccatgccagttttcctcctcagctccttcctagatcagagagcacagaaaatcaaagttatgctaaacattctgccaatatgaatttctctaatcataacaatgttcgagctaatactgcataccatttacatcagagacttggcccagcaagacatggggaaatgtgggccatctcaccaaacgaccgacttattcctgcagtaactcgaagtacaatccagcgacaaagtagtgtgtcctccacagcctctgtaaatcttggtgatccaggctctacaaggcgggctcagattcctgaaggagattatttatcatacagagagttccactcagcgggaagaactcctccaatgatgccaggatcacagagacccctttctgcacgaacatacagcatagatggtccaaatgcatcaagacctcagagtgctcgaccctctattaatgaaataccagagagaactatgtcagttagtgatttcaattattcacggactagtccttcaaaaagaccaaatgcaagggttggttctgagcattctttattagatcctccaggaaaaagtaaagttcctcgtgactggagagaacaagtacttcgacatattgaagccaaaaagttagaaaagatgcctttgagtaatggacagatgggccagcctctcaggcctcaggcaaattatagtcaaatacatcacccccctcaggcatctgtggcaaggcatccctctagagaacaactaattgattacttgatgctgaaagtggcccaccagcctccatatacacagccccattgttctcctagacaaggccatgaactggcaaaacaagagattcgagtgagggttgaaaaggatccagaacttggatttagcatatcaggtggtgtcgggggtagaggaaacccattcagacctgatgatgatggtatatttgtaacaagggtacaacctgaaggaccagcatcaaaattactgcagccaggtgataaaattattcaggctaatggctacagttttataaatattgaacatggacaagcagtgtccttgctaaaaactttccagaatacagttgaactcatcattgtacgagaagtttcctcataagcactgtggacaaaaaaagcggggaagacagcaagatttattggaagatacttacaggggaaattaatattttgactatttttatatataaagaagaactcaaaaaattatgttcaaatttgtacattaatgaaataatggaacttgtggttagagggaaagaaccactgtacagaatataaaggagactgttgaattcataccatataaaacttgttaggtttttaaacatagcaatcaaggctacaaaaacaaacctgtgttgtttttgtatagattgtaggtttatttttggatttcatatacatgactgaactgtgtgcaaggcaatagttagccttgattttagcccagagacagatggcagagctatctctctcatagcttttatgcccttatttttattcaactggtattaatgtttttctcctgaaactactttttttgatgtgggcaagagatttgaagtgttggcttttgctatgtgcatattgaattgaagagtgagtaggtgaaggtggtgctggtgggttcactttccaaggccagactaaaacagttattttctataaaaatctggaagcaaagaatggggatggggagagctacgtggtagtatgtttttattaggagaataatgcaataaaatatgtaatgtcttttttataaagcaaaaaagacaataattgcatttatgagctcggcaggatctgttcttgtcatagccattgactatacatttgctactggtgattcagtttttaattttttagtcacaggaaatttttaactctactgtagatgcatgtccatgcattttctgtgttatggaaatccactgatttttttttttttttcaaatggtggtacttgcaatctgttttataattagtgctccatttaaatctaatttataatttttattttaagcagcaaatgaaacaaaaatggccagttttaagattgtgttgcctgtaacacaaaatgttacgaaggtttaggaaagcctctttgatttttgtttggccttgcattgccttggtaaagtaaaaggaaacagtacacttggagctaggaaaccaaagcaagctttgtgaaactggcacagtgatagagaattgctgtggagagttatagagcaaagggatgggtccttgaggcctgccagtgtgtaaaggtgttcaaataaagggctgtttctacaggtaacattaaatgtgaactcaacacttccagagtctttaaagggtttctatgtgtatcagtgtaatagtgttttaccaccaactgcctttctttgttcctagttactgtaacaaatatttgatgatagaggtttattaattttgtttatccagaccattaattttatttgtttttgttctatgtaatcaaataaaatttgagtaacatgtaatggtaaggattaatgcatggttatttggaccagaaaaaagtgccatagaagaccaataactgtttagttgaggctagtctggaacctttcattagagcaatatttggttattgcacttcatttttatttactaagaaatgcaatttgggaatttttaatctgttatgctttgtttatcaaccttgattttaattaagacttttataagactagcttaaaacaccaaccaacattatttttgcaaaagtgagttggactcactttccattcttgctagtcagagtaagtaggcagcacttttaaaaatatgtgaactcaaatattgcacttctttcaagatgttatcaattggttattgtactgtatagttttaataattttgattgaaaccctttaacaactctttgtaaattttaactcattttagttgattttcagtactatttacataggaattgatttttatggatatagtagaagaaatgtgctgtattttgataaaattcacttattgtatgtgtgttgtaatctaaaaaaaaaaagaatgacaaacagcttctttaaaaaaaaactcggtgttccctttattcttagtttgtttttaaatattaatttgggcattctaaaatagctaacatttcttttattgatttcagattttcacaggcacattctacttttaatcagaaatatatttaataagtataattgtgaagttttcaactactttaccttgaaccacatataccaattataattttggaaaaggaattaagcctcacggaacaatggatcttcagcaaaccttaacttcattgtctgcacattacattgaagtattataaatgcaacagatgttatatgcactggcattttatcctactctagttagttaaaattttatagtattcttgcaacacataaagttgcgtaagaaactttaccaagaggagtattatagccaagttttctttgaaagtattggaaaactaaaattaaatgacaaggactttgaattagaattttgctgtaataaagtttcaaaatttgaataaaataattaaattttttgaaaaaaaaaaaataaaaaaaataaaagaaaataaaaaaataataaaataataaaagataaaaaaaaataacaataaaaagaaaaaaaaaaaaaaatgaacacaaaacaagaagacgtcgaacgaacaaagacacaaaacactagaaagataagacgaaaagtagaaaaacaagagaagggacagaaatcaacagaaacgtacaaaaaacagacaatcagaacccagaacaaaatcaacagaatcaaaagaagagagatccagaggcaatcagaagcaacacaacaaagaaacaacacacaaccaaaggaacgcacgaacatcacaaacaaacgaacgctaaaagaacatatcaaactccaacacgcaacaaataagcagcaggtacaaaggcacacaaaaaactaggcacaaaccgcacgacattaagatacagactgaaaaagacacaggccatgagcatgtagccggcgaagcacatccagcacagccacaccgggccaacaagaaaacacaaacaggaatgcaaaacaaacaggagagcaagaaagaacaacaggaaagcagacagacacagaacaaaaatacacagagacaaaacgacagcaccacaccaaccactgacagaacaactacacacaaaaagacgaaaaccaaacaccaacaacacacaacagagagacaaacgagaaccaaaaacaaaacatcaagacacaacaa

SEQ ID NO: 433202 - DNA, 8173 bp, Homo sapiens
taccaagaaatccagaaatagagaatagttagcattaattcagcattaattgcttagcaatgctgtttgaaaccccagcttgttttgtttttttcctctgtcagtcttatttattggctggttattaatcctcatccttgttgacttacggtaataggatggttgttgcagcactagatactgtgtacacatacgaggctagaaaaatgggagagtggtggtgtcagatgtatttgctcccttttatcaggaaagcaaatgtttttccagaattaaccggcaactttgggagactgaggtgggagaatcgcttaaggccaggagttcaagaccagcatggccaacatagtgagaccctgtctctaaaaaagtttttttaaaattagctgcgtatggtggtatacacctgtagtcctagcttctcaggaggctgaggtgggaggattgattgtgcccaggagtttgaggccgcagtcagtcatgtttgtgccattgggctgcagtctaggtgacagagtgagacccagtctcttaaaaaaaaaaaaagctagtcatttatttagaagctggtaaatatgtgtgtgtgtgtgtgtgcatacacttgtgtgtgcgtttttaagaggctaatattttggtttgactatttggtcttaactgttttcagtttacagaggttaatttttgagaagtttaatttaacttttatataaattaggtatttaaagagatgttccttaaagtcataaagatccgtttttattgttaattttggttctttttttgctttccatagaatgttggctcaattaagaaacatcagggagataaattcaacccagtgtgtctaaaaatgactacaaaacgaagtttgtttgtgcggttggtaccatgtcgctgtctacgaggggaagaggagactgtcactactcttgattattctcattgcagcttagaacaagttccgaaagagatttttacttttgaaaaaaccttggaggaactctatttagatgctaatcagattgaagagcttccaaagcaactttttaactgtcagtctttacacaaactgagtttgccagacaatgatttaacaacgttaccagcatccattgcaaaccttattaatctcagggaactggatgtcagcaagaatggaatacaggagtttccagaaaatataaaaaattgtaaagttttgacaattgtggaggccagtgtaaaccctatttccaagctccctgatggattttctcagctgttaaacctaacccagttgtatctgaatgatgcttttcttgagttcttgccagcaaattttggcagattaactaaactccaaatattagagcttagagaaaaccagttaaaaatgttgcctaaaactatgaatagactgacccagctggaaagattggatttgggaagtaacgaattcacggaagtgcctgaagtacttgagcaactaagtggattgaaagagttttggatggatgctaatagactgacttttattccagggtttattggtagtttgaaacagctcacatatttggatgtttctaaaaataatattgaaatggttgaagaaggaatttcaacatgtgaaaaccttcaagacctcctattatcaagcaattcacttcagcagcttcctgagactattggttcgttgaagaatataacaacgcttaaaatagatgaaaaccagttaatgtatctgccagactctataggagggttaatatcagtagaagaactggattgtagtttcaatgaagttgaagctttgccttcatctattgggcagcttactaacttaagaacttttgctgctgatcataattacttacagcagttgcccccagagattggaagctggaaaaatataactgtgctgtttctccattccaataaacttgagacacttccagaggaaatgggtgatatgcaaaaattaaaagtcattaatttaagtgataatagattaaagaatttaccctttagctttacaaagctacagcaattgacagctatgtggctctcagataatcagtccaaacccctgatacctcttcaaaaagaaactgattcagagacccagaaaatggtgcttaccaactacatgttccctcaacagccaaggactgaggatgttatgtttatatcagataatgaaagttttaacccttcattgtgggaggaacagaggaaacagcgggctcaagttgcatttgaatgtgatgaagacaaagatgaaagggaggcacctcccagggagggaaatttaaaaagatatccaacaccatacccagatgagcttaagaatatggtcaaaactgttcaaaccattgtacatagattaaaagatgaagagaccaatgaagactcaggaagagatttgaaaccacatgaagatcaacaagatataaataaagatgtgggtgtgaagacctcagaaagtactactacagtaaaaagcaaagttgatgaaagagaaaaatatatgataggaaactctgtacagaagatcagtgaacctgaagctgagattagtcctgggagtttaccagtgactgcaaatatgaaagcctctgagaacttgaagcatattgttaaccatgatgatgtttttgaggaatctgaagaactttcttctgatgaagagatgaaaatggcggagatgcgaccaccattaattgaaacctctattaaccagccaaaagtcgtagcacttagtaataacaaaaaagatgatacaaaggaaacagattctttatcagatgaagttacacacaatagcaatcagaataacagcaattgttcttctccatctcggatgtctgattcagtttctcttaatactgatagtagtcaagacacctcactctgctctccagtgaaacaaactcatattgatattaattccaaaatcaggcaagaagatgaaaattttaacagccttttacaaaatggagatattttaaacagttcaacagaggaaaagttcaaagctcatgataaaaaagattttaacttacctgaatatgatttgaatgttgaagagcgattagttctaattgagaaaagtgttgactcaacagccacagctgatgacactcacaaattagatcatatcaatatgaatcttaataaacttataactaatgatacatttcaaccagagatcatggaaagatcaaaaacacaggatattgtgcttggaacaagctttttaagcattaattctaaagaggaaactgagcacttggaaaatggaaacaagtatcctaatttggaatccgtaaataaggtaaatggacattctgaggaaacttcccagtctcctaataggactgaaccacatgacagtgattgttctgttgacttaggtatttccaaaagcactgaagatctctcccctcagaaaagtggtccagttggatctgttgtgaaatctcatagcataactaatatggagattggagggctaaaaatctatgatattcttagtgataatggacctcagcagccaagtacaaccgttaaaatcacatctgctgttgatggaaaaaatatagtcaggagcaagtctgccacactgttgtatgatcaaccattgcaggtatttactggttcttcctcatcttctgatttaatatcaggaacaaaggcaattttcaagtttgattcaaatcataatcccgaagagccaaatataataagaggccccacaagtggcccacaatctgcacctcaaatatatggtcctccacagtataatatccaatacagtagcagtgctgcagtcaaagacactttgtggcactccaaacaaaatccccaaatagaccatgccagttttcctcctcagctccttcctagatcagagagcacagaaaatcaaagttatgctaaacattctgccaatatgaatttctctaatcataacaatgttcgagctaatactgcataccatttacatcagagacttggcccagcaagacatggggaaatgtgggccatctcaccaaacgaccgacttattcctgcagtaactcgaagtacaatccagcgacaaagtagtgtgtcctccacagcctctgtaaatcttggtgatccaggctctacaaggcgggctcagattcctgaaggagattatttatcatacagagagttccactcagcgggaagaactcctccaatgatgccaggatcacagagacccctttctgcacgaacatacagcatagatggtccaaatgcatcaagacctcagagtgctcgaccctctattaatgaaataccagagagaactatgtcagttagtgatttcaattattcacggactagtccttcaaaaagaccaaatgcaagggttggttctgagcattctttattagatcctccaggaaaaagtaaagttcctcgtgactggagagaacaagtacttcgacatattgaagccaaaaagttagaaaagatgcctttgagtaatggacagatgggccagcctctcaggcctcaggcaaattatagtcaaatacatcacccccctcaggcatctgtggcaaggcatccctctagagaacaactaattgattacttgatgctgaaagtggcccaccagcctccatatacacagccccattgttctcctagacaaggccatgaactggcaaaacaagagattcgagtgagggttgaaaaggatccagaacttggatttagcatatcaggtggtgtcgggggtagaggaaacccattcagacctgatgatgatggtatatttgtaacaagggtacaacctgaaggaccagcatcaaaattactgcagccaggtgataaaattattcaggctaatggctacagttttataaatattgaacatggacaagcagtgtccttgctaaaaactttccagaatacagttgaactcatcattgtacgagaagtttcctcataagcactgtggacaaaaaaagcggggaagacagcaagatttattggaagatacttacaggggaaattaatattttgactatttttatatataaagaagaactcaaaaaattatgttcaaatttgtacattaatgaaataatggaacttgtggttagagggaaagaaccactgtacagaatataaaggagactgttgaattcataccatataaaacttgttaggtttttaaacatagcaatcaaggctacaaaaacaaacctgtgttgtttttgtatagattgtaggtttatttttggatttcatatacatgactgaactgtgtgcaaggcaatagttagccttgattttagcccagagacagatggcagagctatctctctcatagcttttatgcccttatttttattcaactggtattaatgtttttctcctgaaactactttttttgatgtgggcaagagatttgaagtgttggcttttgctatgtgcatattgaattgaagagtgagtaggtgaaggtggtgctggtgggttcactttccaaggccagactaaaacagttattttctataaaaatctggaagcaaagaatggggatggggagagctacgtggtagtatgtttttattaggagaataatgcaataaaatatgtaatgtcttttttataaagcaaaaaagacaataattgcatttatgagctcggcaggatctgttcttgtcatagccattgactatacatttgctactggtgattcagtttttaattttttagtcacaggaaatttttaactctactgtagatgcatgtccatgcattttctgtgttatggaaatccactgatttttttttttttttcaaatggtggtacttgcaatctgttttataattagtgctccatttaaatctaatttataatttttattttaagcagcaaatgaaacaaaaatggccagttttaagattgtgttgcctgtaacacaaaatgttacgaaggtttaggaaagcctctttgatttttgtttggccttgcattgccttggtaaagtaaaaggaaacagtacacttggagctaggaaaccaaagcaagctttgtgaaactggcacagtgatagagaattgctgtggagagttatagagcaaagggatgggtccttgaggcctgccagtgtgtaaaggtgttcaaataaagggctgtttctacaggtaacattaaatgtgaactcaacacttccagagtctttaaagggtttctatgtgtatcagtgtaatagtgttttaccaccaactgcctttctttgttcctagttactgtaacaaatatttgatgatagaggtttattaattttgtttatccagaccattaattttatttgtttttgttctatgtaatcaaataaaatttgagtaacatgtaatggtaaggattaatgcatggttatttggaccagaaaaaagtgccatagaagaccaataactgtttagttgaggctagtctggaacctttcattagagcaatatttggttattgcacttcatttttatttactaagaaatgcaatttgggaatttttaatctgttatgctttgtttatcaaccttgattttaattaagacttttataagactagcttaaaacaccaaccaacattatttttgcaaaagtgagttggactcactttccattcttgctagtcagagtaagtaggcagcacttttaaaaatatgtgaactcaaatattgcacttctttcaagatgttatcaattggttattgtactgtatagttttaataattttgattgaaaccctttaacaactctttgtaaattttaactcattttagttgattttcagtactatttacataggaattgatttttatggatatagtagaagaaatgtgctgtattttgataaaattcacttattgtatgtgtgttgtaatctaaaaaaaaaaagaatgacaaacagcttctttaaaaaaaaactcggtgttccctttattcttagtttgtttttaaatattaatttgggcattctaaaatagctaacatttcttttattgatttcagattttcacaggcacattctacttttaatcagaaatatatttaataagtataattgtgaagttttcaactactttaccttgaaccacatataccaattataattttggaaaaggaattaagcctcacggaacaatggatcttcagcaaaccttaacttcattgtctgcacattacattgaagtattataaatgcaacagatgttatatgcactggcattttatcctactctagttagttaaaattttatagtattcttgcaacacataaagttgcgtaagaaactttaccaagaggagtattatagccaagttttctttgaaagtattggaaaactaaaattaaatgacaaggactttgaattagaattttgctgtaataaagtttcaaaatttgaataaaataattaaattttttgaaaaaaaaaaaataaaaaaaataaaagaaaataaaaaaataataaaataataaaagataaaaaaaaataacaataaaaagaaaaaaaaaaaaaaatgaacacaaaacaagaagacgtcgaacgaacaaagacacaaaacactagaaagataagacgaaaagtagaaaaacaagagaagggacagaaatcaacagaaacgtacaaaaaacagacaatcagaacccagaacaaaatcaacagaatcaaaagaagagagatccagaggcaatcagaagcaacacaacaaagaaacaacacacaaccaaaggaacgcacgaacatcacaaacaaacgaacgctaaaagaacatatcaaactccaacacgcaacaaataagcagcaggtacaaaggcacacaaaaaactaggcacaaaccgcacgacattaagatacagactgaaaaagacacaggccatgagcatgtagccggcgaagcacatccagcacagccacaccgggccaacaagaaaacacaaacaggaatgcaaaacaaacaggagagcaagaaagaacaacaggaaagcagacagacacagaacaaaaatacacagagacaaaacgacagcaccacaccaaccactgacagaacaactacacacaaaaagacgaaaaccaaacaccaacaacacacaacagagagacaaacgagaaccaaaaacaaaacatcaagacacaacaa

SEQ ID NO: 433203 - DNA, 9186 bp, Homo sapiens
  misc_feature (612)..(612): n is a, c, g, or t
taccaagaaatccagaaatagagaatagttagcattaattcagcattaattgcttagcaatgctgtttgaaaccccagcttgttttgtttttttcctctgtcagtcttatttattggctggttattaatcctcatccttgttgacttacggtaataggatggttgttgcagcactagatactgtgtacacatacgaggctagaaaaatgggagagtggtggtgtcagatgtatttgctcccttttatcaggaaagcaaatgtttttccagaattaaccggcacttcacccccaaagcagacttcagaatataagtctttgattttcactgtgttacccatttcttgtttacccctccaggcatggaaagctcaaaagtggtaattgagctgggccccttactgccctgaatagtctagagtcttgaaaggaaggccaggtcacacctgtaaacccagcactttgggaggctgaattgagtgggaggattgctgagccaggagtttgagaccagcttgggcaacatagtgagagactgtctacacacacacacacacacacacacacacgaaaaaagaaaaacaggttagctgggtgtggtggtgcacgcttntagtcccagccactcaagaggctaaggcaggagaatcctttgagcccaggaggttgaggctgaagtgagccgtgattgtgccactgcattccagcctgggtgacagagcaagaccctgtctcaaaaaaaagtccaggcgtggtggctcacgcctgttaatcccagaacttcgggaggccaaggtggttggatcacttgaggtcaggagtttgagaccagcctggccaatatggcaaaaccccgtctctctaaagagttagccaggtgttgtggtgcacacctgtaatcccacctactcggcaggctgaggcaggagaatcgcttgaacctaggaagtggaggttgcagtgagctgagattgtaccactgtactccagcctgggcaacagagtgatacgtctccaaaaaaaaaaaaaaaatcttagaagggaaaataaatcccataaacaattaacagtgcctgccacatagaactatgaaaaattactaaaatataattggccattcgagtttatttgcttggaaagttatttctcagtaagttcaaattaatggcattttaatggtaggtgaaagagtatttatataatgagggctctcaagagtttataaatgtatgaagactatccactataaagatagccatttggctgggtgcagtgtctcacgtttgtaatcccagcactttgggagactgaggtgggagaatcgcttaaggccaggagttcaagaccagcatggccaacatagtgagaccctgtctctaaaaaagtttttttaaaattagctgcgtatggtggtatacacctgtagtcctagcttctcaggaggctgaggtgggaggattgattgtgcccaggagtttgaggccgcagtcagtcatgtttgtgccattgggctgcagtctaggtgacagagtgagacccagtctcttaaaaaaaaaaaaagctagtcatttatttagaagctggtaaatatgtgtgtgtgtgtgtgtgcatacacttgtgtgtgcgtttttaagaggctaatattttggtttgactatttggtcttaactgttttcagtttacagaggttaatttttgagaagtttaatttaacttttatataaattaggtatttaaagagatgttccttaaagtcataaagatccgtttttattgttaattttggttctttttttgctttccatagaatgttggctcaattaagaaacatcagggagataaattcaacccagtgtgtctaaaaatgactacaaaacgaagtttgtttgtgcggttggtaccatgtcgctgtctacgaggggaagaggagactgtcactactcttgattattctcattgcagcttagaacaagttccgaaagagatttttacttttgaaaaaaccttggaggaactctatttagatgctaatcagattgaagagcttccaaagcaactttttaactgtcagtctttacacaaactgagtttgccagacaatgatttaacaacgttaccagcatccattgcaaaccttattaatctcagggaactggatgtcagcaagaatggaatacaggagtttccagaaaatataaaaaattgtaaagttttgacaattgtggaggccagtgtaaaccctatttccaagctccctgatggattttctcagctgttaaacctaacccagttgtatctgaatgatgcttttcttgagttcttgccagcaaattttggcagattaactaaactccaaatattagagcttagagaaaaccagttaaaaatgttgcctaaaactatgaatagactgacccagctggaaagattggatttgggaagtaacgaattcacggaagtgcctgaagtacttgagcaactaagtggattgaaagagttttggatggatgctaatagactgacttttattccagggtttattggtagtttgaaacagctcacatatttggatgtttctaaaaataatattgaaatggttgaagaaggaatttcaacatgtgaaaaccttcaagacctcctattatcaagcaattcacttcagcagcttcctgagactattggttcgttgaagaatataacaacgcttaaaatagatgaaaaccagttaatgtatctgccagactctataggagggttaatatcagtagaagaactggattgtagtttcaatgaagttgaagctttgccttcatctattgggcagcttactaacttaagaacttttgctgctgatcataattacttacagcagttgcccccagagattggaagctggaaaaatataactgtgctgtttctccattccaataaacttgagacacttccagaggaaatgggtgatatgcaaaaattaaaagtcattaatttaagtgataatagattaaagaatttaccctttagctttacaaagctacagcaattgacagctatgtggctctcagataatcagtccaaacccctgatacctcttcaaaaagaaactgattcagagacccagaaaatggtgcttaccaactacatgttccctcaacagccaaggactgaggatgttatgtttatatcagataatgaaagttttaacccttcattgtgggaggaacagaggaaacagcgggctcaagttgcatttgaatgtgatgaagacaaagatgaaagggaggcacctcccagggagggaaatttaaaaagatatccaacaccatacccagatgagcttaagaatatggtcaaaactgttcaaaccattgtacatagattaaaagatgaagagaccaatgaagactcaggaagagatttgaaaccacatgaagatcaacaagatataaataaagatgtgggtgtgaagacctcagaaagtactactacagtaaaaagcaaagttgatgaaagagaaaaatatatgataggaaactctgtacagaagatcagtgaacctgaagctgagattagtcctgggagtttaccagtgactgcaaatatgaaagcctctgagaacttgaagcatattgttaaccatgatgatgtttttgaggaatctgaagaactttcttctgatgaagagatgaaaatggcggagatgcgaccaccattaattgaaacctctattaaccagccaaaagtcgtagcacttagtaataacaaaaaagatgatacaaaggaaacagattctttatcagatgaagttacacacaatagcaatcagaataacagcaattgttcttctccatctcggatgtctgattcagtttctcttaatactgatagtagtcaagacacctcactctgctctccagtgaaacaaactcatattgatattaattccaaaatcaggcaagaagatgaaaattttaacagccttttacaaaatggagatattttaaacagttcaacagaggaaaagttcaaagctcatgataaaaaagattttaacttacctgaatatgatttgaatgttgaagagcgattagttctaattgagaaaagtgttgactcaacagccacagctgatgacactcacaaattagatcatatcaatatgaatcttaataaacttataactaatgatacatttcaaccagagatcatggaaagatcaaaaacacaggatattgtgcttggaacaagctttttaagcattaattctaaagaggaaactgagcacttggaaaatggaaacaagtatcctaatttggaatccgtaaataaggtaaatggacattctgaggaaacttcccagtctcctaataggactgaaccacatgacagtgattgttctgttgacttaggtatttccaaaagcactgaagatctctcccctcagaaaagtggtccagttggatctgttgtgaaatctcatagcataactaatatggagattggagggctaaaaatctatgatattcttagtgataatggacctcagcagccaagtacaaccgttaaaatcacatctgctgttgatggaaaaaatatagtcaggagcaagtctgccacactgttgtatgatcaaccattgcaggtatttactggttcttcctcatcttctgatttaatatcaggaacaaaggcaattttcaagtttgattcaaatcataatcccgaagagccaaatataataagaggccccacaagtggcccacaatctgcacctcaaatatatggtcctccacagtataatatccaatacagtagcagtgctgcagtcaaagacactttgtggcactccaaacaaaatccccaaatagaccatgccagttttcctcctcagctccttcctagatcagagagcacagaaaatcaaagttatgctaaacattctgccaatatgaatttctctaatcataacaatgttcgagctaatactgcataccatttacatcagagacttggcccagcaagacatggggaaatgtgggccatctcaccaaacgaccgacttattcctgcagtaactcgaagtacaatccagcgacaaagtagtgtgtcctccacagcctctgtaaatcttggtgatccaggctctacaaggcgggctcagattcctgaaggagattatttatcatacagagagttccactcagcgggaagaactcctccaatgatgccaggatcacagagacccctttctgcacgaacatacagcatagatggtccaaatgcatcaagacctcagagtgctcgaccctctattaatgaaataccagagagaactatgtcagttagtgatttcaattattcacggactagtccttcaaaaagaccaaatgcaagggttggttctgagcattctttattagatcctccaggaaaaagtaaagttcctcgtgactggagagaacaagtacttcgacatattgaagccaaaaagttagaaaagatgcctttgagtaatggacagatgggccagcctctcaggcctcaggcaaattatagtcaaatacatcacccccctcaggcatctgtggcaaggcatccctctagagaacaactaattgattacttgatgctgaaagtggcccaccagcctccatatacacagccccattgttctcctagacaaggccatgaactggcaaaacaagagattcgagtgagggttgaaaaggatccagaacttggatttagcatatcaggtggtgtcgggggtagaggaaacccattcagacctgatgatgatggtatatttgtaacaagggtacaacctgaaggaccagcatcaaaattactgcagccaggtgataaaattattcaggctaatggctacagttttataaatattgaacatggacaagcagtgtccttgctaaaaactttccagaatacagttgaactcatcattgtacgagaagtttcctcataagcactgtggacaaaaaaagcggggaagacagcaagatttattggaagatacttacaggggaaattaatattttgactatttttatatataaagaagaactcaaaaaattatgttcaaatttgtacattaatgaaataatggaacttgtggttagagggaaagaaccactgtacagaatataaaggagactgttgaattcataccatataaaacttgttaggtttttaaacatagcaatcaaggctacaaaaacaaacctgtgttgtttttgtatagattgtaggtttatttttggatttcatatacatgactgaactgtgtgcaaggcaatagttagccttgattttagcccagagacagatggcagagctatctctctcatagcttttatgcccttatttttattcaactggtattaatgtttttctcctgaaactactttttttgatgtgggcaagagatttgaagtgttggcttttgctatgtgcatattgaattgaagagtgagtaggtgaaggtggtgctggtgggttcactttccaaggccagactaaaacagttattttctataaaaatctggaagcaaagaatggggatggggagagctacgtggtagtatgtttttattaggagaataatgcaataaaatatgtaatgtcttttttataaagcaaaaaagacaataattgcatttatgagctcggcaggatctgttcttgtcatagccattgactatacatttgctactggtgattcagtttttaattttttagtcacaggaaatttttaactctactgtagatgcatgtccatgcattttctgtgttatggaaatccactgatttttttttttttttcaaatggtggtacttgcaatctgttttataattagtgctccatttaaatctaatttataatttttattttaagcagcaaatgaaacaaaaatggccagttttaagattgtgttgcctgtaacacaaaatgttacgaaggtttaggaaagcctctttgatttttgtttggccttgcattgccttggtaaagtaaaaggaaacagtacacttggagctaggaaaccaaagcaagctttgtgaaactggcacagtgatagagaattgctgtggagagttatagagcaaagggatgggtccttgaggcctgccagtgtgtaaaggtgttcaaataaagggctgtttctacaggtaacattaaatgtgaactcaacacttccagagtctttaaagggtttctatgtgtatcagtgtaatagtgttttaccaccaactgcctttctttgttcctagttactgtaacaaatatttgatgatagaggtttattaattttgtttatccagaccattaattttatttgtttttgttctatgtaatcaaataaaatttgagtaacatgtaatggtaaggattaatgcatggttatttggaccagaaaaaagtgccatagaagaccaataactgtttagttgaggctagtctggaacctttcattagagcaatatttggttattgcacttcatttttatttactaagaaatgcaatttgggaatttttaatctgttatgctttgtttatcaaccttgattttaattaagacttttataagactagcttaaaacaccaaccaacattatttttgcaaaagtgagttggactcactttccattcttgctagtcagagtaagtaggcagcacttttaaaaatatgtgaactcaaatattgcacttctttcaagatgttatcaattggttattgtactgtatagttttaataattttgattgaaaccctttaacaactctttgtaaattttaactcattttagttgattttcagtactatttacataggaattgatttttatggatatagtagaagaaatgtgctgtattttgataaaattcacttattgtatgtgtgttgtaatctaaaaaaaaaaagaatgacaaacagcttctttaaaaaaaaactcggtgttccctttattcttagtttgtttttaaatattaatttgggcattctaaaatagctaacatttcttttattgatttcagattttcacaggcacattctacttttaatcagaaatatatttaataagtataattgtgaagttttcaactactttaccttgaaccacatataccaattataattttggaaaaggaattaagcctcacggaacaatggatcttcagcaaaccttaacttcattgtctgcacattacattgaagtattataaatgcaacagatgttatatgcactggcattttatcctactctagttagttaaaattttatagtattcttgcaacacataaagttgcgtaagaaactttaccaagaggagtattatagccaagttttctttgaaagtattggaaaactaaaattaaatgacaaggactttgaattagaattttgctgtaataaagtttcaaaatttgaataaaataattaaattttttgaaaaaaaaaaaataaaaaaaataaaagaaaataaaaaaataataaaataataaaagataaaaaaaaataacaataaaaagaaaaaaaaaaaaaaatgaacacaaaacaagaagacgtcgaacgaacaaagacacaaaacactagaaagataagacgaaaagtagaaaaacaagagaagggacagaaatcaacagaaacgtacaaaaaacagacaatcagaacccagaacaaaatcaacagaatcaaaagaagagagatccagaggcaatcagaagcaacacaacaaagaaacaacacacaaccaaaggaacgcacgaacatcacaaacaaacgaacgctaaaagaacatatcaaactccaacacgcaacaaataagcagcaggtacaaaggcacacaaaaaactaggcacaaaccgcacgacattaagatacagactgaaaaagacacaggccatgagcatgtagccggcgaagcacatccagcacagccacaccgggccaacaagaaaacacaaacaggaatgcaaaacaaacaggagagcaagaaagaacaacaggaaagcagacagacacagaacaaaaatacacagagacaaaacgacagcaccacaccaaccactgacagaacaactacacacaaaaagacgaaaaccaaacaccaacaacacacaacagagagacaaacgagaaccaaaaacaaaacatcaagacacaacaa

SEQ ID NO: 433204 - DNA, 7882 bp, Homo sapiens
ttttctaagagactgggtctcactctgtcacctagactgcagcccaatggcacaaacatgactgactgcggcctccacctcccgggttcaagccattctcctgcctcagcctcccgagtagctgggactacaggtgcccacacctcgcccagctaattttttgtatttttaggagagacggggtttcactctgttagccgggatggtctcatctcctgacctcgtgttccgcctgcctcggcctcccaaagtgctgggattacaggtgtgagccactgcgcccggcctcaaagcacagtttttgaagaagcatgtaaatggctacttcatggattgctttgtgaagtactaaagagcttgagtttaatttgaaatccagtagttataaatgtgggtattaaagcaatgttaaatgggttccattgtgcttgtatagtggcaggagaagtgtttatctgtgacatatgaattgtgatagattggaatgatttgttctgaaaaaccgttgtaatatgtatgttttaaatttctttttattcgaatattgcagtgtctaaaaatgactacaaaacgaagtttgtttgtgcggttggtaccatgtcgctgtctacgaggggaagaggagactgtcactactcttgattattctcattgcagcttagaacaagttccgaaagagatttttacttttgaaaaaaccttggaggaactctatttagatgctaatcagattgaagagcttccaaagcaactttttaactgtcagtctttacacaaactgagtttgccagacaatgatttaacaacgttaccagcatccattgcaaaccttattaatctcagggaactggatgtcagcaagaatggaatacaggagtttccagaaaatataaaaaattgtaaagttttgacaattgtggaggccagtgtaaaccctatttccaagctccctgatggattttctcagctgttaaacctaacccagttgtatctgaatgatgcttttcttgagttcttgccagcaaattttggcagattaactaaactccaaatattagagcttagagaaaaccagttaaaaatgttgcctaaaactatgaatagactgacccagctggaaagattggatttgggaagtaacgaattcacggaagtgcctgaagtacttgagcaactaagtggattgaaagagttttggatggatgctaatagactgacttttattccagggtttattggtagtttgaaacagctcacatatttggatgtttctaaaaataatattgaaatggttgaagaaggaatttcaacatgtgaaaaccttcaagacctcctattatcaagcaattcacttcagcagcttcctgagactattggttcgttgaagaatataacaacgcttaaaatagatgaaaaccagttaatgtatctgccagactctataggagggttaatatcagtagaagaactggattgtagtttcaatgaagttgaagctttgccttcatctattgggcagcttactaacttaagaacttttgctgctgatcataattacttacagcagttgcccccagagattggaagctggaaaaatataactgtgctgtttctccattccaataaacttgagacacttccagaggaaatgggtgatatgcaaaaattaaaagtcattaatttaagtgataatagattaaagaatttaccctttagctttacaaagctacagcaattgacagctatgtggctctcagataatcagtccaaacccctgatacctcttcaaaaagaaactgattcagagacccagaaaatggtgcttaccaactacatgttccctcaacagccaaggactgaggatgttatgtttatatcagataatgaaagttttaacccttcattgtgggaggaacagaggaaacagcgggctcaagttgcatttgaatgtgatgaagacaaagatgaaagggaggcacctcccagggagggaaatttaaaaagatatccaacaccatacccagatgagcttaagaatatggtcaaaactgttcaaaccattgtacatagattaaaagatgaagagaccaatgaagactcaggaagagatttgaaaccacatgaagatcaacaagatataaataaagatgtgggtgtgaagacctcagaaagtactactacagtaaaaagcaaagttgatgaaagagaaaaatatatgataggaaactctgtacagaagatcagtgaacctgaagctgagattagtcctgggagtttaccagtgactgcaaatatgaaagcctctgagaacttgaagcatattgttaaccatgatgatgtttttgaggaatctgaagaactttcttctgatgaagagatgaaaatggcggagatgcgaccaccattaattgaaacctctattaaccagccaaaagtcgtagcacttagtaataacaaaaaagatgatacaaaggaaacagattctttatcagatgaagttacacacaatagcaatcagaataacagcaattgttcttctccatctcggatgtctgattcagtttctcttaatactgatagtagtcaagacacctcactctgctctccagtgaaacaaactcatattgatattaattccaaaatcaggcaagaagatgaaaattttaacagccttttacaaaatggagatattttaaacagttcaacagaggaaaagttcaaagctcatgataaaaaagattttaacttacctgaatatgatttgaatgttgaagagcgattagttctaattgagaaaagtgttgactcaacagccacagctgatgacactcacaaattagatcatatcaatatgaatcttaataaacttataactaatgatacatttcaaccagagatcatggaaagatcaaaaacacaggatattgtgcttggaacaagctttttaagcattaattctaaagaggaaactgagcacttggaaaatggaaacaagtatcctaatttggaatccgtaaataaggtaaatggacattctgaggaaacttcccagtctcctaataggactgaaccacatgacagtgattgttctgttgacttaggtatttccaaaagcactgaagatctctcccctcagaaaagtggtccagttggatctgttgtgaaatctcatagcataactaatatggagattggagggctaaaaatctatgatattcttagtgataatggacctcagcagccaagtacaaccgttaaaatcacatctgctgttgatggaaaaaatatagtcaggagcaagtctgccacactgttgtatgatcaaccattgcaggtatttactggttcttcctcatcttctgatttaatatcaggaacaaaggcaattttcaagtttgattcaaatcataatcccgaagagccaaatataataagaggccccacaagtggcccacaatctgcacctcaaatatatggtcctccacagtataatatccaatacagtagcagtgctgcagtcaaagacactttgtggcactccaaacaaaatccccaaatagaccatgccagttttcctcctcagctccttcctagatcagagagcacagaaaatcaaagttatgctaaacattctgccaatatgaatttctctaatcataacaatgttcgagctaatactgcataccatttacatcagagacttggcccagcaagacatggggaaatgtgggccatctcaccaaacgaccgacttattcctgcagtaactcgaagtacaatccagcgacaaagtagtgtgtcctccacagcctctgtaaatcttggtgatccaggctctacaaggcgggctcagattcctgaaggagattatttatcatacagagagttccactcagcgggaagaactcctccaatgatgccaggatcacagagacccctttctgcacgaacatacagcatagatggtccaaatgcatcaagacctcagagtgctcgaccctctattaatgaaataccagagagaactatgtcagttagtgatttcaattattcacggactagtccttcaaaaagaccaaatgcaagggttggttctgagcattctttattagatcctccaggaaaaagtaaagttcctcgtgactggagagaacaagtacttcgacatattgaagccaaaaagttagaaaagatgcctttgagtaatggacagatgggccagcctctcaggcctcaggcaaattatagtcaaatacatcacccccctcaggcatctgtggcaaggcatccctctagagaacaactaattgattacttgatgctgaaagtggcccaccagcctccatatacacagccccattgttctcctagacaaggccatgaactggcaaaacaagagattcgagtgagggttgaaaaggatccagaacttggatttagcatatcaggtggtgtcgggggtagaggaaacccattcagacctgatgatgatggtatatttgtaacaagggtacaacctgaaggaccagcatcaaaattactgcagccaggtgataaaattattcaggctaatggctacagttttataaatattgaacatggacaagcagtgtccttgctaaaaactttccagaatacagttgaactcatcattgtacgagaagtttcctcataagcactgtggacaaaaaaagcggggaagacagcaagatttattggaagatacttacaggggaaattaatattttgactatttttatatataaagaagaactcaaaaaattatgttcaaatttgtacattaatgaaataatggaacttgtggttagagggaaagaaccactgtacagaatataaaggagactgttgaattcataccatataaaacttgttaggtttttaaacatagcaatcaaggctacaaaaacaaacctgtgttgtttttgtatagattgtaggtttatttttggatttcatatacatgactgaactgtgtgcaaggcaatagttagccttgattttagcccagagacagatggcagagctatctctctcatagcttttatgcccttatttttattcaactggtattaatgtttttctcctgaaactactttttttgatgtgggcaagagatttgaagtgttggcttttgctatgtgcatattgaattgaagagtgagtaggtgaaggtggtgctggtgggttcactttccaaggccagactaaaacagttattttctataaaaatctggaagcaaagaatggggatggggagagctacgtggtagtatgtttttattaggagaataatgcaataaaatatgtaatgtcttttttataaagcaaaaaagacaataattgcatttatgagctcggcaggatctgttcttgtcatagccattgactatacatttgctactggtgattcagtttttaattttttagtcacaggaaatttttaactctactgtagatgcatgtccatgcattttctgtgttatggaaatccactgatttttttttttttttcaaatggtggtacttgcaatctgttttataattagtgctccatttaaatctaatttataatttttattttaagcagcaaatgaaacaaaaatggccagttttaagattgtgttgcctgtaacacaaaatgttacgaaggtttaggaaagcctctttgatttttgtttggccttgcattgccttggtaaagtaaaaggaaacagtacacttggagctaggaaaccaaagcaagctttgtgaaactggcacagtgatagagaattgctgtggagagttatagagcaaagggatgggtccttgaggcctgccagtgtgtaaaggtgttcaaataaagggctgtttctacaggtaacattaaatgtgaactcaacacttccagagtctttaaagggtttctatgtgtatcagtgtaatagtgttttaccaccaactgcctttctttgttcctagttactgtaacaaatatttgatgatagaggtttattaattttgtttatccagaccattaattttatttgtttttgttctatgtaatcaaataaaatttgagtaacatgtaatggtaaggattaatgcatggttatttggaccagaaaaaagtgccatagaagaccaataactgtttagttgaggctagtctggaacctttcattagagcaatatttggttattgcacttcatttttatttactaagaaatgcaatttgggaatttttaatctgttatgctttgtttatcaaccttgattttaattaagacttttataagactagcttaaaacaccaaccaacattatttttgcaaaagtgagttggactcactttccattcttgctagtcagagtaagtaggcagcacttttaaaaatatgtgaactcaaatattgcacttctttcaagatgttatcaattggttattgtactgtatagttttaataattttgattgaaaccctttaacaactctttgtaaattttaactcattttagttgattttcagtactatttacataggaattgatttttatggatatagtagaagaaatgtgctgtattttgataaaattcacttattgtatgtgtgttgtaatctaaaaaaaaaaagaatgacaaacagcttctttaaaaaaaaactcggtgttccctttattcttagtttgtttttaaatattaatttgggcattctaaaatagctaacatttcttttattgatttcagattttcacaggcacattctacttttaatcagaaatatatttaataagtataattgtgaagttttcaactactttaccttgaaccacatataccaattataattttggaaaaggaattaagcctcacggaacaatggatcttcagcaaaccttaacttcattgtctgcacattacattgaagtattataaatgcaacagatgttatatgcactggcattttatcctactctagttagttaaaattttatagtattcttgcaacacataaagttgcgtaagaaactttaccaagaggagtattatagccaagttttctttgaaagtattggaaaactaaaattaaatgacaaggactttgaattagaattttgctgtaataaagtttcaaaatttgaataaaataattaaattttttgaaaaaaaaaaaataaaaaaaataaaagaaaataaaaaaataataaaataataaaagataaaaaaaaataacaataaaaagaaaaaaaaaaaaaaatgaacacaaaacaagaagacgtcgaacgaacaaagacacaaaacactagaaagataagacgaaaagtagaaaaacaagagaagggacagaaatcaacagaaacgtacaaaaaacagacaatcagaacccagaacaaaatcaacagaatcaaaagaagagagatccagaggcaatcagaagcaacacaacaaagaaacaacacacaaccaaaggaacgcacgaacatcacaaacaaacgaacgctaaaagaacatatcaaactccaacacgcaacaaataagcagcaggtacaaaggcacacaaaaaactaggcacaaaccgcacgacattaagatacagactgaaaaagacacaggccatgagcatgtagccggcgaagcacatccagcacagccacaccgggccaacaagaaaacacaaacaggaatgcaaaacaaacaggagagcaagaaagaacaacaggaaagcagacagacacagaacaaaaatacacagagacaaaacgacagcaccacaccaaccactgacagaacaactacacacaaaaagacgaaaaccaaacaccaacaacacacaacagagagacaaacgagaaccaaaaacaaaacatcaagacacaacaa

SEQ ID NO: 433205 - DNA, 6680 bp, Homo sapiens
aaggacaggatgagggaatagaacattgggattgggagtggtatctcttttagatacgtttgttaggaaagttgtttctaattcttgtcagatgtagtatgtctcacactgactgttggtggacttgcttctattttaagctgaaaaattgtatgttgtttcttccctcattaggttcgttgaagaatataacaacgcttaaaatagatgaaaaccagttaatgtatctgccagactctataggagggttaatatcagtagaagaactggattgtagtttcaatgaagttgaagctttgccttcatctattgggcagcttactaacttaagaacttttgctgctgatcataattacttacagcagttgcccccagagattggaagctggaaaaatataactgtgctgtttctccattccaataaacttgagacacttccagaggaaatgggtgatatgcaaaaattaaaagtcattaatttaagtgataatagattaaagaatttaccctttagctttacaaagctacagcaattgacagctatgtggctctcagataatcagtccaaacccctgatacctcttcaaaaagaaactgattcagagacccagaaaatggtgcttaccaactacatgttccctcaacagccaaggactgaggatgttatgtttatatcagataatgaaagttttaacccttcattgtgggaggaacagaggaaacagcgggctcaagttgcatttgaatgtgatgaagacaaagatgaaagggaggcacctcccagggagggaaatttaaaaagatatccaacaccatacccagatgagcttaagaatatggtcaaaactgttcaaaccattgtacatagattaaaagatgaagagaccaatgaagactcaggaagagatttgaaaccacatgaagatcaacaagatataaataaagatgtgggtgtgaagacctcagaaagtactactacagtaaaaagcaaagttgatgaaagagaaaaatatatgataggaaactctgtacagaagatcagtgaacctgaagctgagattagtcctgggagtttaccagtgactgcaaatatgaaagcctctgagaacttgaagcatattgttaaccatgatgatgtttttgaggaatctgaagaactttcttctgatgaagagatgaaaatggcggagatgcgaccaccattaattgaaacctctattaaccagccaaaagtcgtagcacttagtaataacaaaaaagatgatacaaaggaaacagattctttatcagatgaagttacacacaatagcaatcagaataacagcaattgttcttctccatctcggatgtctgattcagtttctcttaatactgatagtagtcaagacacctcactctgctctccagtgaaacaaactcatattgatattaattccaaaatcaggcaagaagatgaaaattttaacagccttttacaaaatggagatattttaaacagttcaacagaggaaaagttcaaagctcatgataaaaaagattttaacttacctgaatatgatttgaatgttgaagagcgattagttctaattgagaaaagtgttgactcaacagccacagctgatgacactcacaaattagatcatatcaatatgaatcttaataaacttataactaatgatacatttcaaccagagatcatggaaagatcaaaaacacaggatattgtgcttggaacaagctttttaagcattaattctaaagaggaaactgagcacttggaaaatggaaacaagtatcctaatttggaatccgtaaataaggtaaatggacattctgaggaaacttcccagtctcctaataggactgaaccacatgacagtgattgttctgttgacttaggtatttccaaaagcactgaagatctctcccctcagaaaagtggtccagttggatctgttgtgaaatctcatagcataactaatatggagattggagggctaaaaatctatgatattcttagtgataatggacctcagcagccaagtacaaccgttaaaatcacatctgctgttgatggaaaaaatatagtcaggagcaagtctgccacactgttgtatgatcaaccattgcaggtatttactggttcttcctcatcttctgatttaatatcaggaacaaaggcaattttcaagtttgattcaaatcataatcccgaagagccaaatataataagaggccccacaagtggcccacaatctgcacctcaaatatatggtcctccacagtataatatccaatacagtagcagtgctgcagtcaaagacactttgtggcactccaaacaaaatccccaaatagaccatgccagttttcctcctcagctccttcctagatcagagagcacagaaaatcaaagttatgctaaacattctgccaatatgaatttctctaatcataacaatgttcgagctaatactgcataccatttacatcagagacttggcccagcaagacatggggaaatgtgggccatctcaccaaacgaccgacttattcctgcagtaactcgaagtacaatccagcgacaaagtagtgtgtcctccacagcctctgtaaatcttggtgatccaggctctacaaggcgggctcagattcctgaaggagattatttatcatacagagagttccactcagcgggaagaactcctccaatgatgccaggatcacagagacccctttctgcacgaacatacagcatagatggtccaaatgcatcaagacctcagagtgctcgaccctctattaatgaaataccagagagaactatgtcagttagtgatttcaattattcacggactagtccttcaaaaagaccaaatgcaagggttggttctgagcattctttattagatcctccaggaaaaagtaaagttcctcgtgactggagagaacaagtacttcgacatattgaagccaaaaagttagaaaagatgcctttgagtaatggacagatgggccagcctctcaggcctcaggcaaattatagtcaaatacatcacccccctcaggcatctgtggcaaggcatccctctagagaacaactaattgattacttgatgctgaaagtggcccaccagcctccatatacacagccccattgttctcctagacaaggccatgaactggcaaaacaagagattcgagtgagggttgaaaaggatccagaacttggatttagcatatcaggtggtgtcgggggtagaggaaacccattcagacctgatgatgatggtatatttgtaacaagggtacaacctgaaggaccagcatcaaaattactgcagccaggtgataaaattattcaggctaatggctacagttttataaatattgaacatggacaagcagtgtccttgctaaaaactttccagaatacagttgaactcatcattgtacgagaagtttcctcataagcactgtggacaaaaaaagcggggaagacagcaagatttattggaagatacttacaggggaaattaatattttgactatttttatatataaagaagaactcaaaaaattatgttcaaatttgtacattaatgaaataatggaacttgtggttagagggaaagaaccactgtacagaatataaaggagactgttgaattcataccatataaaacttgttaggtttttaaacatagcaatcaaggctacaaaaacaaacctgtgttgtttttgtatagattgtaggtttatttttggatttcatatacatgactgaactgtgtgcaaggcaatagttagccttgattttagcccagagacagatggcagagctatctctctcatagcttttatgcccttatttttattcaactggtattaatgtttttctcctgaaactactttttttgatgtgggcaagagatttgaagtgttggcttttgctatgtgcatattgaattgaagagtgagtaggtgaaggtggtgctggtgggttcactttccaaggccagactaaaacagttattttctataaaaatctggaagcaaagaatggggatggggagagctacgtggtagtatgtttttattaggagaataatgcaataaaatatgtaatgtcttttttataaagcaaaaaagacaataattgcatttatgagctcggcaggatctgttcttgtcatagccattgactatacatttgctactggtgattcagtttttaattttttagtcacaggaaatttttaactctactgtagatgcatgtccatgcattttctgtgttatggaaatccactgatttttttttttttttcaaatggtggtacttgcaatctgttttataattagtgctccatttaaatctaatttataatttttattttaagcagcaaatgaaacaaaaatggccagttttaagattgtgttgcctgtaacacaaaatgttacgaaggtttaggaaagcctctttgatttttgtttggccttgcattgccttggtaaagtaaaaggaaacagtacacttggagctaggaaaccaaagcaagctttgtgaaactggcacagtgatagagaattgctgtggagagttatagagcaaagggatgggtccttgaggcctgccagtgtgtaaaggtgttcaaataaagggctgtttctacaggtaacattaaatgtgaactcaacacttccagagtctttaaagggtttctatgtgtatcagtgtaatagtgttttaccaccaactgcctttctttgttcctagttactgtaacaaatatttgatgatagaggtttattaattttgtttatccagaccattaattttatttgtttttgttctatgtaatcaaataaaatttgagtaacatgtaatggtaaggattaatgcatggttatttggaccagaaaaaagtgccatagaagaccaataactgtttagttgaggctagtctggaacctttcattagagcaatatttggttattgcacttcatttttatttactaagaaatgcaatttgggaatttttaatctgttatgctttgtttatcaaccttgattttaattaagacttttataagactagcttaaaacaccaaccaacattatttttgcaaaagtgagttggactcactttccattcttgctagtcagagtaagtaggcagcacttttaaaaatatgtgaactcaaatattgcacttctttcaagatgttatcaattggttattgtactgtatagttttaataattttgattgaaaccctttaacaactctttgtaaattttaactcattttagttgattttcagtactatttacataggaattgatttttatggatatagtagaagaaatgtgctgtattttgataaaattcacttattgtatgtgtgttgtaatctaaaaaaaaaaagaatgacaaacagcttctttaaaaaaaaactcggtgttccctttattcttagtttgtttttaaatattaatttgggcattctaaaatagctaacatttcttttattgatttcagattttcacaggcacattctacttttaatcagaaatatatttaataagtataattgtgaagttttcaactactttaccttgaaccacatataccaattataattttggaaaaggaattaagcctcacggaacaatggatcttcagcaaaccttaacttcattgtctgcacattacattgaagtattataaatgcaacagatgttatatgcactggcattttatcctactctagttagttaaaattttatagtattcttgcaacacataaagttgcgtaagaaactttaccaagaggagtattatagccaagttttctttgaaagtattggaaaactaaaattaaatgacaaggactttgaattagaattttgctgtaataaagtttcaaaatttgaataaaataattaaattttttgaaaaaaaaaaaataaaaaaaataaaagaaaataaaaaaataataaaataataaaagataaaaaaaaataacaataaaaagaaaaaaaaaaaaaaatgaacacaaaacaagaagacgtcgaacgaacaaagacacaaaacactagaaagataagacgaaaagtagaaaaacaagagaagggacagaaatcaacagaaacgtacaaaaaacagacaatcagaacccagaacaaaatcaacagaatcaaaagaagagagatccagaggcaatcagaagcaacacaacaaagaaacaacacacaaccaaaggaacgcacgaacatcacaaacaaacgaacgctaaaagaacatatcaaactccaacacgcaacaaataagcagcaggtacaaaggcacacaaaaaactaggcacaaaccgcacgacattaagatacagactgaaaaagacacaggccatgagcatgtagccggcgaagcacatccagcacagccacaccgggccaacaagaaaacacaaacaggaatgcaaaacaaacaggagagcaagaaagaacaacaggaaagcagacagacacagaacaaaaatacacagagacaaaacgacagcaccacaccaaccactgacagaacaactacacacaaaaagacgaaaaccaaacaccaacaacacacaacagagagacaaacgagaaccaaaaacaaaacatcaagacacaacaa

SEQ ID NO: 433206 - DNA, 6367 bp, Homo sapiens
tttttttttttttcggcggagatcctcgttggggctgggaaactcctgcaaaactcgagaccaggaagccagcccgcaccccaacccccaccaaagccacctactcttcttctgtgggaggccagtccacatccgctctcacccgagagagatattcagctggatccaaagtgactgatgaagggaaggaaatcatgtcaagcgaagccttgaaaaagctgccctgagacggtgtcccgccgaaagaatgttggctcaattaagaaacatcagggagataaattcaacccagtgtgtctaaaaatgactacaaaacgaagtttgtttgtgcggttggtaccatgtcgctgtctacgaggggaagaggagactgtcactactcttgattattctcattgcagcttagaacaagttccgaaagagatttttacttttgaaaaaaccttggaggaactctatttagatgctaatcagattgaagagcttccaaagcaactttttaactgtcagtctttacacaaactgagtttgccagacaatgatttaacaacgttaccagcatccattgcaaaccttattaatctcagggaactggatgtcagcaagaatggaatacaggagtttccagaaaatataaaaaattgtaaagttttgacaattgtggaggccagtgtaaaccctatttccaagctccctgatggattttctcagctgttaaacctaacccagttgtatctgaatgatgcttttcttgagttcttgccagcaaattttggcagattaactaaactccaaatattagagcttagagaaaaccagttaaaaatgttgcctaaaactatgaatagactgacccagctggaaagattggatttgggaagtaacgaattcacggaagtgcctgaagtacttgagcaactaagtggattgaaagagttttggatggatgctaatagactgacttttattccagggtttattggtagtttgaaacagctcacatatttggatgtttctaaaaataatattgaaatggttgaagaaggaatttcaacatgtgaaaaccttcaagacctcctattatcaagcaattcacttcagcagcttcctgagactattggttcgttgaagaatataacaacgcttaaaatagatgaaaaccagttaatgtatctgccagactctataggagggttaatatcagtagaagaactggattgtagtttcaatgaagttgaagctttgccttcatctattgggcagcttactaacttaagaacttttgctgctgatcataattacttacagcagttgcccccagagattggaagctggaaaaatataactgtgctgtttctccattccaataaacttgagacacttccagaggaaatgggtgatatgcaaaaattaaaagtcattaatttaagtgataatagattaaagaatttaccctttagctttacaaagctacagcaattgacagctatgtggctctcagataatcagtccaaacccctgatacctcttcaaaaagaaactgattcagagacccagaaaatggtgcttaccaactacatgttccctcaacagccaaggactgaggatgttatgtttatatcagataatgaaagttttaacccttcattgtgggaggaacagaggaaacagcgggctcaagttgcatttgaatgtgatgaagacaaagatgaaagggaggcacctcccagggagggaaatttaaaaagatatccaacaccatacccagatgagcttaagaatatggtcaaaactgttcaaaccattgtacatagattaaaagatgaagagaccaatgaagactcaggaagagatttgaaaccacatgaagatcaacaagatataaataaagatgtgggtgtgaagacctcagaaagtactactacagtaaaaagcaaagttgatgaaagagaaaaatatatgataggaaactctgtacagaagatcagtgaacctgaagctgagattagtcctgggagtttaccagtgactgcaaatatgaaagcctctgagaacttgaagcatattgttaaccatgatgatgtttttgaggaatctgaagaactttcttctgatgaagagatgaaaatggcggagatgcgaccaccattaattgaaacctctattaaccagccaaaagtcgtagcacttagtaataacaaaaaagatgatacaaaggaaacagattctttatcagatgaagttacacacaatagcaatcagaataacagcaattgttcttctccatctcggatgtctgattcagtttctcttaatactgatagtagtcaagacacctcactctgctctccagtgaaacaaactcatattgatattaattccaaaatcaggcaagaagatgaaaattttaacagccttttacaaaatggagatattttaaacagttcaacagaggaaaagttcaaagctcatgataaaaaagattttaacttacctgaatatgatttgaatgttgaagagcgattagttctaattgagaaaagtgttgactcaacagccacagctgatgacactcacaaattagatcatatcaatatgaatcttaataaacttataactaatgatacatttcaaccagagatcatggaaagatcaaaaacacaggatattgtgcttggaacaagctttttaagcattaattctaaagaggaaactgagcacttggaaaatggaaacaagtatcctaatttggaatccgtaaataaggtaaatggacattctgaggaaacttcccagtctcctaataggactgaaccacatgacagtgattgttctgttgacttaggtatttccaaaagcactgaagatctctcccctcagaaaagtggtccagttggatctgttgtgaaatctcatagcataactaatatggagattggagggctaaaaatctatgatattcttagtgataatggacctcagcagccaagtacaaccgttaaaatcacatctgctgttgatggaaaaaatatagtcaggagcaagtctgccacactgttgtatgatcaaccattgcaggtatttactggttcttcctcatcttctgatttaatatcaggaacaaaggcaattttcaagtttgattcaaatcataatcccgaagagccaaatataataagaggccccacaagtggcccacaatctgcacctcaaatatatggtcctccacagtataatatccaatacagtagcagtgctgcagtcaaagacactttgtggcactccaaacaaaatccccaaatagaccatgccagttttcctcctcagctccttcctagatcagagagcacagaaaatcaaagttatgctaaacattctgccaatatgaatttctctaatcataacaatgttcgagctaatactgcataccatttacatcagagacttggcccagcaagacatggggaaatgtgggccatctcaccaaacgaccgacttattcctgcagtaactcgaagtacaatccagcgacaaagtagtgtgtcctccacagcctctgtaaatcttggtgatccaggctctacaaggcgggctcagattcctgaaggagattatttatcatacagagagttccactcagcgggaagaactcctccaatgatgccaggatcacagagacccctttctgcacgaacatacagcatagatggtccaaatgcatcaagacctcagagtgctcgaccctctattaatgaaataccagagagaactatgtcagttagtgatttcaattattcacggactagtccttcaaaaagaccaaatgcaagggttggttctgagcattctttattagatcctccaggaaaaagtaaagttcctcgtgactggagagaacaagtacttcgacatattgaagccaaaaagttagaaaagatgcctttgagtaatggacagatgggccagcctctcaggcctcaggcaaattatagtcaaatacatcacccccctcaggcatctgtggcaaggcatccctctagagaacaactaattgattacttgatgctgaaagtggcccaccagcctccatatacacagccccattgttctcctagacaaggccatgaactggcaaaacaagagattcgagtgagggttgaaaaggatccagaacttggatttagcatatcaggtggtgtcgggggtagaggaaacccattcagacctgatgatgatggtatatttgtaacaagggtacaacctgaaggaccagcatcaaaattactgcagccaggtgataaaattattcaggctaatggctacagttttataaatattgaacatggacaagcagtgtccttgctaaaaactttccagaatacagttgaactcatcattgtacgagaagtttcctcataagcactgtggacaaaaaaagcggggaagacagcaagatttattggaagatacttacaggggaaattaatattttgactatttttatatataaagaagaactcaaaaaattatgttcaaatttgtacattaatgaaataatggaacttgtggttagagggaaagaaccactgtacagaatataaaggagactgttgaattcataccatataaaacttgttaggtttttaaacatagcaatcaaggctacaaaaacaaacctgtgttgtttttgtatagattgtaggtttatttttggatttcatatacatgactgaactgtgtgcaaggcaatagttagccttgattttagcccagagacagatggcagagctatctctctcatagcttttatgcccttatttttattcaactggtattaatgtttttctcctgaaactactttttttgatgtgggcaagagatttgaagtgttggcttttgctatgtgcatattgaattgaagagtgagtaggtgaaggtggtgctggtgggttcactttccaaggccagactaaaacagttattttctataaaaatctggaagcaaagaatggggatggggagagctacgtggtagtatgtttttattaggagaataatgcaataaaatatgtaatgtcttttttataaagcaaaaaagacaataattgcatttatgagctcggcaggatctgttcttgtcatagccattgactatacatttgctactggtgattcagtttttaattttttagtcacaggaaatttttaactctactgtagatgcatgtccatgcattttctgtgttatggaaatccactgatttttttttttttttcaaatggtggtacttgcaatctgttttataattagtgctccatttaaatctaatttataatttttattttaagcagcaaatgaaacaaaaatggccagttttaagattgtgttgcctgtaacacaaaatgttacgaaggtttaggaaagcctctttgatttttgtttggccttgcattgccttggtaaagtaaaaggaaacagtacacttggagctaggaaaccaaagcaagctttgtgaaactggcacagtgatagagaattgctgtggagagttatagagcaaagggatgggtccttgaggcctgccagtgtgtaaaggtgttcaaataaagggctgtttctacaggtaacattaaatgtgaactcaacacttccagagtctttaaagggtttctatgtgtatcagtgtaatagtgttttaccaccaactgcctttctttgttcctagttactgtaacaaatatttgatgatagaggtttattaattttgtttatccagaccattaattttatttgtttttgttctatgtaatcaaataaaatttgagtaacatgtaatggtaaggattaatgcatggttatttggaccagaaaaaagtgccatagaagaccaataactgtttagttgaggctagtctggaacctttcattagagcaatatttggttattgcacttcatttttatttactaagaaatgcaatttgggaatttttaatctgttatgctttgtttatcaaccttgattttaattaagacttttataagactagcttaaaacaccaaccaacattatttttgcaaaagtgagttggactcactttccattcttgctagtcagagtaagtaggcagcacttttaaaaatatgtgaactcaaatattgcacttctttcaagatgttatcaattggttattgtactgtatagttttaataattttgattgaaaccctttaacaactctttgtaaattttaactcattttagttgattttcagtactatttacataggaattgatttttatggatatagtagaagaaatgtgctgtattttgataaaattcacttattgtatgtgtgttgtaatct

SEQ ID NO: 433207 - DNA, 7749 bp, Homo sapiens
tttttttttttttcggcggagatcctcgttggggctgggaaactcctgcaaaactcgagaccaggaagccagcccgcaccccaacccccaccaaagccacctactcttcttctgtgggaggccagtccacatccgctctcacccgagagagatattcagctggatccaaagtgactgatgaagggaaggaaatcatgtcaagcgaagccttgaaaaagctgccctgagacggtgtcccgccgaaagaatgttggctcaattaagaaacatcagggagataaattcaacccagtgtgtctaaaaatgactacaaaacgaagtttgtttgtgcggttggtaccatgtcgctgtctacgaggggaagaggagactgtcactactcttgattattctcattgcagcttagaacaagttccgaaagagatttttacttttgaaaaaaccttggaggaactctatttagatgctaatcagattgaagagcttccaaagcaactttttaactgtcagtctttacacaaactgagtttgccagacaatgatttaacaacgttaccagcatccattgcaaaccttattaatctcagggaactggatgtcagcaagaatggaatacaggagtttccagaaaatataaaaaattgtaaagttttgacaattgtggaggccagtgtaaaccctatttccaagctccctgatggattttctcagctgttaaacctaacccagttgtatctgaatgatgcttttcttgagttcttgccagcaaattttggcagattaactaaactccaaatattagagcttagagaaaaccagttaaaaatgttgcctaaaactatgaatagactgacccagctggaaagattggatttgggaagtaacgaattcacggaagtgcctgaagtacttgagcaactaagtggattgaaagagttttggatggatgctaatagactgacttttattccagggtttattggtagtttgaaacagctcacatatttggatgtttctaaaaataatattgaaatggttgaagaaggaatttcaacatgtgaaaaccttcaagacctcctattatcaagcaattcacttcagcagcttcctgagactattggttcgttgaagaatataacaacgcttaaaatagatgaaaaccagttaatgtatctgccagactctataggagggttaatatcagtagaagaactggattgtagtttcaatgaagttgaagctttgccttcatctattgggcagcttactaacttaagaacttttgctgctgatcataattacttacagcagttgcccccagagattggaagctggaaaaatataactgtgctgtttctccattccaataaacttgagacacttccagaggaaatgggtgatatgcaaaaattaaaagtcattaatttaagtgataatagattaaagaatttaccctttagctttacaaagctacagcaattgacagctatgtggctctcagataatcagtccaaacccctgatacctcttcaaaaagaaactgattcagagacccagaaaatggtgcttaccaactacatgttccctcaacagccaaggactgaggatgttatgtttatatcagataatgaaagttttaacccttcattgtgggaggaacagaggaaacagcgggctcaagttgcatttgaatgtgatgaagacaaagatgaaagggaggcacctcccagggagggaaatttaaaaagatatccaacaccatacccagatgagcttaagaatatggtcaaaactgttcaaaccattgtacatagattaaaagatgaagagaccaatgaagactcaggaagagatttgaaaccacatgaagatcaacaagatataaataaagatgtgggtgtgaagacctcagaaagtactactacagtaaaaagcaaagttgatgaaagagaaaaatatatgataggaaactctgtacagaagatcagtgaacctgaagctgagattagtcctgggagtttaccagtgactgcaaatatgaaagcctctgagaacttgaagcatattgttaaccatgatgatgtttttgaggaatctgaagaactttcttctgatgaagagatgaaaatggcggagatgcgaccaccattaattgaaacctctattaaccagccaaaagtcgtagcacttagtaataacaaaaaagatgatacaaaggaaacagattctttatcagatgaagttacacacaatagcaatcagaataacagcaattgttcttctccatctcggatgtctgattcagtttctcttaatactgatagtagtcaagacacctcactctgctctccagtgaaacaaactcatattgatattaattccaaaatcaggcaagaagatgaaaattttaacagccttttacaaaatggagatattttaaacagttcaacagaggaaaagttcaaagctcatgataaaaaagattttaacttacctgaatatgatttgaatgttgaagagcgattagttctaattgagaaaagtgttgactcaacagccacagctgatgacactcacaaattagatcatatcaatatgaatcttaataaacttataactaatgatacatttcaaccagagatcatggaaagatcaaaaacacaggatattgtgcttggaacaagctttttaagcattaattctaaagaggaaactgagcacttggaaaatggaaacaagtatcctaatttggaatccgtaaataaggtaaatggacattctgaggaaacttcccagtctcctaataggactgaaccacatgacagtgattgttctgttgacttaggtatttccaaaagcactgaagatctctcccctcagaaaagtggtccagttggatctgttgtgaaatctcatagcataactaatatggagattggagggctaaaaatctatgatattcttagtgataatggacctcagcagccaagtacaaccgttaaaatcacatctgctgttgatggaaaaaatatagtcaggagcaagtctgccacactgttgtatgatcaaccattgcaggtatttactggttcttcctcatcttctgatttaatatcaggaacaaaggcaattttcaagtttgattcaaatcataatcccgaagagccaaatataataagaggccccacaagtggcccacaatctgcacctcaaatatatggtcctccacagtataatatccaatacagtagcagtgctgcagtcaaagacactttgtggcactccaaacaaaatccccaaatagaccatgccagttttcctcctcagctccttcctagatcagagagcacagaaaatcaaagttatgctaaacattctgccaatatgaatttctctaatcataacaatgttcgagctaatactgcataccatttacatcagagacttggcccagcaagacatggggaaatgtgggccatctcaccaaacgaccgacttattcctgcagtaactcgaagtacaatccagcgacaaagtagtgtgtcctccacagcctctgtaaatcttggtgatccaggctctacaaggcgggctcagattcctgaaggagattatttatcatacagagagttccactcagcgggaagaactcctccaatgatgccaggatcacagagacccctttctgcacgaacatacagcatagatggtccaaatgcatcaagacctcagagtgctcgaccctctattaatgaaataccagagagaactatgtcagttagtgatttcaattattcacggactagtccttcaaaaagaccaaatgcaagggttggttctgagcattctttattagatcctccaggaaaaagtaaagttcctcgtgactggagagaacaagtacttcgacatattgaagccaaaaagttagaaaagaagcatccccagacatccagttcaggagatccttgtcaagatggtatattcatttcaggacagcagaactactcatcagccacacttagtcacaaagatgttcctccagacagcttgatgaaaatgcctttgagtaatggacagatgggccagcctctcaggcctcaggcaaattatagtcaaatacatcacccccctcaggcatctgtggcaaggcatccctctagagaacaactaattgattacttgatgctgaaagtggcccaccagcctccatatacacagccccattgttctcctagacaaggccatgaactggcaaaacaagagattcgagtgagggttgaaaaggatccagaacttggatttagcatatcaggtggtgtcgggggtagaggaaacccattcagacctgatgatgatggtatatttgtaacaagggtacaacctgaaggaccagcatcaaaattactgcagccaggtgataaaattattcaggctaatggctacagttttataaatattgaacatggacaagcagtgtccttgctaaaaactttccagaatacagttgaactcatcattgtacgagaagtttcctcataagcactgtggacaaaaaaagcggggaagacagcaagatttattggaagatacttacaggggaaattaatattttgactatttttatatataaagaagaactcaaaaaattatgttcaaatttgtacattaatgaaataatggaacttgtggttagagggaaagaaccactgtacagaatataaaggagactgttgaattcataccatataaaacttgttaggtttttaaacatagcaatcaaggctacaaaaacaaacctgtgttgtttttgtatagattgtaggtttatttttggatttcatatacatgactgaactgtgtgcaaggcaatagttagccttgattttagcccagagacagatggcagagctatctctctcatagcttttatgcccttatttttattcaactggtattaatgtttttctcctgaaactactttttttgatgtgggcaagagatttgaagtgttggcttttgctatgtgcatattgaattgaagagtgagtaggtgaaggtggtgctggtgggttcactttccaaggccagactaaaacagttattttctataaaaatctggaagcaaagaatggggatggggagagctacgtggtagtatgtttttattaggagaataatgcaataaaatatgtaatgtcttttttataaagcaaaaaagacaataattgcatttatgagctcggcaggatctgttcttgtcatagccattgactatacatttgctactggtgattcagtttttaattttttagtcacaggaaatttttaactctactgtagatgcatgtccatgcattttctgtgttatggaaatccactgatttttttttttttttcaaatggtggtacttgcaatctgttttataattagtgctccatttaaatctaatttataatttttattttaagcagcaaatgaaacaaaaatggccagttttaagattgtgttgcctgtaacacaaaatgttacgaaggtttaggaaagcctctttgatttttgtttggccttgcattgccttggtaaagtaaaaggaaacagtacacttggagctaggaaaccaaagcaagctttgtgaaactggcacagtgatagagaattgctgtggagagttatagagcaaagggatgggtccttgaggcctgccagtgtgtaaaggtgttcaaataaagggctgtttctacaggtaacattaaatgtgaactcaacacttccagagtctttaaagggtttctatgtgtatcagtgtaatagtgttttaccaccaactgcctttctttgttcctagttactgtaacaaatatttgatgatagaggtttattaattttgtttatccagaccattaattttatttgtttttgttctatgtaatcaaataaaatttgagtaacatgtaatggtaaggattaatgcatggttatttggaccagaaaaaagtgccatagaagaccaataactgtttagttgaggctagtctggaacctttcattagagcaatatttggttattgcacttcatttttatttactaagaaatgcaatttgggaatttttaatctgttatgctttgtttatcaaccttgattttaattaagacttttataagactagcttaaaacaccaaccaacattatttttgcaaaagtgagttggactcactttccattcttgctagtcagagtaagtaggcagcacttttaaaaatatgtgaactcaaatattgcacttctttcaagatgttatcaattggttattgtactgtatagttttaataattttgattgaaaccctttaacaactctttgtaaattttaactcattttagttgattttcagtactatttacataggaattgatttttatggatatagtagaagaaatgtgctgtattttgataaaattcacttattgtatgtgtgttgtaatctaaaaaaaaaaagaatgacaaacagcttctttaaaaaaaaactcggtgttccctttattcttagtttgtttttaaatattaatttgggcattctaaaatagctaacatttcttttattgatttcagattttcacaggcacattctacttttaatcagaaatatatttaataagtataattgtgaagttttcaactactttaccttgaaccacatataccaattataattttggaaaaggaattaagcctcacggaacaatggatcttcagcaaaccttaacttcattgtctgcacattacattgaagtattataaatgcaacagatgttatatgcactggcattttatcctactctagttagttaaaattttatagtattcttgcaacacataaagttgcgtaagaaactttaccaagaggagtattatagccaagttttctttgaaagtattggaaaactaaaattaaatgacaaggactttgaattagaattttgctgtaataaagtttcaaaatttgaataaaataattaaattttttgaaaaaaaaaaaataaaaaaaataaaagaaaataaaaaaataataaaataataaaagataaaaaaaaataacaataaaaagaaaaaaaaaaaaaaatgaacacaaaacaagaagacgtcgaacgaacaaagacacaaaacactagaaagataagacgaaaagtagaaaaacaagagaagggacagaaatcaacagaaacgtacaaaaaacagacaatcagaacccagaacaaaatcaacagaatcaaaagaagagagatccagaggcaatcagaagcaacacaacaaagaaacaacacacaaccaaaggaacgcacgaacatcacaaacaaacgaacgctaaaagaacatatcaaactccaacacgcaacaaataagcagcaggtacaaaggcacacaaaaaactaggcacaaaccgcacgacattaagatacagactgaaaaagacacaggccatgagcatgtagccggcgaagcacatccagcacagccacaccgggccaacaagaaaacacaaacaggaatgcaaaacaaacaggagagcaagaaagaacaacaggaaagcagacagacacagaacaaaaatacacagagacaaaacgacagcaccacaccaaccactgacagaacaactacacacaaaaagacgaaaaccaaacaccaacaacacacaacagagagacaaacgagaaccaaaaacaaaacatcaagacacaacaa

SEQ ID NO: 433208 - DNA, 8092 bp, Homo sapiens
tttttttttttttcggcggagatcctcgttggggctgggaaactcctgcaaaactcgagaccaggaagccagcccgcaccccaacccccaccaaagccacctactcttcttctgtgggaggccagtccacatccgctctcacccgagagagatattcagctggatccaaagtgactgatgaagggaaggaaatcatgtcaagcgaagccttgaaaaagctgccctgagacggtgtcccgccgaaagaatgttggctcaattaagaaacatcagggagataaattcaacccagtgtgtctaaaaatgactacaaaacgaagtttgtttgtgcggttggtaccatgtcgctgtctacgaggggaagaggagactgtcactactcttgattattctcattgcagcttagaacaagttccgaaagagatttttacttttgaaaaaaccttggaggaactctatttagatgctaatcagattgaagagcttccaaagcaactttttaactgtcagtctttacacaaactgagtttgccagacaatgatttaacaacgttaccagcatccattgcaaaccttattaatctcagggaactggatgtcagcaagaatggaatacaggagtttccagaaaatataaaaaattgtaaagttttgacaattgtggaggccagtgtaaaccctatttccaagctccctgatggattttctcagctgttaaacctaacccagttgtatctgaatgatgcttttcttgagttcttgccagcaaattttggcagattaactaaactccaaatattagagcttagagaaaaccagttaaaaatgttgcctaaaactatgaatagactgacccagctggaaagattggatttgggaagtaacgaattcacggaagtgcctgaagtacttgagcaactaagtggattgaaagagttttggatggatgctaatagactgacttttattccagggtttattggtagtttgaaacagctcacatatttggatgtttctaaaaataatattgaaatggttgaagaaggaatttcaacatgtgaaaaccttcaagacctcctattatcaagcaattcacttcagcagcttcctgagactattggttcgttgaagaatataacaacgcttaaaatagatgaaaaccagttaatgtatctgccagactctataggagggttaatatcagtagaagaactggattgtagtttcaatgaagttgaagctttgccttcatctattgggcagcttactaacttaagaacttttgctgctgatcataattacttacagcagttgcccccagagattggaagctggaaaaatataactgtgctgtttctccattccaataaacttgagacacttccagaggaaatgggtgatatgcaaaaattaaaagtcattaatttaagtgataatagattaaagaatttaccctttagctttacaaagctacagcaattgacagctatgtggctctcagataatcagtccaaacccctgatacctcttcaaaaagaaactgattcagagacccagaaaatggtgcttaccaactacatgttccctcaacagccaaggactgaggatgttatgtttatatcagataatgaaagttttaacccttcattgtgggaggaacagaggaaacagcgggctcaagttgcatttgaatgtgatgaagacaaagatgaaagggaggcacctcccagggagggaaatttaaaaagatatccaacaccatacccagatgagcttaagaatatggtcaaaactgttcaaaccattgtacatagattaaaagatgaagagaccaatgaagactcaggaagagatttgaaaccacatgaagatcaacaagatataaataaagatgtgggtgtgaagacctcagaaagtactactacagtaaaaagcaaagttgatgaaagagaaaaatatatgataggaaactctgtacagaagatcagtgaacctgaagctgagattagtcctgggagtttaccagtgactgcaaatatgaaagcctctgagaacttgaagcatattgttaaccatgatgatgtttttgaggaatctgaagaactttcttctgatgaagagatgaaaatggcggagatgcgaccaccattaattgaaacctctattaaccagccaaaagtcgtagcacttagtaataacaaaaaagatgatacaaaggaaacagattctttatcagatgaagttacacacaatagcaatcagaataacagcaattgttcttctccatctcggatgtctgattcagtttctcttaatactgatagtagtcaagacacctcactctgctctccagtgaaacaaactcatattgatattaattccaaaatcaggcaagaagatgaaaattttaacagccttttacaaaatggagatattttaaacagttcaacagaggaaaagttcaaagctcatgataaaaaagattttaacttacctgaatatgatttgaatgttgaagagcgattagttctaattgagaaaagtgttgactcaacagccacagctgatgacactcacaaattagatcatatcaatatgaatcttaataaacttataactaatgatacatttcaaccagagatcatggaaagatcaaaaacacaggatattgtgcttggaacaagctttttaagcattaattctaaagaggaaactgagcacttggaaaatggaaacaagtatcctaatttggaatccgtaaataaggtaaatggacattctgaggaaacttcccagtctcctaataggactgaaccacatgacagtgattgttctgttgacttaggtatttccaaaagcactgaagatctctcccctcagaaaagtggtccagttggatctgttgtgaaatctcatagcataactaatatggagattggagggctaaaaatctatgatattcttagtgataatggacctcagcagccaagtacaaccgttaaaatcacatctgctgttgatggaaaaaatatagtcaggagcaagtctgccacactgttgtatgatcaaccattgcaggtatttactggttcttcctcatcttctgatttaatatcaggaacaaaggcaattttcaagtttgattcaaatcataatcccgaagagccaaatataataagaggccccacaagtggcccacaatctgcacctcaaatatatggtcctccacagtataatatccaatacagtagcagtgctgcagtcaaagacactttgtggcactccaaacaaaatccccaaatagaccatgccagttttcctcctcagctccttcctagatcagagagcacagaaaatcaaagttatgctaaacattctgccaatatgaatttctctaatcataacaatgttcgagctaatactgcataccatttacatcagagacttggcccagcaagacatggggaaatgtgggccatctcaccaaacgaccgacttattcctgcagtaactcgaagtacaatccagcgacaaagtagtgtgtcctccacagcctctgtaaatcttggtgatccaggctctacaaggcgggctcagattcctgaaggagattatttatcatacagagagttccactcagcgggaagaactcctccaatgatgccaggatcacagagacccctttctgcacgaacatacagcatagatggtccaaatgcatcaagacctcagagtgctcgaccctctattaatgaaataccagagagaactatgtcagttagtgatttcaattattcacggactagtccttcaaaaagaccaaatgcaagggttggttctgagcattctttattagatcctccaggaaaaagtaaagttcctcgtgactggagagaacaagtacttcgacatattgaagccaaaaagttagaaaagatgcctttgagtaatggacagatgggccagcctctcaggcctcaggcaaattatagtcaaatacatcacccccctcaggcatctgtggcaaggcatccctctagagaacaactaattgattacttgatgctgaaagtggcccaccagcctccatatacacagccccattgttctcctagacaaggccatgaactggcaaaacaagagattcgagtgagggttgaaaaggatccagaacttggatttagcatatcaggtggtgtcgggggtagaggaaacccattcagacctgatgatgatgtaagttttctttgtatattcttgaaacacctataaagttttatttaccgattgaatacttaaatgtaagtgaaaatctaatagatgtttatgtaaatctaggtagacatcacctggattccccactctattgcttacctttttgttttgtaatttgatcagttcaagttaaaacaatttaaccaaaaactatgaatgtttatgatataatgaaatgatttttaactttcttattgctttttcacacacctataaaagtaattttattactctcaagagaaatcactaaagtcagaattactagaggtaaaaataactagtttgttacagtattactcagagaagtcagggagaaaacttgtaccatgattcaaatatttgcatggtgtggaggaaaaattgctccttggtactctgttatttatacatactgtttttagttaaataattttttttgttgttaaagggtatatttgtaacaagggtacaacctgaaggaccagcatcaaaattactgcagccaggtgataaaattattcaggctaatggctacagttttataaatattgaacatggacaagcagtgtccttgctaaaaactttccagaatacagttgaactcatcattgtacgagaagtttcctcataagcactgtggacaaaaaaagcggggaagacagcaagatttattggaagatacttacaggggaaattaatattttgactatttttatatataaagaagaactcaaaaaattatgttcaaatttgtacattaatgaaataatggaacttgtggttagagggaaagaaccactgtacagaatataaaggagactgttgaattcataccatataaaacttgttaggtttttaaacatagcaatcaaggctacaaaaacaaacctgtgttgtttttgtatagattgtaggtttatttttggatttcatatacatgactgaactgtgtgcaaggcaatagttagccttgattttagcccagagacagatggcagagctatctctctcatagcttttatgcccttatttttattcaactggtattaatgtttttctcctgaaactactttttttgatgtgggcaagagatttgaagtgttggcttttgctatgtgcatattgaattgaagagtgagtaggtgaaggtggtgctggtgggttcactttccaaggccagactaaaacagttattttctataaaaatctggaagcaaagaatggggatggggagagctacgtggtagtatgtttttattaggagaataatgcaataaaatatgtaatgtcttttttataaagcaaaaaagacaataattgcatttatgagctcggcaggatctgttcttgtcatagccattgactatacatttgctactggtgattcagtttttaattttttagtcacaggaaatttttaactctactgtagatgcatgtccatgcattttctgtgttatggaaatccactgatttttttttttttttcaaatggtggtacttgcaatctgttttataattagtgctccatttaaatctaatttataatttttattttaagcagcaaatgaaacaaaaatggccagttttaagattgtgttgcctgtaacacaaaatgttacgaaggtttaggaaagcctctttgatttttgtttggccttgcattgccttggtaaagtaaaaggaaacagtacacttggagctaggaaaccaaagcaagctttgtgaaactggcacagtgatagagaattgctgtggagagttatagagcaaagggatgggtccttgaggcctgccagtgtgtaaaggtgttcaaataaagggctgtttctacaggtaacattaaatgtgaactcaacacttccagagtctttaaagggtttctatgtgtatcagtgtaatagtgttttaccaccaactgcctttctttgttcctagttactgtaacaaatatttgatgatagaggtttattaattttgtttatccagaccattaattttatttgtttttgttctatgtaatcaaataaaatttgagtaacatgtaatggtaaggattaatgcatggttatttggaccagaaaaaagtgccatagaagaccaataactgtttagttgaggctagtctggaacctttcattagagcaatatttggttattgcacttcatttttatttactaagaaatgcaatttgggaatttttaatctgttatgctttgtttatcaaccttgattttaattaagacttttataagactagcttaaaacaccaaccaacattatttttgcaaaagtgagttggactcactttccattcttgctagtcagagtaagtaggcagcacttttaaaaatatgtgaactcaaatattgcacttctttcaagatgttatcaattggttattgtactgtatagttttaataattttgattgaaaccctttaacaactctttgtaaattttaactcattttagttgattttcagtactatttacataggaattgatttttatggatatagtagaagaaatgtgctgtattttgataaaattcacttattgtatgtgtgttgtaatctaaaaaaaaaaagaatgacaaacagcttctttaaaaaaaaactcggtgttccctttattcttagtttgtttttaaatattaatttgggcattctaaaatagctaacatttcttttattgatttcagattttcacaggcacattctacttttaatcagaaatatatttaataagtataattgtgaagttttcaactactttaccttgaaccacatataccaattataattttggaaaaggaattaagcctcacggaacaatggatcttcagcaaaccttaacttcattgtctgcacattacattgaagtattataaatgcaacagatgttatatgcactggcattttatcctactctagttagttaaaattttatagtattcttgcaacacataaagttgcgtaagaaactttaccaagaggagtattatagccaagttttctttgaaagtattggaaaactaaaattaaatgacaaggactttgaattagaattttgctgtaataaagtttcaaaatttgaataaaataattaaattttttgaaaaaaaaaaaataaaaaaaataaaagaaaataaaaaaataataaaataataaaagataaaaaaaaataacaataaaaagaaaaaaaaaaaaaaatgaacacaaaacaagaagacgtcgaacgaacaaagacacaaaacactagaaagataagacgaaaagtagaaaaacaagagaagggacagaaatcaacagaaacgtacaaaaaacagacaatcagaacccagaacaaaatcaacagaatcaaaagaagagagatccagaggcaatcagaagcaacacaacaaagaaacaacacacaaccaaaggaacgcacgaacatcacaaacaaacgaacgctaaaagaacatatcaaactccaacacgcaacaaataagcagcaggtacaaaggcacacaaaaaactaggcacaaaccgcacgacattaagatacagactgaaaaagacacaggccatgagcatgtagccggcgaagcacatccagcacagccacaccgggccaacaagaaaacacaaacaggaatgcaaaacaaacaggagagcaagaaagaacaacaggaaagcagacagacacagaacaaaaatacacagagacaaaacgacagcaccacaccaaccactgacagaacaactacacacaaaaagacgaaaaccaaacaccaacaacacacaacagagagacaaacgagaaccaaaaacaaaacatcaagacacaacaa

SEQ ID NO: 433209 - DNA, 3540 bp, Homo sapiens
tggtactgggaatagagttccaaatttaaactcagccaggacaattgggatgataatattcgagtgagggttgaaaaggatccagaacttggatttagcatatcaggtggtgtcgggggtagaggaaacccattcagacctgatgatgatggtatatttgtaacaagggtacaacctgaaggaccagcatcaaaattactgcagccaggtgataaaattattcaggctaatggctacagttttataaatattgaacatggacaagcagtgtccttgctaaaaactttccagaatacagttgaactcatcattgtacgagaagtttcctcataagcactgtggacaaaaaaagcggggaagacagcaagatttattggaagatacttacaggggaaattaatattttgactatttttatatataaagaagaactcaaaaaattatgttcaaatttgtacattaatgaaataatggaacttgtggttagagggaaagaaccactgtacagaatataaaggagactgttgaattcataccatataaaacttgttaggtttttaaacatagcaatcaaggctacaaaaacaaacctgtgttgtttttgtatagattgtaggtttatttttggatttcatatacatgactgaactgtgtgcaaggcaatagttagccttgattttagcccagagacagatggcagagctatctctctcatagcttttatgcccttatttttattcaactggtattaatgtttttctcctgaaactactttttttgatgtgggcaagagatttgaagtgttggcttttgctatgtgcatattgaattgaagagtgagtaggtgaaggtggtgctggtgggttcactttccaaggccagactaaaacagttattttctataaaaatctggaagcaaagaatggggatggggagagctacgtggtagtatgtttttattaggagaataatgcaataaaatatgtaatgtcttttttataaagcaaaaaagacaataattgcatttatgagctcggcaggatctgttcttgtcatagccattgactatacatttgctactggtgattcagtttttaattttttagtcacaggaaatttttaactctactgtagatgcatgtccatgcattttctgtgttatggaaatccactgatttttttttttttttcaaatggtggtacttgcaatctgttttataattagtgctccatttaaatctaatttataatttttattttaagcagcaaatgaaacaaaaatggccagttttaagattgtgttgcctgtaacacaaaatgttacgaaggtttaggaaagcctctttgatttttgtttggccttgcattgccttggtaaagtaaaaggaaacagtacacttggagctaggaaaccaaagcaagctttgtgaaactggcacagtgatagagaattgctgtggagagttatagagcaaagggatgggtccttgaggcctgccagtgtgtaaaggtgttcaaataaagggctgtttctacaggtaacattaaatgtgaactcaacacttccagagtctttaaagggtttctatgtgtatcagtgtaatagtgttttaccaccaactgcctttctttgttcctagttactgtaacaaatatttgatgatagaggtttattaattttgtttatccagaccattaattttatttgtttttgttctatgtaatcaaataaaatttgagtaacatgtaatggtaaggattaatgcatggttatttggaccagaaaaaagtgccatagaagaccaataactgtttagttgaggctagtctggaacctttcattagagcaatatttggttattgcacttcatttttatttactaagaaatgcaatttgggaatttttaatctgttatgctttgtttatcaaccttgattttaattaagacttttataagactagcttaaaacaccaaccaacattatttttgcaaaagtgagttggactcactttccattcttgctagtcagagtaagtaggcagcacttttaaaaatatgtgaactcaaatattgcacttctttcaagatgttatcaattggttattgtactgtatagttttaataattttgattgaaaccctttaacaactctttgtaaattttaactcattttagttgattttcagtactatttacataggaattgatttttatggatatagtagaagaaatgtgctgtattttgataaaattcacttattgtatgtgtgttgtaatctaaaaaaaaaaagaatgacaaacagcttctttaaaaaaaaactcggtgttccctttattcttagtttgtttttaaatattaatttgggcattctaaaatagctaacatttcttttattgatttcagattttcacaggcacattctacttttaatcagaaatatatttaataagtataattgtgaagttttcaactactttaccttgaaccacatataccaattataattttggaaaaggaattaagcctcacggaacaatggatcttcagcaaaccttaacttcattgtctgcacattacattgaagtattataaatgcaacagatgttatatgcactggcattttatcctactctagttagttaaaattttatagtattcttgcaacacataaagttgcgtaagaaactttaccaagaggagtattatagccaagttttctttgaaagtattggaaaactaaaattaaatgacaaggactttgaattagaattttgctgtaataaagtttcaaaatttgaataaaataattaaattttttgaaaaaaaaaaaataaaaaaaataaaagaaaataaaaaaataataaaataataaaagataaaaaaaaataacaataaaaagaaaaaaaaaaaaaaatgaacacaaaacaagaagacgtcgaacgaacaaagacacaaaacactagaaagataagacgaaaagtagaaaaacaagagaagggacagaaatcaacagaaacgtacaaaaaacagacaatcagaacccagaacaaaatcaacagaatcaaaagaagagagatccagaggcaatcagaagcaacacaacaaagaaacaacacacaaccaaaggaacgcacgaacatcacaaacaaacgaacgctaaaagaacatatcaaactccaacacgcaacaaataagcagcaggtacaaaggcacacaaaaaactaggcacaaaccgcacgacattaagatacagactgaaaaagacacaggccatgagcatgtagccggcgaagcacatccagcacagccacaccgggccaacaagaaaacacaaacaggaatgcaaaacaaacaggagagcaagaaagaacaacaggaaagcagacagacacagaacaaaaatacacagagacaaaacgacagcaccacaccaaccactgacagaacaactacacacaaaaagacgaaaaccaaacaccaacaacacacaacagagagacaaacgagaaccaaaaacaaaacatcaagacacaacaa

SEQ ID NO: 433210 - DNA, 6429 bp, Homo sapiens
  misc_feature (6190)..(6190): n is a, c, g, or t
tttttttttttttcggcggagatcctcgttggggctgggaaactcctgcaaaactcgagaccaggaagccagcccgcaccccaacccccaccaaagccacctactcttcttctgtgggaggccagtccacatccgctctcacccgagagagatattcagctggatccaaagtgactgatgaagggaaggaaatcatgtcaagcgaagccttgaaaaagctgccctgagacggtgtcccgccgaaagaatgttggctcaattaagaaacatcagggagataaattcaacccagtgtgtctaaaaatgactacaaaacgaagtttgtttgtgcggttggtaccatgtcgctgtctacgaggggaagaggagactgtcactactcttgattattctcattgcagcttagaacaagttccgaaagagatttttacttttgaaaaaaccttggaggaactctatttagatgctaatcagattgaagagcttccaaagcaactttttaactgtcagtctttacacaaactgagtttgccagacaatgatttaacaacgttaccagcatccattgcaaaccttattaatctcagggaactggatgtcagcaagaatggaatacaggagtttccagaaaatataaaaaattgtaaagttttgacaattgtggaggccagtgtaaaccctatttccaagctccctgatggattttctcagctgttaaacctaacccagttgtatctgaatgatgcttttcttgagttcttgccagcaaattttggcagattaactaaactccaaatattagagcttagagaaaaccagttaaaaatgttgcctaaaactatgaatagactgacccagctggaaagattggatttgggaagtaacgaattcacggaagtgcctgaagtacttgagcaactaagtggattgaaagagttttggatggatgctaatagactgacttttattccagggtttattggtagtttgaaacagctcacatatttggatgtttctaaaaataatattgaaatggttgaagaaggaatttcaacatgtgaaaaccttcaagacctcctattatcaagcaattcacttcagcagcttcctgagactattggttcgttgaagaatataacaacgcttaaaatagatgaaaaccagttaatgtatctgccagactctataggagggttaatatcagtagaagaactggattgtagtttcaatgaagttgaagctttgccttcatctattgggcagcttactaacttaagaacttttgctgctgatcataattacttacagcagttgcccccagagattggaagctggaaaaatataactgtgctgtttctccattccaataaacttgagacacttccagaggaaatgggtgatatgcaaaaattaaaagtcattaatttaagtgataatagattaaagaatttaccctttagctttacaaagctacagcaattgacagctatgtggctctcagataatcagtccaaacccctgatacctcttcaaaaagaaactgattcagagacccagaaaatggtgcttaccaactacatgttccctcaacagccaaggactgaggatgttatgtttatatcagataatgaaagttttaacccttcattgtgggaggaacagaggaaacagcgggctcaagttgcatttgaatgtgatgaagacaaagatgaaagggaggcacctcccagggagggaaatttaaaaagatatccaacaccatacccagatgagcttaagaatatggtcaaaactgttcaaaccattgtacatagattaaaagatgaagagaccaatgaagactcaggaagagatttgaaaccacatgaagatcaacaagatataaataaagatgtgggtgtgaagacctcagaaagtactactacagtaaaaagcaaagttgatgaaagagaaaaatatatgataggaaactctgtacagaagatcagtgaacctgaagctgagattagtcctgggagtttaccagtgactgcaaatatgaaagcctctgagaacttgaagcatattgttaaccatgatgatgtttttgaggaatctgaagaactttcttctgatgaagagatgaaaatggcggagatgcgaccaccattaattgaaacctctattaaccagccaaaagtcgtagcacttagtaataacaaaaaagatgatacaaaggaaacagattctttatcagatgaagttacacacaatagcaatcagaataacagcaattgttcttctccatctcggatgtctgattcagtttctcttaatactgatagtagtcaagacacctcactctgctctccagtgaaacaaactcatattgatattaattccaaaatcaggcaagaagatgaaaattttaacagccttttacaaaatggagatattttaaacagttcaacagaggaaaagttcaaagctcatgataaaaaagattttaacttacctgaatatgatttgaatgttgaagagcgattagttctaattgagaaaagtgttgactcaacagccacagctgatgacactcacaaattagatcatatcaatatgaatcttaataaacttataactaatgatacatttcaaccagagatcatggaaagatcaaaaacacaggatattgtgcttggaacaagctttttaagcattaattctaaagaggaaactgagcacttggaaaatggaaacaagtatcctaatttggaatccgtaaataaggtaaatggacattctgaggaaacttcccagtctcctaataggactgaaccacatgacagtgattgttctgttgacttaggtatttccaaaagcactgaagatctctcccctcagaaaagtggtccagttggatctgttgtgaaatctcatagcataactaatatggagattggagggctaaaaatctatgatattcttagtgataatggacctcagcagccaagtacaaccgttaaaatcacatctgctgttgatggaaaaaatatagtcaggagcaagtctgccacactgttgtatgatcaaccattgcaggtatttactggttcttcctcatcttctgatttaatatcaggaacaaaggcaattttcaagtttgattcaaatcataatcccgaagagccaaatataataagaggccccacaagtggcccacaatctgcacctcaaatatatggtcctccacagtataatatccaatacagtagcagtgctgcagtcaaagacactttgtggcactccaaacaaaatccccaaatagaccatgccagttttcctcctcagctccttcctagatcagagagcacagaaaatcaaagttatgctaaacattctgccaatatgaatttctctaatcataacaatgttcgagctaatactgcataccatttacatcagagacttggcccagcaagacatggggaaatgtgggccatctcaccaaacgaccgacttattcctgcagtaactcgaagtacaatccagcgacaaagtagtgtgtcctccacagcctctgtaaatcttggtgatccaggctctacaaggcgggctcagattcctgaaggagattatttatcatacagagagttccactcagcgggaagaactcctccaatgatgccaggatcacagagacccctttctgcacgaacatacagcatagatggtccaaatgcatcaagacctcagagtgctcgaccctctattaatgaaataccagagagaactatgtcagttagtgatttcaattattcacggactagtccttcaaaaagaccaaatgcaagggttggttctgagcattctttattagatcctccaggaaaaagtaaagttcctcgtgactggagagaacaagtacttcgacatattgaagccaaaaagttagaaaagatgcctttgagtaatggacagatgggccagcctctcaggcctcaggcaaattatagtcaaatacatcacccccctcaggcatctgtggcaaggcatccctctagagaacaactaattgattacttgatgctgaaagtggcccaccagcctccatatacacagccccattgttctcctagacaaggccatgaactggcaaaacaagagattcgagtgagggttgaaaaggatccagaacttggatttagcatatcaggtggtgtcgggggtagaggaaacccattcagacctgatgatgatggtatatttgtaacaagggtacaacctgaaggaccagcatcaaaattactgcagccaggtgataaaattattcaggctaatggctacagttttataaatattgaacatggacaagcagtgtccttgctaaaaactttccagaatacagttgaactcatcattgtacgagaagtttcctcataagcactgtggacaaaaaaagcggggaagacagcaagatttattggaagatacttacaggggaaattaatattttgactatttttatatataaagaagaactcaaaaaattatgttcaaatttgtacattaatgaaataatggaacttgtggttagagggaaagaaccactgtacagaatataaaggagactgttgaattcataccatataaaacttgttaggtttttaaacatagcaatcaaggctacaaaaacaaacctgtgttgtttttgtatagattgtaggtttatttttggatttcatatacatgactgaactgtgtgcaaggcaatagttagccttgattttagcccagagacagatggcagagctatctctctcatagcttttatgcccttatttttattcaactggtattaatgtttttctcctgaaactactttttttgatgtgggcaagagatttgaagtgttggcttttgctatgtgcatattgaattgaagagtgagtaggtgaaggtggtgctggtgggttcactttccaaggccagactaaaacagttattttctataaaaatctggaagcaaagaatggggatggggagagctacgtggtagtatgtttttattaggagaataatgcaataaaatatgtaatgtcttttttataaagcaaaaaagacaataattgcatttatgagctcggcaggatctgttcttgtcatagccattgactatacatttgctactggtgattcagtttttaattttttagtcacaggaaatttttaactctactgtagatgcatgtccatgcattttctgtgttatggaaatccactgatttttttttttttttcaaatggtggtacttgcaatctgttttataattagtgctccatttaaatctaatttataatttttattttaagcagcaaatgaaacaaaaatggccagttttaagattgtgttgcctgtaacacaaaatgttacgaaggtttaggaaagcctctttgatttttgtttggccttgcattgccttggtaaagtaaaaggaaacagtacacttggagctaggaaaccaaagcaagctttgtgaaactggcacagtgatagagaattgctgtggagagttatagagcaaagggatgggtccttgaggcctgccagtgtgtaaaggtgttcaaataaagggctgtttctacaggtaacattaaatgtgaactcaacacttccagagtctttaaagggtttctatgtgtatcagtgtaatagtgttttaccaccaactgcctttctttgttcctagttactgtaacaaatatttgatgatagaggtttattaattttgtttatccagaccattaattttatttgtttttgttctatgtaatcaaataaaatttgagtaacatgtaatggtaaggattaatgcatggttatttggaccagaaaaaagtgccatagaagaccaataactgtttagttgaggctagtctggaacctttcattagagcaatatttggttattgcacttcatttttatttactaagaaatgcaatttgggaatttttaatctgttatgctttgtttatcaaccttgattttaattaagacttttataagactagcttaaaacaccaaccaacattatttttgcaaaagtgagttggactcactttccattcttgctagtcagagtaagtaggcagcacttttaaaaatatgtgaactcaaatattgcacttctttcaagatgttatcaattgggnattaaaactatacagtacaataaccaattgataacatcttgaaagaagtgcaatatttggttattgtactgtatagttttaataattttgattgaaaccctttaacaactctttgtaaattttaactcattttagttgattttcagtactatttacataggaattgatttttatggatatagtagaagaaatgtgctgtattttgataaaattcacttattgtatgtgtgttgtaatct

SEQ ID NO: 433211 - DNA, 2291 bp, Homo sapiens
gttgagattgtgttgccgtgtgacacagaatgttcatcgagagagattaagaaaagtcctctgtgaggtagtttggtcatactattggcttgtgtaaacaagtgaattgatggaagacatgttacacttgtggagcttaggtagaactccagagactaggaaaccaaagcaagctttgtgaaactggcacagtgatagagaattgctgtggagagttatagagcaaagggatgggtccttgaggcctgccagtgtgtaaaggtgttcaaataaagggctgtttctacaggtaacattaaatgtgaactcaacacttccagagtctttaaagggtttctatgtgtatcagtgtaatagtgttttaccaccaactgcctttctttgttcctagttactgtaacaaatatttgatgatagaggtttattaattttgtttatccagaccattaattttatttgtttttgttctatgtaatcaaataaaatttgagtaacatgtaatggtaaggattaatgcatggttatttggaccagaaaaaagtgccatagaagaccaataactgtttagttgaggctagtctggaacctttcattagagcaatatttggttattgcacttcatttttatttactaagaaatgcaatttgggaatttttaatctgttatgctttgtttatcaaccttgattttaattaagacttttataagactagcttaaaacaccaaccaacattatttttgcaaaagtgagttggactcactttccattcttgctagtcagagtaagtaggcagcacttttaaaaatatgtgaactcaaatattgcacttctttcaagatgttatcaattggttattgtactgtatagttttaataattttgattgaaaccctttaacaactctttgtaaattttaactcattttagttgattttcagtactatttacataggaattgatttttatggatatagtagaagaaatgtgctgtattttgataaaattcacttattgtatgtgtgttgtaatctaaaaaaaaaaagaatgacaaacagcttctttaaaaaaaaactcggtgttccctttattcttagtttgtttttaaatattaatttgggcattctaaaatagctaacatttcttttattgatttcagattttcacaggcacattctacttttaatcagaaatatatttaataagtataattgtgaagttttcaactactttaccttgaaccacatataccaattataattttggaaaaggaattaagcctcacggaacaatggatcttcagcaaaccttaacttcattgtctgcacattacattgaagtattataaatgcaacagatgttatatgcactggcattttatcctactctagttagttaaaattttatagtattcttgcaacacataaagttgcgtaagaaactttaccaagaggagtattatagccaagttttctttgaaagtattggaaaactaaaattaaatgacaaggactttgaattagaattttgctgtaataaagtttcaaaatttgaataaaataattaaattttttgaaaaaaaaaaaataaaaaaaataaaagaaaataaaaaaataataaaataataaaagataaaaaaaaataacaataaaaagaaaaaaaaaaaaaaatgaacacaaaacaagaagacgtcgaacgaacaaagacacaaaacactagaaagataagacgaaaagtagaaaaacaagagaagggacagaaatcaacagaaacgtacaaaaaacagacaatcagaacccagaacaaaatcaacagaatcaaaagaagagagatccagaggcaatcagaagcaacacaacaaagaaacaacacacaaccaaaggaacgcacgaacatcacaaacaaacgaacgctaaaagaacatatcaaactccaacacgcaacaaataagcagcaggtacaaaggcacacaaaaaactaggcacaaaccgcacgacattaagatacagactgaaaaagacacaggccatgagcatgtagccggcgaagcacatccagcacagccacaccgggccaacaagaaaacacaaacaggaatgcaaaacaaacaggagagcaagaaagaacaacaggaaagcagacagacacagaacaaaaatacacagagacaaaacgacagcaccacaccaaccactgacagaacaactacacacaaaaagacgaaaaccaaacaccaacaacacacaacagagagacaaacgagaaccaaaaacaaaacatcaagacacaacaa

SEQ ID NO: 433212 - DNA, 5191 bp, Homo sapiens
tttttttttttttcggcggagatcctcgttggggctgggaaactcctgcaaaactcgagaccaggaagccagcccgcaccccaacccccaccaaagccacctactcttcttctgtgggaggccagtccacatccgctctcacccgagagagatattcagctggatccaaagtgactgatgaagggaaggaaatcatgtcaagcgaagccttgaaaaagctgccctgagacggtgtcccgccgaaagaatgttggctcaattaagaaacatcagggagataaattcaacccagtgtgtctaaaaatgactacaaaacgaagtttgtttgtgcggttggtaccatgtcgctgtctacgaggggaagaggagactgtcactactcttgattattctcattgcagcttagaacaagttccgaaagagatttttacttttgaaaaaaccttggaggaactctatttagatgctaatcagattgaagagcttccaaagcaactttttaactgtcagtctttacacaaactgagtttgccagacaatgatttaacaacgttaccagcatccattgcaaaccttattaatctcagggaactggatgtcagcaagaatggaatacaggagtttccagaaaatataaaaaattgtaaagttttgacaattgtggaggccagtgtaaaccctatttccaagctccctgatggattttctcagctgttaaacctaacccagttgtatctgaatgatgcttttcttgagttcttgccagcaaattttggcagattaactaaactccaaatattagagcttagagaaaaccagttaaaaatgttgcctaaaactatgaatagactgacccagctggaaagattggatttgggaagtaacgaattcacggaagtgcctgaagtacttgagcaactaagtggattgaaagagttttggatggatgctaatagactgacttttattccagggtttattggtagtttgaaacagctcacatatttggatgtttctaaaaataatattgaaatggttgaagaaggaatttcaacatgtgaaaaccttcaagacctcctattatcaagcaattcacttcagcagcttcctgagactattggttcgttgaagaatataacaacgcttaaaatagatgaaaaccagttaatgtatctgccagactctataggagggttaatatcagtagaagaactggattgtagtttcaatgaagttgaagctttgccttcatctattgggcagcttactaacttaagaacttttgctgctgatcataattacttacagcagttgcccccagagattggaagctggaaaaatataactgtgctgtttctccattccaataaacttgagacacttccagaggaaatgggtgatatgcaaaaattaaaagtcattaatttaagtgataatagattaaagaatttaccctttagctttacaaagctacagcaattgacagctatgtggctctcagataatcagtccaaacccctgatacctcttcaaaaagaaactgattcagagacccagaaaatggtgcttaccaactacatgttccctcaacagccaaggactgaggatgttatgtttatatcagataatgaaagttttaacccttcattgtgggaggaacagaggaaacagcgggctcaagttgcatttgaatgtgatgaagacaaagatgaaagggaggcacctcccagggagggaaatttaaaaagatatccaacaccatacccagatgagcttaagaatatggtcaaaactgttcaaaccattgtacatagattaaaagatgaagagaccaatgaagactcaggaagagatttgaaaccacatgaagatcaacaagatataaataaagatgtgggtgtgaagacctcagaaagtactactacagtaaaaagcaaagttgatgaaagagaaaaatatatgataggaaactctgtacagaagatcagtgaacctgaagctgagattagtcctgggagtttaccagtgactgcaaatatgaaagcctctgagaacttgaagcatattgttaaccatgatgatgtttttgaggaatctgaagaactttcttctgatgaagagatgaaaatggcggagatgcgaccaccattaattgaaacctctattaaccagccaaaagtcgtagcacttagtaataacaaaaaagatgatacaaaggaaacagattctttatcagatgaagttacacacaatagcaatcagaataacagcaattgttcttctccatctcggatgtctgattcagtttctcttaatactgatagtagtcaagacacctcactctgctctccagtgaaacaaactcatattgatattaattccaaaatcaggcaagaagatgaaaattttaacagccttttacaaaatggagatattttaaacagttcaacagaggaaaagttcaaagctcatgataaaaaagattttaacttacctgaatatgatttgaatgttgaagagcgattagttctaattgagaaaagtgttgactcaacagccacagctgatgacactcacaaattagatcatatcaatatgaatcttaataaacttataactaatgatacatttcaaccagagatcatggaaagatcaaaaacacaggatattgtgcttggaacaagctttttaagcattaattctaaagaggaaactgagcacttggaaaatggaaacaagtatcctaatttggaatccgtaaataaggtaaatggacattctgaggaaacttcccagtctcctaataggactgaaccacatgacagtgattgttctgttgacttaggtatttccaaaagcactgaagatctctcccctcagaaaagtggtccagttggatctgttgtgaaatctcatagcataactaatatggagattggagggctaaaaatctatgatattcttagtgataatggacctcagcagccaagtacaaccgttaaaatcacatctgctgttgatggaaaaaatatagtcaggagcaagtctgccacactgttgtatgatcaaccattgcaggtatttactggttcttcctcatcttctgatttaatatcaggaacaaaggcaattttcaagtttgattcaaatcataatcccgaagagccaaatataataagaggccccacaagtggcccacaatctgcacctcaaatatatggtcctccacagtataatatccaatacagtagcagtgctgcagtcaaagacactttgtggcactccaaacaaaatccccaaatagaccatgccagttttcctcctcagctccttcctagatcagagagcacagaaaatcaaagttatgctaaacattctgccaatatgaatttctctaatcataacaatgttcgagctaatactgcataccatttacatcagagacttggcccagcaagacatggggaaatgtgggccatctcaccaaacgaccgacttattcctgcagtaactcgaagtacaatccagcgacaaagtagtgtgtcctccacagcctctgtaaatcttggtgatccaggctctacaaggcgggctcagattcctgaaggagattatttatcatacagagagttccactcagcgggaagaactcctccaatgatgccaggatcacagagacccctttctgcacgaacatacagcatagatggtccaaatgcatcaagacctcagagtgctcgaccctctattaatgaaataccagagagaactatgtcagttagtgatttcaattattcacggactagtccttcaaaaagaccaaatgcaagggttggttctgagcattctttattagatcctccaggaaaaagtaaagttcctcgtgactggagagaacaagtacttcgacatattgaagccaaaaagttagaaaagatgcctttgagtaatggacagatgggccagcctctcaggcctcaggcaaattatagtcaaatacatcacccccctcaggcatctgtggcaaggcatccctctagagaacaactaattgattacttgatgctgaaagtggcccaccagcctccatatacacagccccattgttctcctagacaaggccatgaactggcaaaacaagagattcgagtgagggttgaaaaggatccagaacttggatttagcatatcaggtggtgtcgggggtagaggaaacccattcagacctgatgatgatgtaagttttctttgtatattcttgaaacacctataaagttttatttaccgattgaatacttaaatgtaagtgaaaatctaatagatgtttatgtaaatctaggtagacatcacctggattccccactctattgcttacctttttgttttgtaatttgatcagttcaagttaaaacaatttaaccaaaaactatgaatgtttatgatataatgaaatgatttttaactttcttattgctttttcacacacctataaaagtaattttattactctcaagagaaatcactaaagtcagaattactagaggtaaaaataactagtttgttacagtattactcagagaagtcagggagaaaacttgtaccatgattcaaatatttgcatggtgtggaggaaaaattgctccttggtactctgttatttatacatactgtttttagttaaataattttttttgttgttaaagggtatatttgtaacaagggtacaacctgaaggaccagcatcaaaattactgcagccaggtgataaaattattcaggctaatggctacagttttataaatattgaacatggacaagcagtgtccttgctaaaaactttccagaatacagttgaactcatcattgtacgagaagtttcctcataagcactgtggacaaaaaaagcggggaagacagcaagatttattggaagatacttacaggtgatggacacctgtgatactgccaatttctccacttcactgctgccatagacaatgtagtgattttaagggaaagaagtgaccttgagtcagccattttcaaatataatagcaaatatttggccaccagcaactagcggagaagtctgaaagcaggaattgtgtataattcaaaaccaaatatgatttctgaagtagttattttgaaaaggattgaaatatttcaataaatatgtctttgaatatact

SEQ ID NO: 433213 - DNA, 2274 bp, Homo sapiens
tttttttttttttcggcggagatcctcgttggggctgggaaactcctgcaaaactcgagaccaggaagccagcccgcaccccaacccccaccaaagccacctactcttcttctgtgggaggccagtccacatccgctctcacccgagagagatattcagctggatccaaagtgactgatgaagggaaggaaatcatgtcaagcgaagccttgaaaaagctgccctgagacggtgtcccgccgaaagaatgttggctcaattaagaaacatcagggagataaattcaacccagtgtgtctaaaaatgactacaaaacgaagtttgtttgtgcggttggtaccatgtcgctgtctacgaggggaagaggagactgtcactactcttgattattctcattgcagcttagaacaagttccgaaagagatttttacttttgaaaaaaccttggaggaactctatttagatgctaatcagattgaagagcttccaaagcaactttttaactgtcagtctttacacaaactgagtttgccagacaatgatttaacaacgttaccagcatccattgcaaaccttattaatctcagggaactggatgtcagcaagaatggaatacaggagtttccagaaaatataaaaaattgtaaagttttgacaattgtggaggccagtgtaaaccctatttccaagctccctgatggattttctcagctgttaaacctaacccagttgtatctgaatgatgcttttcttgagttcttgccagcaaattttggcagattaactaaactccaaatattagagcttagagaaaaccagttaaaaatgttgcctaaaactatgaatagactgacccagctggaaagattggatttgggaagtaacgaattcacggaagtgcctgaagtacttgagcaactaagtggattgaaagagttttggatggatgctaatagactgacttttattccagggtttattggtagtttgaaacagctcacatatttggatgtttctaaaaataatattgaaatggttgaagaaggaatttcaacatgtgaaaaccttcaagacctcctattatcaagcaattcacttcagcagcttcctgagactattggttcgttgaagaatataacaacgcttaaaatagatgaaaaccagttaatgtatctgccagactctataggagggttaatatcagtagaagaactggattgtagtttcaatgaagttgaagctttgccttcatctattgggcagcttactaacttaagaacttttgctgctgatcataattacttacagcagttgcccccagagattggaagctggaaaaatataactgtgctgtttctccattccaataaacttgagacacttccagaggaaatgggtgatatgcaaaaattaaaagtcattaatttaagtgataatagattaaagaatttaccctttagctttacaaagctacagcaattgacagctatgtggctctcagataatcagtccaaacccctgatacctcttcaaaaagaaactgattcagagacccagaaaatggtgcttaccaactacatgttccctcaacagccaaggactgaggatgttatgtttatatcagataatgaaagttttaacccttcattgtgggaggaacagaggaaacagcgggctcaagttgcatttgaatgtgatgaagacaaagatgaaagggaggcacctcccagggagggaaatttaaaaagatatccaacaccatacccagatgagcttaagaatatggtcaaaactgttcaaaccattgtacatagattaaaagatgaagagaccaatgaagactcaggaagagatttgaaaccacatgaagatcaacaagatataaataaagatgtgggtgtgaagacctcagaaagtactactacagtaaaaagcaaagttgatgaaagagaaaaatatatgataggaaactctgtacagaagatcagtgaacctgaagctgagattagtcctgggagtttaccagtgactgcaaatatgaaagcctctgagaacttgaagcatattgttaaccatgatgatgtttttgaggaatctgaagaactttcttctgatgaagagatgaaaatggcggagatgcgaccaccattaattgaaacctctattaaccagccaaaagtcgtagcacttagtaataacaaaaaaggttagatgttaaaggaaagtgctaagaatagaaattgcctcaataaatttataaatttttttgaaata

SEQ ID NO: 433214 - DNA, 611 bp, Homo sapiens
gtgcctgctgatttcagagttataccctaaatatatttttatgtattgtggctcattcatagttgactgttttgttcatattttacattattaaaacaaatattacctcattttctgtttacaaagtgatgaagatacattgaaacaagtaggttattataaaaggcaaatctttgaaggggctctcataaaagtagccactcataacagaagcgactgttttctgtctgttgggaaaatatcttgtgagagtcttagattttaataaaagactgaatttcttacatgaacttaacttaaattctggtattttatgtaggctccctgatggattttctcagctgttaaacctaacccagttgtatctgaatgatgcttttcttgagttcttgccagcaaattttggcaggtaaattatggtttcttctaaaacgttttattattagctcttataaagtttacaaaactataagctgctttggtagtactactcattacagtttcataggctctttttaaattattcccaagcattgtgacttttatactttgtttggtggctttgacttaatttttccaagtaaacaataatcagtgagagtttgaaagaa

SEQ ID NO: 433215 - DNA, 2648 bp, Homo sapiens
ggcgaggccatgtgatgctgggcgagagagagccgccgcgccggagcctccttctttcctgcctctgattccgggctgtcatggcgacccccaacaatctgacccccaccaactgcagctggtggcccatctccgcgctggagagcgatgcggccaagccagcggaggcccccgacgctcccgaggcggccagccccgcccattggcccagggagagcctggttctgtaccactggacccagtccttcagctcgcagaaggtgcggctggtgatcgccgagaagggcctggtgtgcgaggagcgggacgtgagcctgccacagagcgagcacaaggagccctggttcatgcggctcaacctgggcgaggaggtgcccgtcatcatccaccgcgacaacatcatcagtgactatgaccagatcattgactatgtggagcgcaccttcacaggagagcacgtggtggccctgatgcccgaggtgggcagcctgcagcacgcacgggtgctgcagtaccgggagctgctggacgcactgcccatggatgcctacacgcatggctgcatcctgcatcccgagctcaccaccgactccatgatccccaagtacgccacggccgagatccgcagacatttagccaatgccaccacggacctcatgaaactggaccatgaagaggagccccagctctccgagccctacctttctaaacaaaagaagctcatggccaagatcttggagcatgatgatgtgagctacctgaagaagatcctcggggaactggccatggtgctggaccagattgaggcggagctggagaagaggaagctggagaacgaggggcagaaatgcgagctgtggctctgtggctgtgccttcaccctcgctgatgtcctcctgggagccaccctgcaccgcctcaagttcctgggactgtccaagaaatactgggaagatggcagccggcccaacctgcagtccttctttgagagggtccagagacgctttgccttccggaaagtcctgggtgacatccacaccaccctgctgtcggccgtcatccccaatgctttccggctggtcaagaggaaacccccatccttcttcggggcgtccttcctcatgggctccctgggtgggatgggctactttgcctactggtacctcaagaaaaaatacatctagggccaggcctggggcttggtgtctgactgtcggtgtctctgtgctgtgtgattccccgtgagctctcagtaactcactgtctcatgaacacttggacagccctccccgcccttcgttctgagtaataataccgtcagtgtgaaaacattccgtagtttagaagtagacgttgccaatgctgtgactcaaggccacggctctactaaaagagagagaggaagcgagagagagagagaaaaaacaaaaaacagaaaacacgaatgccttttctatcgattcaaggtctcaagatggaactgtggagactggttaggatctgaggtgagtcccaggatgtttcgtccaccagggcccagattctgggaggtgctggggactcagagggcctgacccctcacctccccttccctcttgcccagggaactcttccacaggacaaagccgacatcaagactcaactcctctaaccggtacctctgaatggggctggataaccggagaccccatgggaggtccctgaagatcagaaggggcttcacgcttctcctggacatggactagcttgagccaaggcagtggcacccaaaaaccaggctgcagtggggacggataccatgagcacaccctctcattgtccttctgatttggtccatgtgttgggtttggccttagtagaaatctctgaaggcagcagccatcatcctcttcctaccttgagtttttctaccctgtgaggtgggactttcagtaaaagccatgttgaccctctctcagaaggtcagtccagcccaagtgcaggggcggatctggaggtggacaaacctaggtccccctcctagcctctgtccaagccatctccttcaatatcccccccttcctgtcactcccggggctgtccctgtactacacggtgccatggagccggggagagcggggaagtctctgcatccatgccacccaccccagtcgggtctcactttcctgtgccttttgcatgttgggaaagggtcttggtgtcactgccgctcatgcatagaaaccaccaaaagccccaataaagcatccaggaggaacagttgcttttcatttctaaacctgtgctgtccatctagttctcattgccaagtgctggagccagaagggtagagatgtgaggtttcagtctcagttcttcacaagagcaagcaagagttgactgcctgtctcaagttgctgggtctggggctggcttccagactgactttccagggctctgaccttaacatcaacccagctcatttaggctcagccctttacaggttacagggcatgtgtacaaccctttgttctcattaacctgtgcaagggccaggtgtagtgactcatatttataatcccagtgctttgggaggccaaggcgggagaattgctccaggccaggagttcaagacaagcctgggcaatatagcgagaccccatctctag

SEQ ID NO: 433216 - DNA, 1209 bp, Homo sapiens
ggcgaggccatgtgatgctgggcgagagagagccgccgcgccggagcctccttctttcctgcctctgattccgggctgtcatggcgacccccaacaatctgacccccaccaactgcagctggtggcccatctccgcgctggagagcgatgcggccaagccagcggaggcccccgacgctcccgaggcggccagccccgcccattggcccagggagagcctggttctgtaccactggacccagtccttcagctcgcagaaggtgcggctggtgatcgccgagaagggcctggtgtgcgaggagcgggacgtgagcctgccacagagcgagcacaaggagccctggttcatgcggctcaacctgggcgaggaggtgcccgtcatcatccaccgcgacaacatcatcagtgactatgaccagatcattgactatgtggagcgcaccttcacaggagagcacgtggtggccctgatgcccgaggtgggcagcctgcagcacgcacgggtgctgcagtaccgggagctgctggacgcactgcccatggatgcctacacgcatggctgcatcctgcatcccgagctcaccaccgactccatgatccccaagtacgccacggccgagatccgcagacatttagccaatgccaccacggacctcatgaaactggaccatgaagaggagccccagctctccgagccctacctttctaaacaaaagaagctcatggccaagatcttggagcatgatgatgtgagctacctgaagaagatcctcggggaactggccatggtgctggaccagattgaggcggagctggagaagaggaagctggagaacgaggggcagaaatgcgagctgtggctctgtggctgtgccttcaccctcgctgatgtcctcctgggagccaccctgcaccgcctcaagttcctgggactgtccaagaaatactgggaagatggcagccggcccaacctgcagtccttctttgagagggtccagagacgctttgccttccggaaagtcctgggtgacatccacaccaccctgctgtcggccgtcatccccaatgctttccggctggtcaagaggaaacccccatccttcttcggggcgtccttcctcatgggctccctgggtgggatgggctactttgcctactggtacctcaagaaaaaatacatctagggccaggcctggggcttggtgtctg

SEQ ID NO: 433217 - DNA, 570 bp, Homo sapiens
  misc_feature (467)..(467): n is a, c, g, or t
  misc_feature (479)..(479): n is a, c, g, or t
  misc_feature (492)..(492): n is a, c, g, or t
  misc_feature (519)..(519): n is a, c, g, or t
  misc_feature (526)..(526): n is a, c, g, or t
  misc_feature (558)..(558): n is a, c, g, or t
ggcgaggccatgtgatgctgggcgagagagagccgccgcgccggagcctccttctttcctgcctctgattccgggctgtcatggcgacccccaacaatctgaccccccccgacgctcccgaggcggccagccccgcccattggcccagggagagcctggttctgtaccactggacccagtccttcagctcgcagaaggtgcggctggtgatcgccgagaagggcctggtgtgcgaggagcgggacgtgagcctgccacagagcgagcacaaggagccctggttcatgcggctcaacctgggcgaggaggtgcccgtcatcatccaccgcgacaacatcatcagtgactatgaccagatcattgactatgtggagcgcaccttcacaggagagcacgtggtggccctgatgcccgaggtgggcagcctgcagcacgcacgggtgctgcagttaccccggaagttgttnggaaggcaattncccattggattgncttaaaaggattgggttgcattcttgnatttccnaaggtttaacaaccaatttcattgattccccnaaattaagggca

SEQ ID NO: 433218 - DNA, 1068 bp, Homo sapiens
ggcgaggccatgtgatgctgggcgagagagagccgccgcgccggagcctccttctttcctgcctctgattccgggctgtcatggcgacccccaacaatctgacccccaccaactgcagctggtggcccatctccgcgctggagagcgatgcggccaagccagcggaggcccccgacgctcccgaggcggccagccccgcccattggcccagggagagcctggttctgtaccactggacccagtccttcagctcgcagaaggtgcggctggtgatcgccgagaagggcctggtgtgcgaggagcgggacgtgagcctgccacagagcgagcacaaggagccctggttcatgcggctcaacctgggcgaggaggtgcccgtcatcatccaccgcgacaacatcatcagtgactatgaccagatcattgactatgtggagcgcaccttcacaggagagcacgtggtggccctgatgcccgaggtgggcagcctgcagcacgcacgggtgctgcagtaccgggagctgctggacgcactgcccatggatgcctacacgcatggctgcatcctgcatcccgagctcaccaccgactccatgatccccaagtacgccacggccgagatccgcagacatttagccaatgccaccacggacctcatgaaactggaccatgaagaggagccccagctctccgagccctacctttctaaacaaaagaagctcatggccaagatcttggagcatgatgatgtgagctacctgaagaagatcctcggggaactggccatggtgctggaccagattgaggcggagctggagaagaggaagctggagaacgagggtgggtgccagccctgggggaggtgggggctgcagcccacccagcctactcttcccctgcccagtctcagcctcttttttccgcaaaagtctcagaggacctcccaggtggttaagaggatgggctatggagtcagactaaggttcaagtcataacttggccacttcctagcttagtaaatgtggtcaggttctcccctctctgaaattcagtttcccatctataaaa

SEQ ID NO: 433219 - DNA, 2498 bp, Homo sapiens
acccttgcagggagcctgacactgagggctggcggcttttctggcgcgggccagggggaggaggagaaaggagctcccgggatcccctcgccccctcccccaactgcccggtgcggctggtgatcgccgagaagggcctggtgtgcgaggagcgggacgtgagcctgccacagagcgagcacaaggagccctggttcatgcggctcaacctgggcgaggaggtgcccgtcatcatccaccgcgacaacatcatcagtgactatgaccagatcattgactatgtggagcgcaccttcacaggagagcacgtggtggccctgatgcccgaggtgggcagcctgcagcacgcacgggtgctgcagtaccgggagctgctggacgcactgcccatggatgcctacacgcatggctgcatcctgcatcccgagctcaccaccgactccatgatccccaagtacgccacggccgagatccgcagacatttagccaatgccaccacggacctcatgaaactggaccatgaagaggagccccagctctccgagccctacctttctaaacaaaagaagctcatggccaagatcttggagcatgatgatgtgagctacctgaagaagatcctcggggaactggccatggtgctggaccagattgaggcggagctggagaagaggaagctggagaacgaggggcagaaatgcgagctgtggctctgtggctgtgccttcaccctcgctgatgtcctcctgggagccaccctgcaccgcctcaagttcctgggactgtccaagaaatactgggaagatggcagccggcccaacctgcagtccttctttgagagggtccagagacgctttgccttccggaaagtcctgggtgacatccacaccaccctgctgtcggccgtcatccccaatgctttccggctggtcaagaggaaacccccatccttcttcggggcgtccttcctcatgggctccctgggtgggatgggctactttgcctactggtacctcaagaaaaaatacatctagggccaggcctggggcttggtgtctgactgtcggtgtctctgtgctgtgtgattccccgtgagctctcagtaactcactgtctcatgaacacttggacagccctccccgcccttcgttctgagtaataataccgtcagtgtgaaaacattccgtagtttagaagtagacgttgccaatgctgtgactcaaggccacggctctactaaaagagagagaggaagcgagagagagagagaaaaaacaaaaaacagaaaacacgaatgccttttctatcgattcaaggtctcaagatggaactgtggagactggttaggatctgaggtgagtcccaggatgtttcgtccaccagggcccagattctgggaggtgctggggactcagagggcctgacccctcacctccccttccctcttgcccagggaactcttccacaggacaaagccgacatcaagactcaactcctctaaccggtacctctgaatggggctggataaccggagaccccatgggaggtccctgaagatcagaaggggcttcacgcttctcctggacatggactagcttgagccaaggcagtggcacccaaaaaccaggctgcagtggggacggataccatgagcacaccctctcattgtccttctgatttggtccatgtgttgggtttggccttagtagaaatctctgaaggcagcagccatcatcctcttcctaccttgagtttttctaccctgtgaggtgggactttcagtaaaagccatgttgaccctctctcagaaggtcagtccagcccaagtgcaggggcggatctggaggtggacaaacctaggtccccctcctagcctctgtccaagccatctccttcaatatcccccccttcctgtcactcccggggctgtccctgtactacacggtgccatggagccggggagagcggggaagtctctgcatccatgccacccaccccagtcgggtctcactttcctgtgccttttgcatgttgggaaagggtcttggtgtcactgccgctcatgcatagaaaccaccaaaagccccaataaagcatccaggaggaacagttgcttttcatttctaaacctgtgctgtccatctagttctcattgccaagtgctggagccagaagggtagagatgtgaggtttcagtctcagttcttcacaagagcaagcaagagttgactgcctgtctcaagttgctgggtctggggctggcttccagactgactttccagggctctgaccttaacatcaacccagctcatttaggctcagccctttacaggttacagggcatgtgtacaaccctttgttctcattaacctgtgcaagggccaggtgtagtgactcatatttataatcccagtgctttgggaggccaaggcgggagaattgctccaggccaggagttcaagacaagcctgggcaatatagcgagaccccatctctag

SEQ ID NO: 433220 - DNA, 2893 bp, Homo sapiens
ggcgaggccatgtgatgctgggcgagagagagccgccgcgccggagcctccttctttcctgcctctgattccgggctgtcatggcgacccccaacaatctgacccccaccaactgcagctggtggcccatctccgcgctggagagcgatgcggccaagccagcggaggcccccgacgctcccgaggcggccagccccgcccattggcccagggagagcctggttctgtaccactggacccagtccttcagctcgcagaaggtgcggctggtgatcgccgagaagggcctggtgtgcgaggagcgggacgtgagcctgccacagagcgagcacaaggagccctggttcatgcggctcaacctgggcgaggaggtgcccgtcatcatccaccgcgacaacatcatcagtgactatgaccagatcattgactatgtggagcgcaccttcacaggaggaccccgcctggcagcaagtctggagctgagaggagctaaccctcggggacagcttggcagagcccagtgaggagagatggccgggccaccactagaatcccctgtccgccagcagccaagcccgagcatgggggtgcccagggcctctgggcagagacatcttggggctcagggatgccgggggcaggtggccggggcaggtgcccctctggcttccctgcccagcccctggcggtgcccacagagcacgtggtggccctgatgcccgaggtgggcagcctgcagcacgcacgggtgctgcagtaccgggagctgctggacgcactgcccatggatgcctacacgcatggctgcatcctgcatcccgagctcaccaccgactccatgatccccaagtacgccacggccgagatccgcagacatttagccaatgccaccacggacctcatgaaactggaccatgaagaggagccccagctctccgagccctacctttctaaacaaaagaagctcatggccaagatcttggagcatgatgatgtgagctacctgaagaagatcctcggggaactggccatggtgctggaccagattgaggcggagctggagaagaggaagctggagaacgaggggcagaaatgcgagctgtggctctgtggctgtgccttcaccctcgctgatgtcctcctgggagccaccctgcaccgcctcaagttcctgggactgtccaagaaatactgggaagatggcagccggcccaacctgcagtccttctttgagagggtccagagacgctttgccttccggaaagtcctgggtgacatccacaccaccctgctgtcggccgtcatccccaatgctttccggctggtcaagaggaaacccccatccttcttcggggcgtccttcctcatgggctccctgggtgggatgggctactttgcctactggtacctcaagaaaaaatacatctagggccaggcctggggcttggtgtctgactgtcggtgtctctgtgctgtgtgattccccgtgagctctcagtaactcactgtctcatgaacacttggacagccctccccgcccttcgttctgagtaataataccgtcagtgtgaaaacattccgtagtttagaagtagacgttgccaatgctgtgactcaaggccacggctctactaaaagagagagaggaagcgagagagagagagaaaaaacaaaaaacagaaaacacgaatgccttttctatcgattcaaggtctcaagatggaactgtggagactggttaggatctgaggtgagtcccaggatgtttcgtccaccagggcccagattctgggaggtgctggggactcagagggcctgacccctcacctccccttccctcttgcccagggaactcttccacaggacaaagccgacatcaagactcaactcctctaaccggtacctctgaatggggctggataaccggagaccccatgggaggtccctgaagatcagaaggggcttcacgcttctcctggacatggactagcttgagccaaggcagtggcacccaaaaaccaggctgcagtggggacggataccatgagcacaccctctcattgtccttctgatttggtccatgtgttgggtttggccttagtagaaatctctgaaggcagcagccatcatcctcttcctaccttgagtttttctaccctgtgaggtgggactttcagtaaaagccatgttgaccctctctcagaaggtcagtccagcccaagtgcaggggcggatctggaggtggacaaacctaggtccccctcctagcctctgtccaagccatctccttcaatatcccccccttcctgtcactcccggggctgtccctgtactacacggtgccatggagccggggagagcggggaagtctctgcatccatgccacccaccccagtcgggtctcactttcctgtgccttttgcatgttgggaaagggtcttggtgtcactgccgctcatgcatagaaaccaccaaaagccccaataaagcatccaggaggaacagttgcttttcatttctaaacctgtgctgtccatctagttctcattgccaagtgctggagccagaagggtagagatgtgaggtttcagtctcagttcttcacaagagcaagcaagagttgactgcctgtctcaagttgctgggtctggggctggcttccagactgactttccagggctctgaccttaacatcaacccagctcatttaggctcagccctttacaggttacagggcatgtgtacaaccctttgttctcattaacctgtgcaagggccaggtgtagtgactcatatttataatcccagtgctttgggaggccaaggcgggagaattgctccaggccaggagttcaagacaagcctgggcaatatagcgagaccccatctctag

SEQ ID NO: 433221 - DNA, 2474 bp, Homo sapiens
ggcgaggccatgtgatgctgggcgagagagagccgccgcgccggagcctccttctttcctgcctctgattccgggctgtcatggcgacccccaacaatctgacccccaccaactgcagctggtggcccatctccgcgctggagagcgatgcggccaagccagcggaggcccccgacgctcccgaggcggccagccccgcccattggcccagggagagcctggttctgtaccactggacccagtccttcagctcgcagaaggtgcggctggtgatcgccgagaagggcctggtgtgcgaggagcgggacgtgagcctgccacagagcgagcacaaggagccctggttcatgcggctcaacctgggcgaggaggtgcccgtcatcatccaccgcgacaacatcatcagtgactatgaccagatcattgactatgtggagcgcaccttcacaggaggacatttagccaatgccaccacggacctcatgaaactggaccatgaagaggagccccagctctccgagccctacctttctaaacaaaagaagctcatggccaagatcttggagcatgatgatgtgagctacctgaagaagatcctcggggaactggccatggtgctggaccagattgaggcggagctggagaagaggaagctggagaacgaggggcagaaatgcgagctgtggctctgtggctgtgccttcaccctcgctgatgtcctcctgggagccaccctgcaccgcctcaagttcctgggactgtccaagaaatactgggaagatggcagccggcccaacctgcagtccttctttgagagggtccagagacgctttgccttccggaaagtcctgggtgacatccacaccaccctgctgtcggccgtcatccccaatgctttccggctggtcaagaggaaacccccatccttcttcggggcgtccttcctcatgggctccctgggtgggatgggctactttgcctactggtacctcaagaaaaaatacatctagggccaggcctggggcttggtgtctgactgtcggtgtctctgtgctgtgtgattccccgtgagctctcagtaactcactgtctcatgaacacttggacagccctccccgcccttcgttctgagtaataataccgtcagtgtgaaaacattccgtagtttagaagtagacgttgccaatgctgtgactcaaggccacggctctactaaaagagagagaggaagcgagagagagagagaaaaaacaaaaaacagaaaacacgaatgccttttctatcgattcaaggtctcaagatggaactgtggagactggttaggatctgaggtgagtcccaggatgtttcgtccaccagggcccagattctgggaggtgctggggactcagagggcctgacccctcacctccccttccctcttgcccagggaactcttccacaggacaaagccgacatcaagactcaactcctctaaccggtacctctgaatggggctggataaccggagaccccatgggaggtccctgaagatcagaaggggcttcacgcttctcctggacatggactagcttgagccaaggcagtggcacccaaaaaccaggctgcagtggggacggataccatgagcacaccctctcattgtccttctgatttggtccatgtgttgggtttggccttagtagaaatctctgaaggcagcagccatcatcctcttcctaccttgagtttttctaccctgtgaggtgggactttcagtaaaagccatgttgaccctctctcagaaggtcagtccagcccaagtgcaggggcggatctggaggtggacaaacctaggtccccctcctagcctctgtccaagccatctccttcaatatcccccccttcctgtcactcccggggctgtccctgtactacacggtgccatggagccggggagagcggggaagtctctgcatccatgccacccaccccagtcgggtctcactttcctgtgccttttgcatgttgggaaagggtcttggtgtcactgccgctcatgcatagaaaccaccaaaagccccaataaagcatccaggaggaacagttgcttttcatttctaaacctgtgctgtccatctagttctcattgccaagtgctggagccagaagggtagagatgtgaggtttcagtctcagttcttcacaagagcaagcaagagttgactgcctgtctcaagttgctgggtctggggctggcttccagactgactttccagggctctgaccttaacatcaacccagctcatttaggctcagccctttacaggttacagggcatgtgtacaaccctttgttctcattaacctgtgcaagggccaggtgtagtgactcatatttataatcccagtgctttgggaggccaaggcgggagaattgctccaggccaggagttcaagacaagcctgggcaatatagcgagaccccatctctag

SEQ ID NO: 433222 - DNA, 1012 bp, Homo sapiens
tacaccatttttagtggagggagggtgcatgcctatatgatggtaagattcttttgaactctaaggacaattcctcatggaaaaaataaatttcagtgcatattataaaaatgatttgcactgtgttagcaaaataaggtgttttaggttgtattttaaagacaattctaaatcatttctctggaaagcaagaccttaaattcttctctttaatagaactgcttttatgcaaagagatggtcttaacatggactaaacagtacataacaataatgtttgttatgtaaatagtatatcacatttgcttagtagcacaattcaacagcaggcctgaacatgtcgaggctcctctgctcagattgagttttaagttacctaatttatgtaatcagaatctattctaggtggccgtcaacgtaaactgtgtttccctattatatccctctggagactgagaatcaaattaaatagtctttcttcaaagcagtactgtaacatgaatgtatttatctcagtcaacagaacttatatgcccactgtatgtggagcttatttcaatgctaatttggcttagttagcagacctagaatctgcccaggtgagacctagaacaaaaatagctggggtgaaatggataagagaggtagaggtatatgtcaaggcagagccctatgaggaaggaagagttttcaaagaatatgaggaacatagtgctgagagtgtggctgccttcagcaccgtacacctaatctagagaaaatatttcccatgtgggaggtcctgtctgcattcagtccacccttttctgcctgcttcttcctccaagtgcctcaacctctacatgctcactctcctccccttccctcagcccatcttggtctaagcagctttcacaatccaaaccaaacatcaccagccacccgctgataagtcaccagcatttactttcctgagttactttttctccattcattgagactatggattcatcccaactccttctaaatccctc

SEQ ID NO: 433223 - DNA, 942 bp, Homo sapiens
tacaccatttttagtggagggagggtgcatgcctatatgatggtaagattcttttgaactctaaggacaattcctcatggaaaaaataaatttcagtgcatattataaaaatgatttgcactgtgttagcaaaataaggtgttttaggttgtattttaaagacaattctaaatcatttctctggaaagcaagaccttaaattcttctctttaatagaactgcttttatgcaaagagatggtcttaacatggactaaacagtacataacaataatgtttgttatgtaaatagtatatcacatttgcttagtagcacaattcaacagcaggcctgaacatgtcgaggctcctctgctcagattgagttttaagttacctaatttatgtaatcagaatctattctaggtggccgtcaacgtaaactgtgtttccctattatatccctctggagactgagaatcaaattaaatagtctttcttcaaagcagtactgtaacatgaatgtatttatctcagtcaacagaacttatatgcccactgtatgtggagcttatttcaatgctaatttggcttagttagcagacctagaatctgcccaggtgagacctagaacaaaaatagctggggtgaaatggataagagaggtagaggtatatgtcaaggcagagccctatgaggaaggaagagttttcaaagaatatgaggaacatagtgctgagagtgtggctgccttcagcaccgtacacctaatctagagaaaatatttcccatgtgggaggtcctgtctgcattcagtccacccttttctgcctgcttcttcctccaagtgcctcaacctctacatgctcactctcctccccttccctcagcccatcttggtctaagcagctttcacaatccaaaccaaacatcatcgacatgttcggggtcctctaggtacacg

SEQ ID NO: 433224 - DNA, 7412 bp, Homo sapiens
ggcggcagaggcggtgtccaggcttccgggcgggtagtccttcggctccggagccgcgactgcgctcgcctaggtggtgggcggggagggaaggaagggagcgggcgcaaggcggcggcggcggctgcgggtgaggaacttgttgcgcccgcggctgcgcggtgcccctccctccgctccagttcgtcggggcgggcgcggcggcggcggcgaaggaggagcgcggccggggcgatgcggcgctacctgcgcgtcgtggtgctgtgtgtggcctgcggcttctgctcgctcctttacgctttcagccagctcgccgtgtccctggaagaaggaacgggcggcggtggcgggaagccgcaggccgcggtggcttcctggctcgcgggcggcggacgcggcgccgtgagaggcgccggcgtcgcgggccccgcagcgcatcccggcgtgtcggacaggtacagtctgaaaatacagcctgttgagaaaatgcatctagctgtagttgcctgtggtgaaagactggaagaaactatgaccatgttgaagtcagctatcattttcagcatcaaacctcttcaattccatatttttgctgaagatcagctacatcatagctttaaaggcagacttgacaactggtcatttctacaaacatttaattatacgttataccccataacctttccaagtgagaatgcagcagagtggaaaaaactctttaaaccatgtgcttcgcagagattgttcttgccgttaatcctgaaagaagttgactcactattgtatgtcgacactgatatcctttttttacgaccagttgatgatatttggtctttactaaagaaatttaattccacacaaattgctgcaatggcaccagaacatgaggaacctcgaataggatggtataatcgctttgctaggcatccatattatggaaaaactggagtaaactctggagttatgttgatgaacatgactcgaatgagaaggaagtatttcaagaatgatatgacaactgtacgactacaatggggagatatacttatgccattgcttaaaaaatacaaactaaacatcacatggggtgatcaagatctattgaatatcgtgttttttcataatccagaaagcctttttgtttttccgtgtcaatggaattatcgaccagatcattgtatatatggaagcaattgccaagaagcagaagaaggaggaatctttattcttcatgggaacagaggtgtttaccatgacgataagcaaccagcatttagagctgtttatgaagcactgagaaattgttcttttgaagatgacaacatccgttccttattaaaacctttagaactggaactacaaaaaacagtgcatacatactgtggaaaaatttacaaaatatttatcaaacaactagcaaaaagtgtaagagatcgttatgccagatcaccaaaggaaaagtgattcttggtgactgcttaatcaaatggatgaaaacaaagaatcggaagataagtgtgaaggaatcgtcttggatgaagtattcaggaaggaattactcatctccagaataattttttttttcctaaagaagttaagtaagcagtattttcaggtaatgaagaataagttaaaatcttgggcctcaacattgaacattttttatctctgatgttttgtaatgttacttgctatcattccagtattgatgaaaatactattgaatgggtttaacctgcagacttctgttgactcatactctcaagagtggtaggggtgtgtagatggagaaaatgtacctcaaacagtgccaacactcaagactgtgagtagagcaataattttatgtcagcactaacctcactttaaaagtgtgagaaaaaagtttgtttacaggagcagaaacaggtctgttgtttctgaagaaatgtgatgtaactgatgtaaccattgacaatctatgtgtgcctttatacatttcatctctgttttaaaatatttttatgacaatcatgtttaaaattatttttagattacaagtaagctgcatgttaaaaattgagctgtgtaaggtagaggaaaaatagtgaaaactttgggattttaatctgtgtgtgcgtgtttgtgtgtgagagagagtgagaaatgtagtgtttcattttgtatgcattaaactgtcttgccaaaactcagatctaagattgttaaatagatatttggggaatttttttttaatcactttaaatgaaaaacgtcagctttactgggcattctggaagcaaaatatattatgctgatggtaaagtgagaaccttaagagtatactcatgatggtggaaagtgtgatggaccaaaatgcataagctatatacttcctgtgagtagtaattttagttacaatggagtagaaaaatatggtccatttaaacttgtcttctacctcataacggccttgcaagatacttttgaagaagcaaatgtctagagccttactttaagtaagttaaacaacttaagtggatgatttggaataagattgttacatccagctgtagaaaatgtggttttaattgggttgatgtgcatttttgaatatcacctaagacagttaatttttttaaatcttgagaaattacttctttggcattcttgacctgttagctaatataactatagattctgaatacttagcatatactatgctggggcacatatcttattttaccaacaatatgattatctatatggttatcttctttttctccctgatattttaatgctcaagtagaaaatggaaaatcatgaaggaaaaatacaacctgtgaaaattgtggcagttagctttgtgaagacacagtgacctctgtggagacatggaatatgcagaaagagatggttagtacagttgttctgtcgtctgcagttcagtcagggacaaattgagagaggaaagtttaagcagggtgcattagaagttgataaccagtccagcattcttagaacagatgggtttagagaacacgagttgtagttccttggcagaatgccatggtgaatataagaaactgtgaaattgagcttactgagtagaaaatgagaatactaaaaatgtgaagtttggagggtatgtattagatcatttctaatggtcctcaaataatgatcattgcctgcctgactatgtaagattcttgttgggagcttaagaatagattcctgagctaggcctttggagactctggcatgctgtgtctaggagggagtctgtaaaacaatttttaatgaagaaatttaaaaattacacaaaactagaatagtgcattggtactcaacatccagatctgacacttatcactatcttaccatgtttgcttcatttgtcatttttttgtttgcttaagtatcttaaaatcccatacattgtgttatttcactgctgtgaacactttgggtagataccacgatatcacacctaacagaggcagcagcagtccttcggcttcatctcatagccagtccttaagcaaatttccctgattatctcaaaaatcatcttctagttggtttgttagaatcaacagaatataagtcacatgatgatttcgtttttaacaatcacctcagatgactttgatgttagctactttgagaaccactggaaattattttgccaacttgaaagttcaagttaggataccacaattcttggcacgtttggtggattataaatgtgattttgaaatattagaggaagcatttggggttaatgacaggatatgaatttatattagtaagtttgataagataaaatttcctcagtgaacggagaatctcagccccatgggctctaattgattgggacttgtgtagagcgtggtcacagtttaatccaactggactgtatgctgtggtctcactcatgttgtggcttatttacactgtcacacacactacattgtggatcagttggaaggttcttcatctggtttatttagacctgacctaattgatcattttaccataaattgaattatagtgaaaactgtcttttgggtactgtttctacctaaaattaaaggtatcacaaaatatgtataataatttttaaatgaattttctgaatttatctttagacaaggtaattcttttgaattctaaagaaatgcagttcttggagttgatgagaggttaaattatagatggacaacttagagaacgtattccatcttcatataaatggtctttcataaaacatagtgtatctatgcagtttatataaactacatgatttattatttgagtctatgtattctgacctcagaactatctctgggctacagtattaccaaagtgggatgcctttaaaatgcagtcaaacttcatttgtatgaagtagaaaagaacttgggaaacctttaaaaatatatattgtgatttatgctttaagaaaatgcatacttttttctaatgaagagtagttcataatatataagggttttaaggccctgaaataacattagtgcttactcattgctctctcatcttgcctccagtcagatgttattggtatagtgaaaagaagaccagattttgaactagatctggattctctttttagtaactcaggcatgttatttaaccttctctgtgccttaggtttttaagtacaatcagtgtacccttcaaacctcacaagatgaaactcagaagagataatggatttggaagcattttgcgtggcttatattatgccacgccagtgttactgttgaagttctgttttgttctgttgttttctgtacagagcgttcagtttactcaggctgaatgttttctgacatatatctccagtatgaatttgtttatgtaaggaagagtttttcaggaagagaaagtagagaagaaaagaatgatgtaactaatcaaaaaagaaggaaaagagaggaagtgagaaaaggggtgaggaaagagaaaggagtaagaatggggatggcaaagggcagagtaagagaaaagatggaatgagtgtatggaaaattgagaagtagagatggagagaaatggtgtggaaacatttactttttgagttgtagccctcacactacatcagtttgcttgcctgggctctctggggtcaggaaaggtgctgacttccatggaatggggcagcagggcctgctgtatttggtttgttagtactagagttgtttcccaatcaccctactcactgatcatttagtgccaattcaacattttatgtcttttttttttagtggatcccagtttgtgagctaggacctgtggaaatacaagtatcttcctttttaactttattgttttagccatcccaagtgttagactgcaagactaactacatattccccagtggaggttggaagtggaggggactgcttcattaggtctgaagggggccaaggaatgtgttgcagcagttttcgcagatgatactgacgagaggccaggtttgggaatcactgccctgccttggatggcaaattaagcaataaattacacctatttattcctcagttgggatactttcagttgaaccattctgagtagatttaagagaacaaaagacagcagaaataccttaaaagatattattggctgtcttatttttcagatatttgtatttaataaataccttagtagtagtcagaacctctttgagatgtttttagaaagaccactgatttgttttttaaaataatttttttggttccttagagtagagaagaaaagtaggggtgcaatatgtcaggtgtggggccagttatccatttattaaatgcaatttcaagtgtcttaaaaacaataattgccttattgcattttaatatttaataaagtagattaaataaagatttgtattataacagttattcttttatccattgccaaagcaacccttttttgcctattaaaatctggctaaactgttctgatgttgtttcttaattcattaaacatgaaactaggttttacaaactaaattatataaagacagaagtctaaaaatggtaccagaaaatttttttttaaaaaattaatgtgttattcaaatatccagcaattaaagactcatgagaaaaacagaatagcatattagatgtaacagtttaaaatggattgcaaatcaatgtcagacttaaatagaaaatatttattatcacctcatttctaccaataatttcagatgtttaatgggactttgaaaagataggaaaaaatagaaatgaaaatttatctcacctttaatactgtgaatactatttggagggtccctggtcagacatttaaatatcaaacttaagaactgacatggagcctttgattagtttatatacaggatctgaatatttacacacatagcacactatagcaacctcttgtaaaaaatcatgaagatagaattcaacagtgtatattctattaaaaagtaaattggctgggtgtggtggctcatgcatgtaatcccagcactttgggaggccgaggcaggaggatcgcttgagcccaagagtttgagaccagcctaggtgacaaagtgagaccccatctctacaaaaaaattaaaaaattatccagatgtggtggtgtttgcctgcggtcctagctacacaggaagttgaggcaggaggattgcttgagtgcaagagtttgaggctgcagagagccaagattgcaccattgcactccagcctgggtgacagagcgagaccctgtctcaaaaaataaaggaaattggctttgactatgaaaaacagccattttcaacctttttataaaacctcttcagggaatattggaatattatttttgtcaggcaaaaataatccagggcttgagcattgctgtagaatatgttatctgttcaaaacttagcagagcacgcatgcatcacatgcattgtcatcagtatttgagagctgaaccaatggtttttgatggttgccgtaacagaagatctgtgaagaggatggtggtttgcacctgttcctgaagtcaaactggaaaaggttgcaggtatttcaattttctcaatcattttgcataaatgtattaatattttgagtagtaatagttctaaacctgcaggaaggcatcattgtatactgtggtatgtagagaatactactcttacactgctctttatcttaaaatgttttggtatactgtgaatattttcctctaagtatttggtgtattttgacagttattaaaggagaatataaaattaaagattctggtctaaactaagaataatggaaagttgcttcgtcctgccttagaggagttttcagttcatcctcttcttgagaaactatgtgttgctgttactaaataaacatttactcaataaacgttttatttcctcaaaaaaaaag

SEQ ID NO: 433225 - DNA, 7505 bp, Homo sapiens
ggcggcagaggcggtgtccaggcttccgggcgggtagtccttcggctccggagccgcgactgcgctcgcctaggtggtgggcggggagggaaggaagggagcgggcgcaaggcggcggcggcggctgcgggtgaggaacttgttgcgcccgcggctgcgcggtgcccctccctccgctccagttcgtcggggcgggcgcggcggcggcggcgaaggaggagcgcggccggggcgatgcggcgctacctgcgcgtcgtggtgctgtgtgtggcctgcggcttctgctcgctcctttacgctttcagccagctcgccgtgtccctggaagaaggaacgggcggcggtggcgggaagccgcaggccgcggtggcttcctggctcgcgggcggcggacgcggcgccgtgagaggcgccggcgtcgcgggccccgcagcgcatcccggcgtgtcggacaggtgtaaagatttctctctgtgttactggaatccctattggatgctgccctctgatgtttgtggaatgaactgcttttgggaagcggcttttaggtacagtctgaaaatacagcctgttgagaaaatgcatctagctgtagttgcctgtggtgaaagactggaagaaactatgaccatgttgaagtcagctatcattttcagcatcaaacctcttcaattccatatttttgctgaagatcagctacatcatagctttaaaggcagacttgacaactggtcatttctacaaacatttaattatacgttataccccataacctttccaagtgagaatgcagcagagtggaaaaaactctttaaaccatgtgcttcgcagagattgttcttgccgttaatcctgaaagaagttgactcactattgtatgtcgacactgatatcctttttttacgaccagttgatgatatttggtctttactaaagaaatttaattccacacaaattgctgcaatggcaccagaacatgaggaacctcgaataggatggtataatcgctttgctaggcatccatattatggaaaaactggagtaaactctggagttatgttgatgaacatgactcgaatgagaaggaagtatttcaagaatgatatgacaactgtacgactacaatggggagatatacttatgccattgcttaaaaaatacaaactaaacatcacatggggtgatcaagatctattgaatatcgtgttttttcataatccagaaagcctttttgtttttccgtgtcaatggaattatcgaccagatcattgtatatatggaagcaattgccaagaagcagaagaaggaggaatctttattcttcatgggaacagaggtgtttaccatgacgataagcaaccagcatttagagctgtttatgaagcactgagaaattgttcttttgaagatgacaacatccgttccttattaaaacctttagaactggaactacaaaaaacagtgcatacatactgtggaaaaatttacaaaatatttatcaaacaactagcaaaaagtgtaagagatcgttatgccagatcaccaaaggaaaagtgattcttggtgactgcttaatcaaatggatgaaaacaaagaatcggaagataagtgtgaaggaatcgtcttggatgaagtattcaggaaggaattactcatctccagaataattttttttttcctaaagaagttaagtaagcagtattttcaggtaatgaagaataagttaaaatcttgggcctcaacattgaacattttttatctctgatgttttgtaatgttacttgctatcattccagtattgatgaaaatactattgaatgggtttaacctgcagacttctgttgactcatactctcaagagtggtaggggtgtgtagatggagaaaatgtacctcaaacagtgccaacactcaagactgtgagtagagcaataattttatgtcagcactaacctcactttaaaagtgtgagaaaaaagtttgtttacaggagcagaaacaggtctgttgtttctgaagaaatgtgatgtaactgatgtaaccattgacaatctatgtgtgcctttatacatttcatctctgttttaaaatatttttatgacaatcatgtttaaaattatttttagattacaagtaagctgcatgttaaaaattgagctgtgtaaggtagaggaaaaatagtgaaaactttgggattttaatctgtgtgtgcgtgtttgtgtgtgagagagagtgagaaatgtagtgtttcattttgtatgcattaaactgtcttgccaaaactcagatctaagattgttaaatagatatttggggaatttttttttaatcactttaaatgaaaaacgtcagctttactgggcattctggaagcaaaatatattatgctgatggtaaagtgagaaccttaagagtatactcatgatggtggaaagtgtgatggaccaaaatgcataagctatatacttcctgtgagtagtaattttagttacaatggagtagaaaaatatggtccatttaaacttgtcttctacctcataacggccttgcaagatacttttgaagaagcaaatgtctagagccttactttaagtaagttaaacaacttaagtggatgatttggaataagattgttacatccagctgtagaaaatgtggttttaattgggttgatgtgcatttttgaatatcacctaagacagttaatttttttaaatcttgagaaattacttctttggcattcttgacctgttagctaatataactatagattctgaatacttagcatatactatgctggggcacatatcttattttaccaacaatatgattatctatatggttatcttctttttctccctgatattttaatgctcaagtagaaaatggaaaatcatgaaggaaaaatacaacctgtgaaaattgtggcagttagctttgtgaagacacagtgacctctgtggagacatggaatatgcagaaagagatggttagtacagttgttctgtcgtctgcagttcagtcagggacaaattgagagaggaaagtttaagcagggtgcattagaagttgataaccagtccagcattcttagaacagatgggtttagagaacacgagttgtagttccttggcagaatgccatggtgaatataagaaactgtgaaattgagcttactgagtagaaaatgagaatactaaaaatgtgaagtttggagggtatgtattagatcatttctaatggtcctcaaataatgatcattgcctgcctgactatgtaagattcttgttgggagcttaagaatagattcctgagctaggcctttggagactctggcatgctgtgtctaggagggagtctgtaaaacaatttttaatgaagaaatttaaaaattacacaaaactagaatagtgcattggtactcaacatccagatctgacacttatcactatcttaccatgtttgcttcatttgtcatttttttgtttgcttaagtatcttaaaatcccatacattgtgttatttcactgctgtgaacactttgggtagataccacgatatcacacctaacagaggcagcagcagtccttcggcttcatctcatagccagtccttaagcaaatttccctgattatctcaaaaatcatcttctagttggtttgttagaatcaacagaatataagtcacatgatgatttcgtttttaacaatcacctcagatgactttgatgttagctactttgagaaccactggaaattattttgccaacttgaaagttcaagttaggataccacaattcttggcacgtttggtggattataaatgtgattttgaaatattagaggaagcatttggggttaatgacaggatatgaatttatattagtaagtttgataagataaaatttcctcagtgaacggagaatctcagccccatgggctctaattgattgggacttgtgtagagcgtggtcacagtttaatccaactggactgtatgctgtggtctcactcatgttgtggcttatttacactgtcacacacactacattgtggatcagttggaaggttcttcatctggtttatttagacctgacctaattgatcattttaccataaattgaattatagtgaaaactgtcttttgggtactgtttctacctaaaattaaaggtatcacaaaatatgtataataatttttaaatgaattttctgaatttatctttagacaaggtaattcttttgaattctaaagaaatgcagttcttggagttgatgagaggttaaattatagatggacaacttagagaacgtattccatcttcatataaatggtctttcataaaacatagtgtatctatgcagtttatataaactacatgatttattatttgagtctatgtattctgacctcagaactatctctgggctacagtattaccaaagtgggatgcctttaaaatgcagtcaaacttcatttgtatgaagtagaaaagaacttgggaaacctttaaaaatatatattgtgatttatgctttaagaaaatgcatacttttttctaatgaagagtagttcataatatataagggttttaaggccctgaaataacattagtgcttactcattgctctctcatcttgcctccagtcagatgttattggtatagtgaaaagaagaccagattttgaactagatctggattctctttttagtaactcaggcatgttatttaaccttctctgtgccttaggtttttaagtacaatcagtgtacccttcaaacctcacaagatgaaactcagaagagataatggatttggaagcattttgcgtggcttatattatgccacgccagtgttactgttgaagttctgttttgttctgttgttttctgtacagagcgttcagtttactcaggctgaatgttttctgacatatatctccagtatgaatttgtttatgtaaggaagagtttttcaggaagagaaagtagagaagaaaagaatgatgtaactaatcaaaaaagaaggaaaagagaggaagtgagaaaaggggtgaggaaagagaaaggagtaagaatggggatggcaaagggcagagtaagagaaaagatggaatgagtgtatggaaaattgagaagtagagatggagagaaatggtgtggaaacatttactttttgagttgtagccctcacactacatcagtttgcttgcctgggctctctggggtcaggaaaggtgctgacttccatggaatggggcagcagggcctgctgtatttggtttgttagtactagagttgtttcccaatcaccctactcactgatcatttagtgccaattcaacattttatgtcttttttttttagtggatcccagtttgtgagctaggacctgtggaaatacaagtatcttcctttttaactttattgttttagccatcccaagtgttagactgcaagactaactacatattccccagtggaggttggaagtggaggggactgcttcattaggtctgaagggggccaaggaatgtgttgcagcagttttcgcagatgatactgacgagaggccaggtttgggaatcactgccctgccttggatggcaaattaagcaataaattacacctatttattcctcagttgggatactttcagttgaaccattctgagtagatttaagagaacaaaagacagcagaaataccttaaaagatattattggctgtcttatttttcagatatttgtatttaataaataccttagtagtagtcagaacctctttgagatgtttttagaaagaccactgatttgttttttaaaataatttttttggttccttagagtagagaagaaaagtaggggtgcaatatgtcaggtgtggggccagttatccatttattaaatgcaatttcaagtgtcttaaaaacaataattgccttattgcattttaatatttaataaagtagattaaataaagatttgtattataacagttattcttttatccattgccaaagcaacccttttttgcctattaaaatctggctaaactgttctgatgttgtttcttaattcattaaacatgaaactaggttttacaaactaaattatataaagacagaagtctaaaaatggtaccagaaaatttttttttaaaaaattaatgtgttattcaaatatccagcaattaaagactcatgagaaaaacagaatagcatattagatgtaacagtttaaaatggattgcaaatcaatgtcagacttaaatagaaaatatttattatcacctcatttctaccaataatttcagatgtttaatgggactttgaaaagataggaaaaaatagaaatgaaaatttatctcacctttaatactgtgaatactatttggagggtccctggtcagacatttaaatatcaaacttaagaactgacatggagcctttgattagtttatatacaggatctgaatatttacacacatagcacactatagcaacctcttgtaaaaaatcatgaagatagaattcaacagtgtatattctattaaaaagtaaattggctgggtgtggtggctcatgcatgtaatcccagcactttgggaggccgaggcaggaggatcgcttgagcccaagagtttgagaccagcctaggtgacaaagtgagaccccatctctacaaaaaaattaaaaaattatccagatgtggtggtgtttgcctgcggtcctagctacacaggaagttgaggcaggaggattgcttgagtgcaagagtttgaggctgcagagagccaagattgcaccattgcactccagcctgggtgacagagcgagaccctgtctcaaaaaataaaggaaattggctttgactatgaaaaacagccattttcaacctttttataaaacctcttcagggaatattggaatattatttttgtcaggcaaaaataatccagggcttgagcattgctgtagaatatgttatctgttcaaaacttagcagagcacgcatgcatcacatgcattgtcatcagtatttgagagctgaaccaatggtttttgatggttgccgtaacagaagatctgtgaagaggatggtggtttgcacctgttcctgaagtcaaactggaaaaggttgcaggtatttcaattttctcaatcattttgcataaatgtattaatattttgagtagtaatagttctaaacctgcaggaaggcatcattgtatactgtggtatgtagagaatactactcttacactgctctttatcttaaaatgttttggtatactgtgaatattttcctctaagtatttggtgtattttgacagttattaaaggagaatataaaattaaagattctggtctaaactaagaataatggaaagttgcttcgtcctgccttagaggagttttcagttcatcctcttcttgagaaactatgtgttgctgttactaaataaacatttactcaataaacgttttatttcctcaaaaaaaaag

SEQ ID NO: 433226 - DNA, 7358 bp, Homo sapiens
ggcggcagaggcggtgtccaggcttccgggcgggtagtccttcggctccggagccgcgactgcgctcgcctaggtggtgggcggggagggaaggaagggagcgggcgcaaggcggcggcggcggctgcgggtgaggaacttgttgcgcccgcggctgcgcggtgcccctccctccgctccagttcgtcggggcgggcgcggcggcggcggcgaaggaggagcgcggccggggcgatgcggcgctacctgcgcgtcgtggtgctgtgtgtggcctgcggcttctgctcgctcctttacgctttcagccagctcgccgtgtccctggaagaaggaacgggcggcggtggcgggaagccgcaggccgcggtggcttcctggctcgcgggcggcggacgcggcgccgtgagaggcgccggcgtcgcgggccccgcagcgcatcccggcgtgtcggacaggtacagtctgaaaatacagcctgttgagaaaatgcatctagctgtagttgcctgtggtgaaagactggaagaaactatgaccatgttgaagtcagctatcattttcagcatcaaacctcttcaattccatatttttgctgaagatcagctacatcatagctttaaaggcagacttgacaactggtcatttctacaaacatttaattatacgttataccccataacctttccaagtgagaatgcagcagagtggaaaaaactctttaaaccatgtgcttcgcagagattgttcttgccgttaatcctgaaagaagttgactcactattgtatgtcgacactgatatcctttttttacgaccagttgatgatatttggtctttactaaagaaatttaattccacacaaattgctgcaatggcaccagaacatgaggaacctcgaataggatggtataatcgctttgctaggcatccatattatggaaaaactggagtaaactctggagttatgttgatgaacatgactcgaatgagaaggaagtatttcaagaatgatatgacaactgtacgactacaatggggagatatacttatgccattgcttaaaaaatacaaactaaacatcacatggggtgatcaagatctattgaatatcgtgttttttcataatccagaaagcctttttgtttttccgtgtcaatggaattatcgaccagatcattgtatatatggaagcaattgccaagaagcagaagaaggaggaatctttattcttcatgggaacagaggtgtttaccatgacgataagcaaccagcatttagagctgtttatgaagcactgagaaattgttcttttgaagatgacaacatccgttccttattaaaacctttagaactggaactacaaaaaacagtgcatacatactgtggaaaaatttacaaaatatttatcaaacaactagcaaaaagtgtaagagatcgttatgccagatcaccaaaggaaaagtgattcttggtgactgcttaatcaaatggatgaaaacaaagaatcggaagataagtgtgaaggaatcgtcttggatgaagtattcaggaaggaattactcatctccagaataattttttttttcctaaagaagttaagtaagcagtattttcaggtaatgaagaataagttaaaatcttgggcctcaacattgaacattttttatctctgatgttttgtaatgttacttgctatcattccagtattgatgaaaatactattgaatgggtttaacctgcagacttctgttgactcatactctcaagagtggtaggggtgtgtagatggagaaaatgtacctcaaacagtgccaacactcaagactgtgagtagagcaataattttatgtcagcactaacctcactttaaaagtgtgagaaaaaagtttgtttacaggagcagaaacaggtctgttgtttctgaagaaatgtgatgtaactgatgtaaccattgacaatctatgtgtgcctttatacatttcatctctgttttaaaatatttttatgacaatcatgtttaaaattatttttagattacaagtaagctgcatgttaaaaattgagctgtgtaaggtagaggaaaaatagtgaaaactttgggattttaatctgtgtgtgcgtgtttgtgtgtgagagagagtgagaaatgtagtgtttcattttgtatgcattaaactgtcttgccaaaactcagatctaagattgttaaatagatatttggggaatttttttttaatcactttaaatgaaaaacgtcagctttactgggcattctggaagcaaaatatattatgctgatggtaaagtgagaaccttaagagtatactcatgatggtggaaagtgtgatggaccaaaatgcataagctatatacttcctgtgagtagtaattttagttacaatggagtagaaaaatatggtccatttaaacttgtcttctacctcataacggccttgcaagatacttttgaagaagcaaatgtctagagccttactttaagtaagttaaacaacttaagtggatgatttggaataagattgttacatccagctgtagaaaatgtggttttaattgggttgatgtgcatttttgaatatcacctaagacagttaatttttttaaatcttgagaaattacttctttggcattcttgacctgttagctaatataactatagattctgaatacttagcatatactatgctggggcacatatcttattttaccaacaatatgattatctatatggttatcttctttttctccctgatattttaatgctcaagtagaaaatggaaaatcatgaaggaaaaatacaacctgtgaaaattgtggcagttagctttgtgaagacacagtgacctctgtggagacatggaatatgcagaaagagatggttagtacagttgttctgtcgtctgcagttcagtcagggacaaattgagagaggaaagtttaagcagggtgcattagaagttgataaccagtccagcattcttagaacagatgggtttagagaacacgagttgtagttccttggcagaatgccatggtgaatataagaaactgtgaaattgagcttactgagtagaaaatgagaatactaaaaatgtgaagtttggagggtatgtattagatcatttctaatggtcctcaaataatgatcattgcctgcctgactatgtaagattcttgttgggagcttaagaatagattcctgagctaggcctttggagactctggcatgctgtgtctaggagggagtctgtaaaacaatttttaatgaagaaatttaaaaattacacaaaactagaatagtgcattggtactcaacatccagatctgacacttatcactatcttaccatgtttgcttcatttgtcatttttttgtttgcttaagtatcttaaaatcccatacattgtgttatttcactgctgtgaacactttgggtagataccacgatatcacacctaacagaggcagcagcagtccttcggcttcatctcatagccagtccttaagcaaatttccctgattatctcaaaaatcatcttctagttggtttgttagaatcaacagaatataagtcacatgatgatttcgtttttaacaatcacctcagatgactttgatgttagctactttgagaaccactggaaattattttgccaacttgaaagttcaagttaggataccacaattcttggcacgtttggtggattataaatgtgattttgaaatattagaggaagcatttggggttaatgacaggatatgaatttatattagtaagtttgataagataaaatttcctcagtgaacggagaatctcagccccatgggctctaattgattgggacttgtgtagagcgtggtcacagtttaatccaactggactgtatgctgtggtctcactcatgttgtggcttatttacactgtcacacacactacattgtggatcagttggaaggttcttcatctggtttatttagacctgacctaattgatcattttaccataaattgaattatagtgaaaactgtcttttgggtactgtttctacctaaaattaaaggtatcacaaaatatgtataataatttttaaatgaattttctgaatttatctttagacaaggtaattcttttgaattctaaagaaatgcagttcttggagttgatgagaggttaaattatagatggacaacttagagaacgtattccatcttcatataaatggtctttcataaaacatagtgtatctatgcagtttatataaactacatgatttattatttgagtctatgtattctgacctcagaactatctctgggctacagtattaccaaagtgggatgcctttaaaatgcagtcaaacttcatttgtatgaagtagaaaagaacttgggaaacctttaaaaatatatattgtgatttatgctttaagaaaatgcatacttttttctaatgaagagtagttcataatatataagggttttaaggccctgaaataacattagtgcttactcattgctctctcatcttgcctccagtcagatgttattggtatagtgaaaagaagaccagattttgaactagatctggattctctttttagtaactcaggcatgttatttaaccttctctgtgccttaggtttttaagtacaatcagtgtacccttcaaacctcacaagatgaaactcagaagagataatggatttggaagcattttgcgtggcttatattatgccacgccagtgttactgttgaagttctgttttgttctgttgttttctgtacagagcgttcagtttactcaggctgaatgttttctgacatatatctccagtatgaatttgtttatgtaaggaagagtttttcaggaagagaaagtagagaagaaaagaatgatgtaactaatcaaaaaagaaggaaaagagaggaagtgagaaaaggggtgaggaaagagaaaggagtaagaatggggatggcaaagggcagagtaagagaaaagatggaatgagtgtatggaaaattgagaagtagagatggagagaaatggtgtggaaacatttactttttgagttgtagccctcacactacatcagtttgcttgcctgggctctctggggtcaggaaaggtgctgacttccatggaatggggcagcagggcctgctgtatttggtttgttagtactagagttgtttcccaatcaccctactcactgatcatttagtgccaattcaacattttatgtcttttttttttagtggatcccagtttgtgagctaggacctgtggaaatacaagtatcttcctttttaactttattgttttagccatcccaagtgttagactgcaagactaactacatattccccagtggaggttggaagtggaggggactgcttcattaggtctgaagggggccaaggaatgtgttgcagcagttttcgcagatgatactgacgagaggccaggtttgggaatcactgccctgccttggatggcaaattaagcaataaattacacctatttattcctcagttgggatactttcagttgaaccattctgagtagatttaagagaacaaaagacagcagaaataccttaaaagatattattggctgtcttatttttcagatatttgtatttaataaataccttagtagtagtcagaacctctttgagatgtttttagaaagaccactgatttgttttttaaaataatttttttggttccttagagtagagaagaaaagtaggggtgcaatatgtcaggtgtggggccagttatccatttattaaatgcaatttcaagtgtcttaaaaacaataattgccttattgcattttaatatttaataaagtagattaaataaagatttgtattataacagttattcttttatccattgccaaagcaacccttttttgcctattaaaatctggctaaactgttctgatgttgtttcttaattcattaaacatgaaactaggttttacaaactaaattatataaagacagaagtctaaaaatggtaccagaaaatttttttttaaaaaattaatgtgttattcaaatatccagcaattaaagactcatgagaaaaacagaatagcatattagatgtaacagtttaaaatggattgcaaatcaatgtcagacttaaatagaaaatatttattatcacctcatttctaccaataatttcagatgtttaatgggactttgaaaagataggaaaaaatagaaatgaaaatttatctcacctttaatactgtgaatactatttggagggtccctggtcagacatttaaatatcaaacttaagaactgacatggagcctttgattagtttatatacaggatctgaatatttacacacatagcacactatagcaacctcttgtaaaaaatcatgaagatagaattcaacagtgtatattctattaaaaagtaaattggctgggtgtggtggctcatgcatgtaatcccagcactttgggaggccgaggcaggaggatcgcttgagcccaagagtttgagaccagcctaggtgacaaagtgagaccccatctctacaaaaaaattaagaggcaggaggattgcttgagtgcaagagtttgaggctgcagagagccaagattgcaccattgcactccagcctgggtgacagagcgagaccctgtctcaaaaaataaaggaaattggctttgactatgaaaaacagccattttcaacctttttataaaacctcttcagggaatattggaatattatttttgtcaggcaaaaataatccagggcttgagcattgctgtagaatatgttatctgttcaaaacttagcagagcacgcatgcatcacatgcattgtcatcagtatttgagagctgaaccaatggtttttgatggttgccgtaacagaagatctgtgaagaggatggtggtttgcacctgttcctgaagtcaaactggaaaaggttgcaggtatttcaattttctcaatcattttgcataaatgtattaatattttgagtagtaatagttctaaacctgcaggaaggcatcattgtatactgtggtatgtagagaatactactcttacactgctctttatcttaaaatgttttggtatactgtgaatattttcctctaagtatttggtgtattttgacagttattaaaggagaatataaaattaaagattctggtctaaactaagaataatggaaagttgcttcgtcctgccttagaggagttttcagttcatcctcttcttgagaaactatgtgttgctgttactaaataaacatttactcaataaacgttttatttcctcaaaaaaaaag

SEQ ID NO: 433227 - DNA, 479 bp, Homo sapiens
tttaaaataatggtgccctaagtaagggagaaatcagttttccaaaatctttatcatagcaatttggatttataattttatttgctttaaaatagaacagtaagttatcgtgttactgagtaaattccttgttagctccaaaccaaaatactcacacaggactcttatttctgtcttactctgttaggtgtaaagatttctctctgtgttactggaatccctattggatgctgccctctgatgtttgtggaatgaactgcttttgggaagcggcttttaggtaggcacttaatatttaattggtagatcagtgtagataaggttagatagttgataataaaacctttgtaataggatgtaagaatgtttcttatgatattatacaaataatttattttcttattgggttttctatttttcccattttgtagttgttattgctattttttagtacatactgtgtataaatgctttaaatt

SEQ ID NO: 433228 - DNA, 523 bp, Homo sapiens
acggaaacactgtttcccaatctatagtatagtctaccttcagggttttaaagttctatttaaaataatggtgccctaagtaagggagaaatcagttttccaaaatctttatcatagcaatttggatttataattttatttgctttaaaatagaacagtaagttatcgtgttactgagtaaattccttgttagctccaaaccaaaatactcacacaggactcttatttctgtcttactctgttaggtgtaaagatttctctctgtgttactggaatccctattggatgctgccctctgatgtttgtggaatgaactgcttttgggaagcggcttttaggtaggcacttaatatttaattggtagatcagtgtagataaggttagatagttgataataaaacctttgtaataggatgtaagaatgtttcttatgatattatacaaataatttattttcttattgggttttctatttttcccattttgtagttgttattgctattttttagtacatactgtgtat

SEQ ID NO: 433229 - DNA, 3894 bp, Homo sapiens
gtccggtcggcttttctcttccttcggctgccggcgccagcacgtcctgttttcgttggccgcgctgggatggccgccacagctgtaggtgctgctagtgtttagcgctggtctttgccgggcgttgagggcagctcagcctccttgtttgtccggttcgcctgtgcgtggtactcaagggcaccagtattcccgcggtcggcagcatgggtcgggagtcacgccactatcgaaaacgatcggcatcccggggtcgctctggaagtcggtctagaagtcgctcaccctcagacaaaagaagtaaacgtggagatgacagacggtctagaagtagagatagagataggaggagagagaggtctcgtagcagggataaaagaagatctcggtcaagggacaggaagcgtctgagacgttccagaagtagagagagagacagaagccgagagcgaagaagatctcgaagtagagacaggagacgctcaaggagtagaagccggggccggcgatcccgatcctccagtcctggaaataaaagcaagaaaactgagaatagatctaggtccaaagagaaaactgatggtggggaaagttctaaagagaagaaaaaagacaaagatgacaaggaggatgaaaaagaaaaagatgctggcaactttgaccagaataagctggaagaagaaatgagaaagcgaaaagaaagagtagaaaaatggcgagaagagcaacgtaaaaaggctatggaaaacataggagaactgaaaaaggaaatcgaagagatgaaacaagggaaaaagtggagtttagaggacgatgatgatgacgaagatgatcctgcagaagctgaaaaggagggaaatgaaatggagggtgaggagttagatccattagatgcttacatggaagaagtgaaagaggaagtaaaaaaatttaacatgagaagtgtaaaaggtggtgggggaaatgaaaagaagtctgggccaacggtcacaaaagttgtcactgttgtgacaaccaaaaaagcagttgtggattctgataagaagaaaggtgagctgatggagaatgaccaggatgccatggagtattcttcagaggaggaagaagttgatcttcagacagcccttacagggtatcaaacaaaacagcgaaagcttctagaaccagttgatcatggaaaaattgagtatgagccatttaggaaaaacttctatgttgaagttccagaactagcaaaaatgtctcaagaagaggtaaatgtgtttcgattggaaatggagggcattacagttaaaggaaaaggttgccccaaaccaattaaatcctgggtccagtgtggaatttccatgaagatcttaaattccctcaagaagcatggctatgaaaagcccacgcccatccaaacccaagctattcctgctataatgtctggacgagatttgattggcattgccaaaacaggaagtggaaagaccattgcttttctgttgcccatgtttagacacatcatggatcagaggtcattagaggaaggagaggggccaatagctgtcatcatgactccaactcgagaactggctttacagattactaaagagtgtaagaagttttccaagactttgggacttagagtggtctgtgtttacggaggaacaggaatcagtgagcagattgctgagctgaaaagaggtgctgaaattattgtttgcacacctggtcgaatgattgacatgttagccgctaacagtggtcgggtcacaaatcttcgaagagtgacatatgttgttttagatgaagcagacagaatgtttgacatgggttttgaaccccaggtcatgcgcatcgtggataatgttcgtcctgatcgacagacggttatgttttcagctactttccccagagctatggaggctttggctcgcaggatcctcagtaaacctattgaagtacaagttggaggcaggagtgtggtttgctcagatgtggagcaacaagtgattgtgattgaagaagaaaagaaattcttgaagttacttgagcttctaggccattatcaagagtcaggatctgtcattatatttgtggataagcaggaacatgctgatggtcttcttaaggatttaatgagagcatcttatccttgcatgtctcttcatggaggcattgatcaatatgacagagatagcatcataaatgactttaagaatgggacctgcaaacttcttgtggctacctctgttgctgcccgaggtctagatgtgaaacatctgattcttgtagtaaattatagctgccccaaccattatgaggattatgtacacagagcagggcggactggaagagcaggaaacaagggttatgcttatacttttatcacagaggatcaagctcgctatgctggtgacataattaaagctcttgaattgtcagggactgcagtacctcctgatttagagaaactgtggagtgatttcaaagatcagcagaaagctgaggggaaaataattaaaaagagtagtgggttctctggtaagggattcaagtttgatgaaacagaacaagctttggctaatgagaggaagaagttacaaaaagcagctcttggtctacaagattcagatgatgaggatgctgcagttgatattgatgagcaaattgaaagcatgtttaattcaaagaagagagtaaaggatatggctgctcctggaacatcaagtgttcctgctccaactgcaggaaatgctgagaaattagaaattgctaagagattggctcttagaatcaatgcccagaagaatttgggcatcgagtctcaggtagatgtgatgcagcaggccaccaatgcaattcttaggggtggcaccattctggctcccactgtttctgcaaaaaccattgcagaacaacttgctgaaaagatcaatgccaagctcaattatgtgccgttagagaaacaagaagaagagagacaggatggtggacagaatgaatcttttaagagatatgaagaagaattagagatcaatgacttcccacagactgctaggtggaaagttacctctaaggaagctctgcagagaatcagtgaatactctgaagccgcaattacaatcagaggaacctacttccctcctggcaaagaacccaaggaaggcgagcggaagatttacttggcaattgaaagtgccaatgaactggctgtgcagaaagcaaaggcagaaatcaccaggctcataaaagaagagctgatccggctgcaaaattcataccaaccaacaaataaaggaagatacaaagtcttatagacatccggaaaaaagatttttacctgtgctggtctatgatgtatgtggcagttgctgtctgcagtttacaatgtattgtaaatgaagattttttaaattctatcttgctgattttttttaaatataagaaactggtacttggtaaagaaatctgtccgtaagtacccccacaatcagtcaaactatatttaaagccagcctgttttcagagtatgatgtcctttaatgtaaactcaaatatcaatattttaaatgtccggataatattctagaggtttaaaaaatggaaatatttgaactttctattgaagacaataaagtacacaagtcgttaaggggctattcactttatcctgtactttcaatgaaattgtgatcatttcctaagaaaaggtaaaattcactatcatattttgtgtccccaccttgatgttacatgactctggaacaatatgaactggatttaagaatgttataatagaagtcttacaaaatgggttgagagtttttgtttcaatttttatcatcataaatgggcaaaaagtagttggactaatttcggtttttatacaagtaaagatttaatagt

SEQ ID NO: 433230 - DNA, 815 bp, Homo sapiens
  misc_feature (465)..(465): n is a, c, g, or t
  misc_feature (473)..(473): n is a, c, g, or t
cctccccgcgccccgcccccccccgccccttcaggctcagtaccggcctggtggttcaattcggccgcaggattacttacatggaagaagtgaaagaggaagtaaaaaaatttaacatgagaagtgtaaaaggtggtgggggaaatgaaaagaagtctgggccaacggtcacaaaagttgtcactgttgtgacaaccaaaaaagcagttgtggattctgataagaagaaaggtgagctgatggagaatgaccaggatgccatggagtattcttcatgaggaggaagaagaaggtgatggtgaggaagaggatggagatgaagatgaggaagctgagtcagctacgggcaagcgggcagctgaagatgatgaggatgacgatgtcgataccaagaagcagaagaccgacgaggatgactagacagcaaaaaaggaaaagttaaactaaaaaaaaaaaggccgccgngacctatncaccctccacttcccgtctcagaatctaaacggtggtcaccttcgagtagagaggtccgcccggccaccgtgggcaggtgccacccgcagatgacacgcgctctccatcagccaatccaaaccatgagaattgtgcaaccaggggaaggaaaaaagaaccaaaacttccaaggcctgcttttttctttaaaagtactttaccacggccattcgcggtattttttatttacattctatcatcctccgtcatatggtcgggtcagacatcttcaatgatctcggatgacaaaccagcctcggagcgtctctgtcctactctgggcttactgtggtgtgccctgc

SEQ ID NO: 433231 - DNA, 370 bp, Homo sapiens
atgaaagaaataaattagtattctcatttttttcgttgagcacttataagacttggctttacttcattgagacctccacctttaataatggtagtgattaagattctttcaatgtgggacagaatcccctgatctgaaatagtagctccatttggtcatagaataaatgaaaagtgtccccctttcagacgttccagaagtagagagagagacagaagccgagagcgaagaagatctcgaagtagagacaggagacgctcaaggagtagaagccggggccggcgatcccgatcctccagtctgtccattaagttgaagtagatcatcttaaaggtcttcatcctagttgtcttcacattgagtaggctga

SEQ ID NO: 433232 - DNA, 262 bp, Homo sapiens
tgccggtccccatgcactttgtcaaaagaataaatgaaaagtgtccccctttcagacgttccagaagtagagagagagacagaagccgagagcgaagaagatctcgaagtagagacaggagacgctcaaggagtagaagccggggccggcgatcccgatcctccagtcctggaaataaaagcaagaaaactgagaataggtaatgttatcattgggctgcatctatagtgcagactggggactgcttcccttctctgcgccg

SEQ ID NO: 433233 - DNA, 3534 bp, Homo sapiens
gggaagtataaagcgttgagctcaacgctttatacttcaggaagcgtctgagacgttccagaagtagagagagagacagaagccgagagcgaagaagatctcgaagtagagacaggagacgctcaaggagtagaagccggggccggcgatcccgatcctccagtcctggaaataaaagcaagaaaactgagaatagatctaggtccaaagagaaaactgatggtggggaaagttctaaagagaagaaaaaagacaaagatgacaaggaggatgaaaaagaaaaagatgctggcaactttgaccagaataagctggaagaagaaatgagaaagcgaaaagaaagagtagaaaaatggcgagaagagcaacgtaaaaaggctatggaaaacataggagaactgaaaaaggaaatcgaagagatgaaacaagggaaaaagtggagtttagaggacgatgatgatgacgaagatgatcctgcagaagctgaaaaggagggaaatgaaatggagggtgaggagttagatccattagatgcttacatggaagaagtgaaagaggaagtaaaaaaatttaacatgagaagtgtaaaaggtggtgggggaaatgaaaagaagtctgggccaacggtcacaaaagttgtcactgttgtgacaaccaaaaaagcagttgtggattctgataagaagaaaggtgagctgatggagaatgaccaggatgccatggagtattcttcagaggaggaagaagttgatcttcagacagcccttacagggtatcaaacaaaacagcgaaagcttctagaaccagttgatcatggaaaaattgagtatgagccatttaggaaaaacttctatgttgaagttccagaactagcaaaaatgtctcaagaagaggtaaatgtgtttcgattggaaatggagggcattacagttaaaggaaaaggttgccccaaaccaattaaatcctgggtccagtgtggaatttccatgaagatcttaaattccctcaagaagcatggctatgaaaagcccacgcccatccaaacccaagctattcctgctataatgtctggacgagatttgattggcattgccaaaacaggaagtggaaagaccattgcttttctgttgcccatgtttagacacatcatggatcagaggtcattagaggaaggagaggggccaatagctgtcatcatgactccaactcgagaactggctttacagattactaaagagtgtaagaagttttccaagactttgggacttagagtggtctgtgtttacggaggaacaggaatcagtgagcagattgctgagctgaaaagaggtgctgaaattattgtttgcacacctggtcgaatgattgacatgttagccgctaacagtggtcgggtcacaaatcttcgaagagtgacatatgttgttttagatgaagcagacagaatgtttgacatgggttttgaaccccaggtcatgcgcatcgtggataatgttcgtcctgatcgacagacggttatgttttcagctactttccccagagctatggaggctttggctcgcaggatcctcagtaaacctattgaagtacaagttggaggcaggagtgtggtttgctcagatgtggagcaacaagtgattgtgattgaagaagaaaagaaattcttgaagttacttgagcttctaggccattatcaagagtcaggatctgtcattatatttgtggataagcaggaacatgctgatggtcttcttaaggatttaatgagagcatcttatccttgcatgtctcttcatggaggcattgatcaatatgacagagatagcatcataaatgactttaagaatgggacctgcaaacttcttgtggctacctctgttgctgcccgaggtctagatgtgaaacatctgattcttgtagtaaattatagctgccccaaccattatgaggattatgtacacagagcagggcggactggaagagcaggaaacaagggttatgcttatacttttatcacagaggatcaagctcgctatgctggtgacataattaaagctcttgaattgtcagggactgcagtacctcctgatttagagaaactgtggagtgatttcaaagatcagcagaaagctgaggggaaaataattaaaaagagtagtgggttctctggtaagggattcaagtttgatgaaacagaacaagctttggctaatgagaggaagaagttacaaaaagcagctcttggtctacaagattcagatgatgaggatgctgcagttgatattgatgagcaaattgaaagcatgtttaattcaaagaagagagtaaaggatatggctgctcctggaacatcaagtgttcctgctccaactgcaggaaatgctgagaaattagaaattgctaagagattggctcttagaatcaatgcccagaagaatttgggcatcgagtctcaggtagatgtgatgcagcaggccaccaatgcaattcttaggggtggcaccattctggctcccactgtttctgcaaaaaccattgcagaacaacttgctgaaaagatcaatgccaagctcaattatgtgccgttagagaaacaagaagaagagagacaggatggtggacagaatgaatcttttaagagatatgaagaagaattagagatcaatgacttcccacagactgctaggtggaaagttacctctaaggaagctctgcagagaatcagtgaatactctgaagccgcaattacaatcagaggaacctacttccctcctggcaaagaacccaaggaaggcgagcggaagatttacttggcaattgaaagtgccaatgaactggctgtgcagaaagcaaaggcagaaatcaccaggctcataaaagaagagctgatccggctgcaaaattcataccaaccaacaaataaaggaagatacaaagtcttatagacatccggaaaaaagatttttacctgtgctggtctatgatgtatgtggcagttgctgtctgcagtttacaatgtattgtaaatgaagattttttaaattctatcttgctgattttttttaaatataagaaactggtacttggtaaagaaatctgtccgtaagtacccccacaatcagtcaaactatatttaaagccagcctgttttcagagtatgatgtcctttaatgtaaactcaaatatcaatattttaaatgtccggataatattctagaggtttaaaaaatggaaatatttgaactttctattgaagacaataaagtacacaagtcgttaaggggctattcactttatcctgtactttcaatgaaattgtgatcatttcctaagaaaaggtaaaattcactatcatattttgtgtccccaccttgatgttacatgactctggaacaatatgaactggatttaagaatgttataatagaagtcttacaaaatgggttgagagtttttgtttcaatttttatcatcataaatgggcaaaaagtagttggactaatttcggtttttatacaagtaaagatttaatagt

SEQ ID NO: 433234 - DNA, 3583 bp, Homo sapiens
gggaagtataaagcgttgagctcaacgctttatacttcaggaagcgtctgagacgttccagaagtagagagagagacagaagccgagagcgaagaagatctcgaagtagagacaggagacgctcaaggagtagaagccggggccggcgatcccgatcctccagtcctggaaataaaagcaagaaaactgagaatagatctaggtccaaagagaaaactgatggtggggaaagttctaaagagaagaaaaaagacaaagatgacaaggaggatgaaaaagaaaaagatgctggcaactttgaccagaataagctggaagaagaaatgagaaagcgaaaagaaagagtagaaaaatggcgagaagagcaacgtaaaaaggctatggaaaacataggagaactgaaaaaggaaatcgaagagatgaaacaagggaaaaagtggagtttagaggacgatgatgatgacgaagatgatcctgcagaagctgaaaaggagggaaatgaaatggagggtgaggagttagatccattagatgcttacatggaagaagtgaaagaggaagtaaaaaaatttaacatgagaagtgtaaaaggtggtgggggaaatgaaaagaagtctgggccaacggtcacaaaagttgtcactgttgtgacaaccaaaaaagcagttgtggattctgataagaagaaaggtgagctgatggagaatgaccaggatgccatggagtattcttcagaggaggaagaagttgatcttcagacagcccttacagggtatcaaacaaaacagcgaaagcttctagaaccagttgatcatggaaaaattgagtatgagccatttaggaaaaacttctatgttgaagttccagaactagcaaaaatgtctcaagaagaggtaaatgtgtttcgattggaaatggagggcattacagttaaaggaaaaggttgccccaaaccaattaaatcctgggtccagtgtggaatttccatgaagatcttaaattccctcaagaagcatggctatgaaaagcccacgcccatccaaacccaagctattcctgctataatgtctggacgagatttgattggcattgccaaaacaggaagtggaaagaccattgcttttctgttgcccatgtttagacacatcatggatcagaggtcattagaggaaggagaggggccaatagctgtcatcatgactccaactcgagaactggctttacagattactaaagagtgtaagaagttttccaagactttgggacttagagtggtctgtgtttacggaggaacaggaatcagtgagcagattgctgagctgaaaagaggtgctgaaattattgtttgcacacctggtcgaatgattgacatgttagccgctaacagtggcccttcaagatttatagaactgggcttccgagacttaaaccatcaaaggtcgggtcacaaatcttcgaagagtgacatatgttgttttagatgaagcagacagaatgtttgacatgggttttgaaccccaggtcatgcgcatcgtggataatgttcgtcctgatcgacagacggttatgttttcagctactttccccagagctatggaggctttggctcgcaggatcctcagtaaacctattgaagtacaagttggaggcaggagtgtggtttgctcagatgtggagcaacaagtgattgtgattgaagaagaaaagaaattcttgaagttacttgagcttctaggccattatcaagagtcaggatctgtcattatatttgtggataagcaggaacatgctgatggtcttcttaaggatttaatgagagcatcttatccttgcatgtctcttcatggaggcattgatcaatatgacagagatagcatcataaatgactttaagaatgggacctgcaaacttcttgtggctacctctgttgctgcccgaggtctagatgtgaaacatctgattcttgtagtaaattatagctgccccaaccattatgaggattatgtacacagagcagggcggactggaagagcaggaaacaagggttatgcttatacttttatcacagaggatcaagctcgctatgctggtgacataattaaagctcttgaattgtcagggactgcagtacctcctgatttagagaaactgtggagtgatttcaaagatcagcagaaagctgaggggaaaataattaaaaagagtagtgggttctctggtaagggattcaagtttgatgaaacagaacaagctttggctaatgagaggaagaagttacaaaaagcagctcttggtctacaagattcagatgatgaggatgctgcagttgatattgatgagcaaattgaaagcatgtttaattcaaagaagagagtaaaggatatggctgctcctggaacatcaagtgttcctgctccaactgcaggaaatgctgagaaattagaaattgctaagagattggctcttagaatcaatgcccagaagaatttgggcatcgagtctcaggtagatgtgatgcagcaggccaccaatgcaattcttaggggtggcaccattctggctcccactgtttctgcaaaaaccattgcagaacaacttgctgaaaagatcaatgccaagctcaattatgtgccgttagagaaacaagaagaagagagacaggatggtggacagaatgaatcttttaagagatatgaagaagaattagagatcaatgacttcccacagactgctaggtggaaagttacctctaaggaagctctgcagagaatcagtgaatactctgaagccgcaattacaatcagaggaacctacttccctcctggcaaagaacccaaggaaggcgagcggaagatttacttggcaattgaaagtgccaatgaactggctgtgcagaaagcaaaggcagaaatcaccaggctcataaaagaagagctgatccggctgcaaaattcataccaaccaacaaataaaggaagatacaaagtcttatagacatccggaaaaaagatttttacctgtgctggtctatgatgtatgtggcagttgctgtctgcagtttacaatgtattgtaaatgaagattttttaaattctatcttgctgattttttttaaatataagaaactggtacttggtaaagaaatctgtccgtaagtacccccacaatcagtcaaactatatttaaagccagcctgttttcagagtatgatgtcctttaatgtaaactcaaatatcaatattttaaatgtccggataatattctagaggtttaaaaaatggaaatatttgaactttctattgaagacaataaagtacacaagtcgttaaggggctattcactttatcctgtactttcaatgaaattgtgatcatttcctaagaaaaggtaaaattcactatcatattttgtgtccccaccttgatgttacatgactctggaacaatatgaactggatttaagaatgttataatagaagtcttacaaaatgggttgagagtttttgtttcaatttttatcatcataaatgggcaaaaagtagttggactaatttcggtttttatacaagtaaagatttaatagt

SEQ ID NO: 433235 - DNA, 3670 bp, Homo sapiens
atgaaagaaataaattagtattctcatttttttcgttgagcacttataagacttggctttacttcattgagacctccacctttaataatggtagtgattaagattctttcaatgtgggacagaatcccctgatctgaaatagtagctccatttggtcatagaataaatgaaaagtgtccccctttcagacgttccagaagtagagagagagacagaagccgagagcgaagaagatctcgaagtagagacaggagacgctcaaggagtagaagccggggccggcgatcccgatcctccagtcctggaaataaaagcaagaaaactgagaatagatctaggtccaaagagaaaactgatggtggggaaagttctaaagagaagaaaaaagacaaagatgacaaggaggatgaaaaagaaaaagatgctggcaactttgaccagaataagctggaagaagaaatgagaaagcgaaaagaaagagtagaaaaatggcgagaagagcaacgtaaaaaggctatggaaaacataggagaactgaaaaaggaaatcgaagagatgaaacaagggaaaaagtggagtttagaggacgatgatgatgacgaagatgatcctgcagaagctgaaaaggagggaaatgaaatggagggtgaggagttagatccattagatgcttacatggaagaagtgaaagaggaagtaaaaaaatttaacatgagaagtgtaaaaggtggtgggggaaatgaaaagaagtctgggccaacggtcacaaaagttgtcactgttgtgacaaccaaaaaagcagttgtggattctgataagaagaaaggtgagctgatggagaatgaccaggatgccatggagtattcttcagaggaggaagaagttgatcttcagacagcccttacagggtatcaaacaaaacagcgaaagcttctagaaccagttgatcatggaaaaattgagtatgagccatttaggaaaaacttctatgttgaagttccagaactagcaaaaatgtctcaagaagaggtaaatgtgtttcgattggaaatggagggcattacagttaaaggaaaaggttgccccaaaccaattaaatcctgggtccagtgtggaatttccatgaagatcttaaattccctcaagaagcatggctatgaaaagcccacgcccatccaaacccaagctattcctgctataatgtctggacgagatttgattggcattgccaaaacaggaagtggaaagaccattgcttttctgttgcccatgtttagacacatcatggatcagaggtcattagaggaaggagaggggccaatagctgtcatcatgactccaactcgagaactggctttacagattactaaagagtgtaagaagttttccaagactttgggacttagagtggtctgtgtttacggaggaacaggaatcagtgagcagattgctgagctgaaaagaggtgctgaaattattgtttgcacacctggtcgaatgattgacatgttagccgctaacagtggtcgggtcacaaatcttcgaagagtgacatatgttgttttagatgaagcagacagaatgtttgacatgggttttgaaccccaggtcatgcgcatcgtggataatgttcgtcctgatcgacagacggttatgttttcagctactttccccagagctatggaggctttggctcgcaggatcctcagtaaacctattgaagtacaagttggaggcaggagtgtggtttgctcagatgtggagcaacaagtgattgtgattgaagaagaaaagaaattcttgaagttacttgagcttctaggccattatcaagagtcaggatctgtcattatatttgtggataagcaggaacatgctgatggtcttcttaaggatttaatgagagcatcttatccttgcatgtctcttcatggaggcattgatcaatatgacagagatagcatcataaatgactttaagaatgggacctgcaaacttcttgtggctacctctgttgctgcccgaggtctagatgtgaaacatctgattcttgtagtaaattatagctgccccaaccattatgaggattatgtacacagagcagggcggactggaagagcaggaaacaagggttatgcttatacttttatcacagaggatcaagctcgctatgctggtgacataattaaagctcttgaattgtcagggactgcagtacctcctgatttagagaaactgtggagtgatttcaaagatcagcagaaagctgaggggaaaataattaaaaagagtagtgggttctctggtaagggattcaagtttgatgaaacagaacaagctttggctaatgagaggaagaagttacaaaaagcagctcttggtctacaagattcagatgatgaggatgctgcagttgatattgatgagcaaattgaaagcatgtttaattcaaagaagagagtaaaggatatggctgctcctggaacatcaagtgttcctgctccaactgcaggaaatgctgagaaattagaaattgctaagagattggctcttagaatcaatgcccagaagaatttgggcatcgagtctcaggtagatgtgatgcagcaggccaccaatgcaattcttaggggtggcaccattctggctcccactgtttctgcaaaaaccattgcagaacaacttgctgaaaagatcaatgccaagctcaattatgtgccgttagagaaacaagaagaagagagacaggatggtggacagaatgaatcttttaagagatatgaagaagaattagagatcaatgacttcccacagactgctaggtggaaagttacctctaaggaagctctgcagagaatcagtgaatactctgaagccgcaattacaatcagaggaacctacttccctcctggcaaagaacccaaggaaggcgagcggaagatttacttggcaattgaaagtgccaatgaactggctgtgcagaaagcaaaggcagaaatcaccaggctcataaaagaagagctgatccggctgcaaaattcataccaaccaacaaataaaggaagatacaaagtcttatagacatccggaaaaaagatttttacctgtgctggtctatgatgtatgtggcagttgctgtctgcagtttacaatgtattgtaaatgaagattttttaaattctatcttgctgattttttttaaatataagaaactggtacttggtaaagaaatctgtccgtaagtacccccacaatcagtcaaactatatttaaagccagcctgttttcagagtatgatgtcctttaatgtaaactcaaatatcaatattttaaatgtccggataatattctagaggtttaaaaaatggaaatatttgaactttctattgaagacaataaagtacacaagtcgttaaggggctattcactttatcctgtactttcaatgaaattgtgatcatttcctaagaaaaggtaaaattcactatcatattttgtgtccccaccttgatgttacatgactctggaacaatatgaactggatttaagaatgttataatagaagtcttacaaaatgggttgagagtttttgtttcaatttttatcatcataaatgggcaaaaagtagttggactaatttcggtttttatacaagtaaagatttaatagt

SEQ ID NO: 433236 - DNA, 1313 bp, Homo sapiens
gggaagtataaagcgttgagctcaacgctttatacttcaggaagcgtctgagacgttccagaagtagagagagagacagaagccgagagcgaagaagatctcgaagtagagacaggagacgctcaaggagtagaagccggggccggcgatcccgatcctccagtcctggaaataaaagcaagaaaactgagaatagatctaggtccaaagagaaaactgatggtggggaaagttctaaagagaagaaaaaagacaaagatgacaaggaggatgaaaaagaaaaagatgctggcaactttgaccagaataagctggaagaagaaatgagaaagcgaaaagaaagagtagaaaaatggcgagaagagcaacgtaaaaaggctatggaaaacataggagaactgaaaaaggaaatcgaagagatgaaacaagggaaaaagtggagtttagaggacgatgatgatgacgaagatgatcctgcagaagctgaaaaggagggaaatgaaatggagggtgaggagttagatccattagatgcttacatggaagaagtgaaagaggaagtaaaaaaatttaacatgagaagtgtaaaaggtggtgggggaaatgaaaagaagtctgggccaacggtcacaaaagttgtcactgttgtgacaaccaaaaaagcagttgtggattctgataagaagaaaggtgagctgatggagaatgaccaggatgccatggagaggtaaatgtgtttcgattggaaatggagggcattacagttaaaggaaaaggttgccccaaaccaattaaatcctgggtccagtgtggaatttccatgaagatcttaaattccctcaagaagcatggctatgaaaagcccacgcccatccaaacccaagctattcctgctataatgtctggacgagatttgattggcattgccaaaacaggaagtggaaagaccattgcttttctgttgcccatgtttagacacatcatggatcagaggtcattagaggaaggagaggggccaataggtacaattcttttcattaaactatttttcaaataacagctttgttgtcaaacagaaagaccttatagtttataatgttcttaattatgacaatgaagttgtctttatgtacattttctttatcaatttggcactttggggctgatttccccttaccagcaggtggagtgagaatcttcagagctctggagtgacatctcagaagtacaaaaacagcctctcctggcacagctcagtttttaaactctgacttggcaggtagactcctcgtgcatctatctgtttatttata

SEQ ID NO: 433237 - DNA, 2965 bp, Homo sapiens
ttgagattattcagctaggagtctggggtgggggttgaaaagaagtctgggccaacggtcacaaaagttgtcactgttgtgacaaccaaaaaagcagttgtggattctgataagaagaaaggtgagctgatggagaatgaccaggatgccatggagtattcttcagaggaggaagaagttgatcttcagacagcccttacagggtatcaaacaaaacagcgaaagcttctagaaccagttgatcatggaaaaattgagtatgagccatttaggaaaaacttctatgttgaagttccagaactagcaaaaatgtctcaagaagaggtaaatgtgtttcgattggaaatggagggcattacagttaaaggaaaaggttgccccaaaccaattaaatcctgggtccagtgtggaatttccatgaagatcttaaattccctcaagaagcatggctatgaaaagcccacgcccatccaaacccaagctattcctgctataatgtctggacgagatttgattggcattgccaaaacaggaagtggaaagaccattgcttttctgttgcccatgtttagacacatcatggatcagaggtcattagaggaaggagaggggccaatagctgtcatcatgactccaactcgagaactggctttacagattactaaagagtgtaagaagttttccaagactttgggacttagagtggtctgtgtttacggaggaacaggaatcagtgagcagattgctgagctgaaaagaggtgctgaaattattgtttgcacacctggtcgaatgattgacatgttagccgctaacagtggtcgggtcacaaatcttcgaagagtgacatatgttgttttagatgaagcagacagaatgtttgacatgggttttgaaccccaggtcatgcgcatcgtggataatgttcgtcctgatcgacagacggttatgttttcagctactttccccagagctatggaggctttggctcgcaggatcctcagtaaacctattgaagtacaagttggaggcaggagtgtggtttgctcagatgtggagcaacaagtgattgtgattgaagaagaaaagaaattcttgaagttacttgagcttctaggccattatcaagagtcaggatctgtcattatatttgtggataagcaggaacatgctgatggtcttcttaaggatttaatgagagcatcttatccttgcatgtctcttcatggaggcattgatcaatatgacagagatagcatcataaatgactttaagaatgggacctgcaaacttcttgtggctacctctgttgctgcccgaggtctagatgtgaaacatctgattcttgtagtaaattatagctgccccaaccattatgaggattatgtacacagagcagggcggactggaagagcaggaaacaagggttatgcttatacttttatcacagaggatcaagctcgctatgctggtgacataattaaagctcttgaattgtcagggactgcagtacctcctgatttagagaaactgtggagtgatttcaaagatcagcagaaagctgaggggaaaataattaaaaagagtagtgggttctctggtaagggattcaagtttgatgaaacagaacaagctttggctaatgagaggaagaagttacaaaaagcagctcttggtctacaagattcagatgatgaggatgctgcagttgatattgatgagcaaattgaaagcatgtttaattcaaagaagagagtaaaggatatggctgctcctggaacatcaagtgttcctgctccaactgcaggaaatgctgagaaattagaaattgctaagagattggctcttagaatcaatgcccagaagaatttgggcatcgagtctcaggtagatgtgatgcagcaggccaccaatgcaattcttaggggtggcaccattctggctcccactgtttctgcaaaaaccattgcagaacaacttgctgaaaagatcaatgccaagctcaattatgtgccgttagagaaacaagaagaagagagacaggatggtggacagaatgaatcttttaagagatatgaagaagaattagagatcaatgacttcccacagactgctaggtggaaagttacctctaaggaagctctgcagagaatcagtgaatactctgaagccgcaattacaatcagaggaacctacttccctcctggcaaagaacccaaggaaggcgagcggaagatttacttggcaattgaaagtgccaatgaactggctgtgcagaaagcaaaggcagaaatcaccaggctcataaaagaagagctgatccggctgcaaaattcataccaaccaacaaataaaggaagatacaaagtcttatagacatccggaaaaaagatttttacctgtgctggtctatgatgtatgtggcagttgctgtctgcagtttacaatgtattgtaaatgaagattttttaaattctatcttgctgattttttttaaatataagaaactggtacttggtaaagaaatctgtccgtaagtacccccacaatcagtcaaactatatttaaagccagcctgttttcagagtatgatgtcctttaatgtaaactcaaatatcaatattttaaatgtccggataatattctagaggtttaaaaaatggaaatatttgaactttctattgaagacaataaagtacacaagtcgttaaggggctattcactttatcctgtactttcaatgaaattgtgatcatttcctaagaaaaggtaaaattcactatcatattttgtgtccccaccttgatgttacatgactctggaacaatatgaactggatttaagaatgttataatagaagtcttacaaaatgggttgagagtttttgtttcaatttttatcatcataaatgggcaaaaagtagttggactaatttcggtttttatacaagtaaagatttaatagt

SEQ ID NO: 433238 - DNA, 2866 bp, Homo sapiens
aaggctgaggtggataattactagtatggggataaggggtgtaggtgtgccttggagtattcttcagaggaggaagaagttgatcttcagacagcccttacagggtatcaaacaaaacagcgaaagcttctagaaccagttgatcatggaaaaattgagtatgagccatttaggaaaaacttctatgttgaagttccagaactagcaaaaatgtctcaagaagaggtaaatgtgtttcgattggaaatggagggcattacagttaaaggaaaaggttgccccaaaccaattaaatcctgggtccagtgtggaatttccatgaagatcttaaattccctcaagaagcatggctatgaaaagcccacgcccatccaaacccaagctattcctgctataatgtctggacgagatttgattggcattgccaaaacaggaagtggaaagaccattgcttttctgttgcccatgtttagacacatcatggatcagaggtcattagaggaaggagaggggccaatagctgtcatcatgactccaactcgagaactggctttacagattactaaagagtgtaagaagttttccaagactttgggacttagagtggtctgtgtttacggaggaacaggaatcagtgagcagattgctgagctgaaaagaggtgctgaaattattgtttgcacacctggtcgaatgattgacatgttagccgctaacagtggtcgggtcacaaatcttcgaagagtgacatatgttgttttagatgaagcagacagaatgtttgacatgggttttgaaccccaggtcatgcgcatcgtggataatgttcgtcctgatcgacagacggttatgttttcagctactttccccagagctatggaggctttggctcgcaggatcctcagtaaacctattgaagtacaagttggaggcaggagtgtggtttgctcagatgtggagcaacaagtgattgtgattgaagaagaaaagaaattcttgaagttacttgagcttctaggccattatcaagagtcaggatctgtcattatatttgtggataagcaggaacatgctgatggtcttcttaaggatttaatgagagcatcttatccttgcatgtctcttcatggaggcattgatcaatatgacagagatagcatcataaatgactttaagaatgggacctgcaaacttcttgtggctacctctgttgctgcccgaggtctagatgtgaaacatctgattcttgtagtaaattatagctgccccaaccattatgaggattatgtacacagagcagggcggactggaagagcaggaaacaagggttatgcttatacttttatcacagaggatcaagctcgctatgctggtgacataattaaagctcttgaattgtcagggactgcagtacctcctgatttagagaaactgtggagtgatttcaaagatcagcagaaagctgaggggaaaataattaaaaagagtagtgggttctctggtaagggattcaagtttgatgaaacagaacaagctttggctaatgagaggaagaagttacaaaaagcagctcttggtctacaagattcagatgatgaggatgctgcagttgatattgatgagcaaattgaaagcatgtttaattcaaagaagagagtaaaggatatggctgctcctggaacatcaagtgttcctgctccaactgcaggaaatgctgagaaattagaaattgctaagagattggctcttagaatcaatgcccagaagaatttgggcatcgagtctcaggtagatgtgatgcagcaggccaccaatgcaattcttaggggtggcaccattctggctcccactgtttctgcaaaaaccattgcagaacaacttgctgaaaagatcaatgccaagctcaattatgtgccgttagagaaacaagaagaagagagacaggatggtggacagaatgaatcttttaagagatatgaagaagaattagagatcaatgacttcccacagactgctaggtggaaagttacctctaaggaagctctgcagagaatcagtgaatactctgaagccgcaattacaatcagaggaacctacttccctcctggcaaagaacccaaggaaggcgagcggaagatttacttggcaattgaaagtgccaatgaactggctgtgcagaaagcaaaggcagaaatcaccaggctcataaaagaagagctgatccggctgcaaaattcataccaaccaacaaataaaggaagatacaaagtcttatagacatccggaaaaaagatttttacctgtgctggtctatgatgtatgtggcagttgctgtctgcagtttacaatgtattgtaaatgaagattttttaaattctatcttgctgattttttttaaatataagaaactggtacttggtaaagaaatctgtccgtaagtacccccacaatcagtcaaactatatttaaagccagcctgttttcagagtatgatgtcctttaatgtaaactcaaatatcaatattttaaatgtccggataatattctagaggtttaaaaaatggaaatatttgaactttctattgaagacaataaagtacacaagtcgttaaggggctattcactttatcctgtactttcaatgaaattgtgatcatttcctaagaaaaggtaaaattcactatcatattttgtgtccccaccttgatgttacatgactctggaacaatatgaactggatttaagaatgttataatagaagtcttacaaaatgggttgagagtttttgtttcaatttttatcatcataaatgggcaaaaagtagttggactaatttcggtttttatacaagtaaagatttaatagt

SEQ ID NO: 433239 - DNA, 1274 bp, Homo sapiens
  misc_feature (924)..(924): n is a, c, g, or t
  misc_feature (932)..(932): n is a, c, g, or t
gggaagtataaagcgttgagctcaacgctttatacttcaggaagcgtctgagacgttccagaagtagagagagagacagaagccgagagcgaagaagatctcgaagtagagacaggagacgctcaaggagtagaagccggggccggcgatcccgatcctccagtcctggaaataaaagcaagaaaactgagaatagatctaggtccaaagagaaaactgatggtggggaaagttctaaagagaagaaaaaagacaaagatgacaaggaggatgaaaaagaaaaagatgctggcaactttgaccagaataagctggaagaagaaatgagaaagcgaaaagaaagagtagaaaaatggcgagaagagcaacgtaaaaaggctatggaaaacataggagaactgaaaaaggaaatcgaagagatgaaacaagggaaaaagtggagtttagaggacgatgatgatgacgaagatgatcctgcagaagctgaaaaggagggaaatgaaatggagggtgaggagttagatccattagatgcttacatggaagaagtgaaagaggaagtaaaaaaatttaacatgagaagtgtaaaaggtggtgggggaaatgaaaagaagtctgggccaacggtcacaaaagttgtcactgttgtgacaaccaaaaaagcagttgtggattctgataagaagaaaggtgagctgatggagaatgaccaggatgccatggagtattcttcatgaggaggaagaagaaggtgatggtgaggaagaggatggagatgaagatgaggaagctgagtcagctacgggcaagcgggcagctgaagatgatgaggatgacgatgtcgataccaagaagcagaagaccgacgaggatgactagacagcaaaaaaggaaaagttaaactaaaaaaaaaaaggccgccgngacctatncaccctccacttcccgtctcagaatctaaacggtggtcaccttcgagtagagaggtccgcccggccaccgtgggcaggtgccacccgcagatgacacgcgctctccatcagccaatccaaaccatgagaattgtgcaaccaggggaaggaaaaaagaaccaaaacttccaaggcctgcttttttctttaaaagtactttaccacggccattcgcggtattttttatttacattctatcatcctccgtcatatggtcgggtcagacatcttcaatgatctcggatgacaaaccagcctcggagcgtctctgtcctactctgggcttactgtggtgtgccctgc

SEQ ID NO: 433240 - DNA, 941 bp, Homo sapiens
  misc_feature (898)..(898): n is a, c, g, or t
  misc_feature (906)..(906): n is a, c, g, or t
  misc_feature (922)..(922): n is a, c, g, or t
gtccggtcggcttttctcttccttcggctgccggcgccagcacgtcctgttttcgttggccgcgctgggatggccgccacagctgtaggtgctgctagtgtttagcgctggtctttgccgggcgttgagggcagctcagcctccttgtttgtccggttcgcctgtgcgtggtactcaagggcaccagtattcccgcggtcggcagcatgggtcgggagtcacgccactatcgaaaacgatcggcatcccggggtcgctctggaagtcggtctagaagtcgctcaccctcagacaaaagaagtaaacgtggagatgacagacggtctagaagtagagatagagataggaggagagagaggtctcgtagcagggataaaagaagatctcggtcaagggacaggaagcgtctgagacgttccagaagtagagagagagacagaagccgagagcgaagaagatctcgaagtagagacaggagacgctcaaggagtagaagccggggccggcgatcccgatcctccagtcctggaaataaaagcaagaaaactgagaatagatctaggtccaaagagaaaactgatggtggggaaagttctaaagagaagaaaaaagacaaagatgacaaggaggatgaaaaagaaaaagatgctggcaactttgaccagaataagctggaagaagaaatgagaaagcgaaaagaaagagtagaaaaatggcgagaagagcaacgtaaaaaggctatggaaaacataggagaactgaaaaaggaaatcgaagagatgaaacaagggaaaaagtggagtttagaggacgatgatgatgacgaagatgatcctgcagaagctgaaaaggagggaaatgaaatggagggtgaggagttagatccattagatgccanaagagtancgtggagatgacagcnggtcttgagtagagttagg

SEQ ID NO: 433241 - DNA, 1958 bp, Homo sapiens
tcataggttcgcagggagttgagattgtcgagtatagtggattgagtgctgtggagccgagattgtgattgaagaagaaaagaaattcttgaagttacttgagcttctaggccattatcaagagtcaggatctgtcattatatttgtggataagcaggaacatgctgatggtcttcttaaggatttaatgagagcatcttatccttgcatgtctcttcatggaggcattgatcaatatgacagagatagcatcataaatgactttaagaatgggacctgcaaacttcttgtggctacctctgttgctgcccgaggtctagatgtgaaacatctgattcttgtagtaaattatagctgccccaaccattatgaggattatgtacacagagcagggcggactggaagagcaggaaacaagggttatgcttatacttttatcacagaggatcaagctcgctatgctggtgacataattaaagctcttgaattgtcagggactgcagtacctcctgatttagagaaactgtggagtgatttcaaagatcagcagaaagctgaggggaaaataattaaaaagagtagtgggttctctggtaagggattcaagtttgatgaaacagaacaagctttggctaatgagaggaagaagttacaaaaagcagctcttggtctacaagattcagatgatgaggatgctgcagttgatattgatgagcaaattgaaagcatgtttaattcaaagaagagagtaaaggatatggctgctcctggaacatcaagtgttcctgctccaactgcaggaaatgctgagaaattagaaattgctaagagattggctcttagaatcaatgcccagaagaatttgggcatcgagtctcaggtagatgtgatgcagcaggccaccaatgcaattcttaggggtggcaccattctggctcccactgtttctgcaaaaaccattgcagaacaacttgctgaaaagatcaatgccaagctcaattatgtgccgttagagaaacaagaagaagagagacaggatggtggacagaatgaatcttttaagagatatgaagaagaattagagatcaatgacttcccacagactgctaggtggaaagttacctctaaggaagctctgcagagaatcagtgaatactctgaagccgcaattacaatcagaggaacctacttccctcctggcaaagaacccaaggaaggcgagcggaagatttacttggcaattgaaagtgccaatgaactggctgtgcagaaagcaaaggcagaaatcaccaggctcataaaagaagagctgatccggctgcaaaattcataccaaccaacaaataaaggaagatacaaagtcttatagacatccggaaaaaagatttttacctgtgctggtctatgatgtatgtggcagttgctgtctgcagtttacaatgtattgtaaatgaagattttttaaattctatcttgctgattttttttaaatataagaaactggtacttggtaaagaaatctgtccgtaagtacccccacaatcagtcaaactatatttaaagccagcctgttttcagagtatgatgtcctttaatgtaaactcaaatatcaatattttaaatgtccggataatattctagaggtttaaaaaatggaaatatttgaactttctattgaagacaataaagtacacaagtcgttaaggggctattcactttatcctgtactttcaatgaaattgtgatcatttcctaagaaaaggtaaaattcactatcatattttgtgtccccaccttgatgttacatgactctggaacaatatgaactggatttaagaatgttataatagaagtcttacaaaatgggttgagagtttttgtttcaatttttatcatcataaatgggcaaaaagtagttggactaatttcggtttttatacaagtaaagatttaatagt

SEQ ID NO: 433242 - DNA, 402 bp, Homo sapiens
acagagattaatcaaagatgtctcctagatttttgtcctaagcatgtgtggagttgtcatttcttgagattgggagactgtgggagtggcaaaactgagacagttgttctcaaaagttccttttacttggttttaacattgcataagctttgaagaccatatttaccatatttatttgtaatgttttctttttctcaggtcatgcgcatcgtggataatgttcgtcctgatcgacagacggttatgttttcagctactttccccagagctatggaggctttggctcgcaggatcctcagtaaacctattgaagtacaagttggaggcaggagtgtggtttgctcagatgtggagcaacaagtggtgggtaccatctttaggaaattcccagtttccttgata

SEQ ID NO: 433243 - DNA, 1479 bp, Homo sapiens
gggaagtataaagcgttgagctcaacgctttatacttcaggaagcgtctgagacgttccagaagtagagagagagacagaagccgagagcgaagaagatctcgaagtagagacaggagacgctcaaggagtagaagccggggccggcgatcccgatcctccagtcctggaaataaaagcaagaaaactgagaatagatctaggtccaaagagaaaactgatggtggggaaagttctaaagagaagaaaaaagacaaagatgacaaggaggatgaaaaagaaaaagatgctggcaactttgaccagaataagctggaagaagaaatgagaaagcgaaaagaaagagtagaaaaatggcgagaagagcaacgtaaaaaggctatggaaaacataggagaactgaaaaaggaaatcgaagagatgaaacaagggaaaaagtggagtttagaggacgatgatgatgacgaagatgatcctgcagaagctgaaaaggagggaaatgaaatggagggtgaggagttagatccattagatgcttacatggaagaagtgaaagaggaagtaaaaaaatttaacatgagaagtgtaaaaggtggtgggggaaatgaaaagaagtctgggccaacggtcacaaaagttgtcactgttgtgacaaccaaaaaagcagttgtggattctgataagaagaaaggtgagctgatggagaatgaccaggatgccatggagtattcttcagaggaggaagaagttgatcttcagacagcccttacagggtatcaaacaaaacagcgaaagcttctagaaccagttgatcatggaaaaattgagtatgagccatttaggaaaaacttctatgttgaagttccagaactagcaaaaatgtctcaagaagaggtaaatgtgtttcgattggaaatggagggcattacagttaaaggaaaaggttgccccaaaccaattaaatcctgggtccagtgtggaatttccatgaagatcttaaattccctcaagaagcatggctatgaaaagcccacgcccatccaaacccaagctattcctgctataatgtctggacgagatttgattggcattgccaaaacaggaagtggaaagaccattgcttttctgttgcccatgtttagacacatcatggatcagaggtcattagaggaaggagaggggccaataggtacaattcttttcattaaactatttttcaaataacagctttgttgtcaaacagaaagaccttatagtttataatgttcttaattatgacaatgaagttgtctttatgtacattttctttatcaatttggcactttggggctgatttccccttaccagcaggtggagtgagaatcttcagagctctggagtgacatctcagaagtacaaaaacagcctctcctggcacagctcagtttttaaactctgacttggcaggtagactcctcgtgcatctatctgtttatttata

SEQ ID NO: 433244 - DNA, 3484 bp, Homo sapiens
ctgagattgtgccactgtactccagcctgggtgacagagcgagactccgtctcaaaaaaaacatcatttagcagagaaagtttgtagttctgcatccagctgtatagctgtaaaatctattattggagatcaccttttttggcataattaatcttttgacccttttacaaccaatttatgttttattcatatttattttgtcattgttaatattcagaagtaatacatgcttcatgtaaaaatggaaaaacctcagaatatgagcatttgaactgatggatggctggagtaattggaaaaggggtgtttgggcagtggcagaaaaggttagagaggtggggtgtggtctgattgtgaaatactgcatttttaaacagatgtttaaagaatgtgtattctggtattttagatgacgaagatgatcctgcagaagctgaaaaggagggaaatgaaatggagggtgaggagttagatccattagatgcttacatggaagaagtgaaagaggaagtaaaaaaatttaacatgagaagtgtaaaaggtggtgggggaaatgaaaagaagtctgggccaacggtcacaaaagttgtcactgttgtgacaaccaaaaaagcagttgtggattctgataagaagaaaggtgagctgatggagaatgaccaggatgccatggagtattcttcagaggaggaagaagttgatcttcagacagcccttacagggtatcaaacaaaacagcgaaagcttctagaaccagttgatcatggaaaaattgagtatgagccatttaggaaaaacttctatgttgaagttccagaactagcaaaaatgtctcaagaagaggtaaatgtgtttcgattggaaatggagggcattacagttaaaggaaaaggttgccccaaaccaattaaatcctgggtccagtgtggaatttccatgaagatcttaaattccctcaagaagcatggctatgaaaagcccacgcccatccaaacccaagctattcctgctataatgtctggacgagatttgattggcattgccaaaacaggaagtggaaagaccattgcttttctgttgcccatgtttagacacatcatggatcagaggtcattagaggaaggagaggggccaatagctgtcatcatgactccaactcgagaactggctttacagattactaaagagtgtaagaagttttccaagactttgggacttagagtggtctgtgtttacggaggaacaggaatcagtgagcagattgctgagctgaaaagaggtgctgaaattattgtttgcacacctggtcgaatgattgacatgttagccgctaacagtggtcgggtcacaaatcttcgaagagtgacatatgttgttttagatgaagcagacagaatgtttgacatgggttttgaaccccaggtcatgcgcatcgtggataatgttcgtcctgatcgacagacggttatgttttcagctactttccccagagctatggaggctttggctcgcaggatcctcagtaaacctattgaagtacaagttggaggcaggagtgtggtttgctcagatgtggagcaacaagtgattgtgattgaagaagaaaagaaattcttgaagttacttgagcttctaggccattatcaagagtcaggatctgtcattatatttgtggataagcaggaacatgctgatggtcttcttaaggatttaatgagagcatcttatccttgcatgtctcttcatggaggcattgatcaatatgacagagatagcatcataaatgactttaagaatgggacctgcaaacttcttgtggctacctctgttgctgcccgaggtctagatgtgaaacatctgattcttgtagtaaattatagctgccccaaccattatgaggattatgtacacagagcagggcggactggaagagcaggaaacaagggttatgcttatacttttatcacagaggatcaagctcgctatgctggtgacataattaaagctcttgaattgtcagggactgcagtacctcctgatttagagaaactgtggagtgatttcaaagatcagcagaaagctgaggggaaaataattaaaaagagtagtgggttctctggtaagggattcaagtttgatgaaacagaacaagctttggctaatgagaggaagaagttacaaaaagcagctcttggtctacaagattcagatgatgaggatgctgcagttgatattgatgagcaaattgaaagcatgtttaattcaaagaagagagtaaaggatatggctgctcctggaacatcaagtgttcctgctccaactgcaggaaatgctgagaaattagaaattgctaagagattggctcttagaatcaatgcccagaagaatttgggcatcgagtctcaggtagatgtgatgcagcaggccaccaatgcaattcttaggggtggcaccattctggctcccactgtttctgcaaaaaccattgcagaacaacttgctgaaaagatcaatgccaagctcaattatgtgccgttagagaaacaagaagaagagagacaggatggtggacagaatgaatcttttaagagatatgaagaagaattagagatcaatgacttcccacagactgctaggtggaaagttacctctaaggaagctctgcagagaatcagtgaatactctgaagccgcaattacaatcagaggaacctacttccctcctggcaaagaacccaaggaaggcgagcggaagatttacttggcaattgaaagtgccaatgaactggctgtgcagaaagcaaaggcagaaatcaccaggctcataaaagaagagctgatccggctgcaaaattcataccaaccaacaaataaaggaagatacaaagtcttatagacatccggaaaaaagatttttacctgtgctggtctatgatgtatgtggcagttgctgtctgcagtttacaatgtattgtaaatgaagattttttaaattctatcttgctgattttttttaaatataagaaactggtacttggtaaagaaatctgtccgtaagtacccccacaatcagtcaaactatatttaaagccagcctgttttcagagtatgatgtcctttaatgtaaactcaaatatcaatattttaaatgtccggataatattctagaggtttaaaaaatggaaatatttgaactttctattgaagacaataaagtacacaagtcgttaaggggctattcactttatcctgtactttcaatgaaattgtgatcatttcctaagaaaaggtaaaattcactatcatattttgtgtccccaccttgatgttacatgactctggaacaatatgaactggatttaagaatgttataatagaagtcttacaaaatgggttgagagtttttgtttcaatttttatcatcataaatgggcaaaaagtagttggactaatttcggtttttatacaagtaaagatttaatagt

SEQ ID NO: 433245 - DNA, 2651 bp, Homo sapiens
gtcccatgtagcttggtcaccgcggtggtatggtacagtgacataagttaaaggaaaaggttgccccaaaccaattaaatcctgggtccagtgtggaatttccatgaagatcttaaattccctcaagaagcatggctatgaaaagcccacgcccatccaaacccaagctattcctgctataatgtctggacgagatttgattggcattgccaaaacaggaagtggaaagaccattgcttttctgttgcccatgtttagacacatcatggatcagaggtcattagaggaaggagaggggccaatagctgtcatcatgactccaactcgagaactggctttacagattactaaagagtgtaagaagttttccaagactttgggacttagagtggtctgtgtttacggaggaacaggaatcagtgagcagattgctgagctgaaaagaggtgctgaaattattgtttgcacacctggtcgaatgattgacatgttagccgctaacagtggtcgggtcacaaatcttcgaagagtgacatatgttgttttagatgaagcagacagaatgtttgacatgggttttgaaccccaggtcatgcgcatcgtggataatgttcgtcctgatcgacagacggttatgttttcagctactttccccagagctatggaggctttggctcgcaggatcctcagtaaacctattgaagtacaagttggaggcaggagtgtggtttgctcagatgtggagcaacaagtgattgtgattgaagaagaaaagaaattcttgaagttacttgagcttctaggccattatcaagagtcaggatctgtcattatatttgtggataagcaggaacatgctgatggtcttcttaaggatttaatgagagcatcttatccttgcatgtctcttcatggaggcattgatcaatatgacagagatagcatcataaatgactttaagaatgggacctgcaaacttcttgtggctacctctgttgctgcccgaggtctagatgtgaaacatctgattcttgtagtaaattatagctgccccaaccattatgaggattatgtacacagagcagggcggactggaagagcaggaaacaagggttatgcttatacttttatcacagaggatcaagctcgctatgctggtgacataattaaagctcttgaattgtcagggactgcagtacctcctgatttagagaaactgtggagtgatttcaaagatcagcagaaagctgaggggaaaataattaaaaagagtagtgggttctctggtaagggattcaagtttgatgaaacagaacaagctttggctaatgagaggaagaagttacaaaaagcagctcttggtctacaagattcagatgatgaggatgctgcagttgatattgatgagcaaattgaaagcatgtttaattcaaagaagagagtaaaggatatggctgctcctggaacatcaagtgttcctgctccaactgcaggaaatgctgagaaattagaaattgctaagagattggctcttagaatcaatgcccagaagaatttgggcatcgagtctcaggtagatgtgatgcagcaggccaccaatgcaattcttaggggtggcaccattctggctcccactgtttctgcaaaaaccattgcagaacaacttgctgaaaagatcaatgccaagctcaattatgtgccgttagagaaacaagaagaagagagacaggatggtggacagaatgaatcttttaagagatatgaagaagaattagagatcaatgacttcccacagactgctaggtggaaagttacctctaaggaagctctgcagagaatcagtgaatactctgaagccgcaattacaatcagaggaacctacttccctcctggcaaagaacccaaggaaggcgagcggaagatttacttggcaattgaaagtgccaatgaactggctgtgcagaaagcaaaggcagaaatcaccaggctcataaaagaagagctgatccggctgcaaaattcataccaaccaacaaataaaggaagatacaaagtcttatagacatccggaaaaaagatttttacctgtgctggtctatgatgtatgtggcagttgctgtctgcagtttacaatgtattgtaaatgaagattttttaaattctatcttgctgattttttttaaatataagaaactggtacttggtaaagaaatctgtccgtaagtacccccacaatcagtcaaactatatttaaagccagcctgttttcagagtatgatgtcctttaatgtaaactcaaatatcaatattttaaatgtccggataatattctagaggtttaaaaaatggaaatatttgaactttctattgaagacaataaagtacacaagtcgttaaggggctattcactttatcctgtactttcaatgaaattgtgatcatttcctaagaaaaggtaaaattcactatcatattttgtgtccccaccttgatgttacatgactctggaacaatatgaactggatttaagaatgttataatagaagtcttacaaaatgggttgagagtttttgtttcaatttttatcatcataaatgggcaaaaagtagttggactaatttcggtttttatacaagtaaagatttaatagt

SEQ ID NO: 433246 - DNA, 961 bp, Homo sapiens
gtccggtcggcttttctcttccttcggctgccggcgccagcacgtcctgttttcgttggccgcgctgggatggccgccacagctgtaggtgctgctagtgtttagcgctggtctttgccgggcgttgagggcagctcagcctccttgtttgtccggttcgcctgtgcgtggtactcaagggcaccagtattcccgcggtcggcagcatgggtcgggagtcacgccactatcgaaaacgatcggcatcccggggtcgctctggaagtcggtctagaagtcgctcaccctcagacaaaagaagtaaacgtggagatgacagacggtctagaagtagagatagagataggaggagagagaggtctcgtagcagggataaaagaagatctcggtcaagggacaggaagcgtctgagacgttccagaagtagagagagagacagaagccgagagcgaagaagatctcgaagtagagacaggagacgctcaaggagtagaagccggggccggcgatcccgatcctccagtcctggaaataaaagcaagaaaactgagaatagatctaggtccaaagagaaaactgatggtggggaaagttctaaagagaagaaaaaagacaaagatgacaaggaggatgaaaaagaaaaagatgctggcaactttgaccagaataagctggaagaagaaatgagaaagcgaaaagaaagagtagaaaaaaaaaaaaaaaaactcgagactagttctctgtcggcacgcgtgaaacttctccgcggctccgcgaaaacgccgccgagatgcgctaagtggcctcctcacctggtggctcgcctggggggcacttctccccccagcgccaggactccgacgatcttggccagcggggatcgaggggaacacgacggtccaccaggtttcgtggcgatgggacacttgggacttttgcccggtttggattgcgcgtcccg

SEQ ID NO: 433247 - DNA, 1877 bp, Homo sapiens
gttggtttcttctgcatcctctcttctaggccattatcaagagtcaggatctgtcattatatttgtggataagcaggaacatgctgatggtcttcttaaggatttaatgagagcatcttatccttgcatgtctcttcatggaggcattgatcaatatgacagagatagcatcataaatgactttaagaatgggacctgcaaacttcttgtggctacctctgttgctgcccgaggtctagatgtgaaacatctgattcttgtagtaaattatagctgccccaaccattatgaggattatgtacacagagcagggcggactggaagagcaggaaacaagggttatgcttatacttttatcacagaggatcaagctcgctatgctggtgacataattaaagctcttgaattgtcagggactgcagtacctcctgatttagagaaactgtggagtgatttcaaagatcagcagaaagctgaggggaaaataattaaaaagagtagtgggttctctggtaagggattcaagtttgatgaaacagaacaagctttggctaatgagaggaagaagttacaaaaagcagctcttggtctacaagattcagatgatgaggatgctgcagttgatattgatgagcaaattgaaagcatgtttaattcaaagaagagagtaaaggatatggctgctcctggaacatcaagtgttcctgctccaactgcaggaaatgctgagaaattagaaattgctaagagattggctcttagaatcaatgcccagaagaatttgggcatcgagtctcaggtagatgtgatgcagcaggccaccaatgcaattcttaggggtggcaccattctggctcccactgtttctgcaaaaaccattgcagaacaacttgctgaaaagatcaatgccaagctcaattatgtgccgttagagaaacaagaagaagagagacaggatggtggacagaatgaatcttttaagagatatgaagaagaattagagatcaatgacttcccacagactgctaggtggaaagttacctctaaggaagctctgcagagaatcagtgaatactctgaagccgcaattacaatcagaggaacctacttccctcctggcaaagaacccaaggaaggcgagcggaagatttacttggcaattgaaagtgccaatgaactggctgtgcagaaagcaaaggcagaaatcaccaggctcataaaagaagagctgatccggctgcaaaattcataccaaccaacaaataaaggaagatacaaagtcttatagacatccggaaaaaagatttttacctgtgctggtctatgatgtatgtggcagttgctgtctgcagtttacaatgtattgtaaatgaagattttttaaattctatcttgctgattttttttaaatataagaaactggtacttggtaaagaaatctgtccgtaagtacccccacaatcagtcaaactatatttaaagccagcctgttttcagagtatgatgtcctttaatgtaaactcaaatatcaatattttaaatgtccggataatattctagaggtttaaaaaatggaaatatttgaactttctattgaagacaataaagtacacaagtcgttaaggggctattcactttatcctgtactttcaatgaaattgtgatcatttcctaagaaaaggtaaaattcactatcatattttgtgtccccaccttgatgttacatgactctggaacaatatgaactggatttaagaatgttataatagaagtcttacaaaatgggttgagagtttttgtttcaatttttatcatcataaatgggcaaaaagtagttggactaatttcggtttttatacaagtaaagatttaatagt

SEQ ID NO: 433248 - DNA, 4281 bp, Homo sapiens
  misc_feature (3423)..(3423): n is a, c, g, or t
caaggggccaggaccctgagttttattgggccttgactaatgtgcctcctcatctgtgtcctcaccctcattgtggacttaggtttcagttatctcagaggcagacccacaggctctgctccaggccatgaaggacctggacggcatggatgctgatatcttaggtctgaagaaatctaattcagcccctagcaaaaaagctgcaaaggaccctgggaaaggagagctgcccaaccaccccaagcctgcagggggtgccattcccaccaagaagtcacttccgtctcccagcagctctgggcatcagaacaggaggttttcctctgaagacttggaagacccattgggaggacttctctcctatgatgaaggaggaatcaccaagcagccgcctgtgacacagagtaaaacagcttctgacaagagccccagcacagtgagagatcaaggtccctctattcctctaactcctggggacacccccatccgaaaaaaagaagaattgttgtttgatgatggggatgacatcatggccaccttggggtttggagacagccccaaagcagagaagaggcagataggagaccaggaagggcctcgccctgctcgctccacgctggatgagctgctgggtcgaggcatggccaccaaactcctggcccgcccgggcaccggggagcacagggagttcaagctagacaagaagtaccagaggccacaggacagtgaagatatgtggggtgacgaggacttcacctttggagcctatcagcccactgtggtctcctctgagggccggcagtcccgccggcagtctgtcagtaggttcttcgcagacagtggcgcagaccccaagggagaaccaggctccaaacagagccctccaatggcttccagccccatccagcccaggaagggaggagctgactggttgggcctcaaggacgaggacttggacctgttccctgcctcacccaccagagaggcccatcgggaaagttcagtgcctgtcacgccctcagtgcctcctcctgcgagccagcactccacgccagctgggctgcccccctccagggcaaagccaccaactgaaggtgcagggtcccctgccaaagccagccaggcttccaagctgcgagcctccaaggaggagaaagaggactggctgagccatgccctgtctcggaagaagtcccaaggcctggccagagagcagcatgctgggacctctgagggcctgcatttggcggggacagcgggccatcccccttctggcagcctgacctgggccttctgtcaccttcaccttgaacgctgcctttcctcagccaacctctcaccagcacacaagggcttgagcacgcagctgctggagggagttctggaacaactgcacgaggaaagaccgtgtgtcaggcctggtgtctcggggtcccctgtgactcagaaccatgccgcctcagcactccctacaggttccccaaagaggggaacagcccctggagacctctcagccactgagcctgccacgtgtttcccgagcacccagaaacccacagagccttccgtgcccgtccagcccctgctcccagagtccctggcccggagcctgctgccgagcacagaataccagaagcagctcctggcagcacaggtgcaacttcagtgcagccccgctgagctccaggccgagctgctgcatagccaggcccggctggcagagctggaggcccaggtgcggaagctggagctagaacgggcccagcatgagctgctgctggggagtctgcagcagcagcaccaggcagacctggagctcatcgagagtgcacacagaagccgcatcaaggtgctagaaacatcgtaccagcaacgggaggagcggctccggagagagaacgaagagctgtcagctcggtatctgtcgcagtgccaggaggccgaacaggcccgtgctgagcttacggcccagcaccagcggcgcttggcggccatagcgcaggagaaggaccaggaaatggagcggctccgggagctgcagcgggcgtccatcctagacatgcgcagagaccacgaggagcagctgcagcggctaaagctgctgaaggaccgagaggtcgatgcggccaccagtgccacctcccacacgcggtccctgaatagcatcatccaccagatggagaagttctccagcagcctgcacgagttgtcctcccgcgtggaggcctcgcacctcaccacctcccaggagcgggagctggggatccggcagcgtgacgagcagctgcgggcactgcaggagcggctgggccagcagcagcgggacatggaggaggagcggagccggcaacaggaggtcatcgggaagatggaggcacggctgaatgagcagagccggctgctggagcaggaacgctggcgggtgactgccgagcagtccaaggcggagtccatgcagcgcgccctagaggagcaaaggaaggtcacggcccagcagatggccatggaaagggcggagctggaacgggccaagagcgccttgctggaggagcagaagtctgtcatgctcaagtgcggggaggagcggcggcgcctggctgccgagtgggcggagttctccgcgcagcaaaagctgagtgagcaggctgagctgaagatcagggccagcgagctccgggccgaggagaagcagctggcagcggagagagcagccctggagcaggagcggcaggagctgcggctggagaaggagaggatcaacgccaccgccctgcgtgtcaagctccgcgccgaggaggtggagagcatgagcaaggtggcctccgagaagtacgaggagggggagcgggcattgcgcgaggcccagcaggtgcaggcagagcagcaggcccggttgcaggcggtgcagcaacagcaggagcggctgcggaagcaggagcagcacatgcaccaggagcatctgagtctggcccagcagaggctgcaactggaccgcgcacgacaggacctgccctctagcctcgtgggtctgttccccagggcccagggccctgcagcctccagccagagtgccctcatgcctcctgctcccaccacccgttggtgcagccagccgccaactggcctggaccccagccccttgcacctccatgccaggctggcactgctgaggcacatggcagagcagcacctgcggtctgcggtggcacctggcagctggaccacagccaggagaagggtactattagccctgcttcaaacatgcagaaactgaggcccggggagattaaataacctgcctgaaatgacaccgtcctgggccgccggacacccccgctggggccgatgcccaacagtgacatcgacttgagcaacctggagcggctggagaagtaccggagcttcgaccgctaccggcgccgngcagagcaggaggcgcaggccccgcactggtggcggacctaccgagagtatttcggggagaagacagatcccaaagagaagattgatattgggctgcctccacccaaagtctcccggacccaacagctactggaacggaaacaggccatccaggagcttcgggccaatgtggaagaggagcgggctgcccgcctccgcacagtgtcccgctggatgccgtgcgggccgagtgggagaggacctgtggcccctaccacaagcagcgtctggctgagtattacggcctctaccgagacctgttccacggtgccacctttgtgccccgagtccccctgcacgtggcctacgctgtgggtgaggatgacctgatgcctgtgtactgtggcaatgaggtgactccaaccgaggctgcccaagcgccagaggtgacctatgaggcagaagagggctccttgtggacgttgctactcactagcttggatgggcacctgctggagccagatgctgagtacctccactggctgctaaccaacatcccgggtaaccgggtggctgaaggacaggtgacgtgtccctacctcccccccttccctgcccgaggctccggcatccaccgtcttgccttcctgctcttcaagcaggaccagccgattgacttctctgaggacgcacgcccctcaccctgctatcagctggcccagcggaccttccgcacttttgatttctacaagaaacaccaagaaaccatgactccagccggcttgtccttcttccagtgccgctgggatgactccgtcacctacatcttccaccagcttctggacatgcgggagccggtgtttgagttcgtgcggccgc

SEQ ID NO: 433249 - DNA, 800 bp, Homo sapiens
gcggcagcggctggaagcgggagccagtcctggccgggctgggcgacccgaatggagccagggccggcctggtcccagcggccgcacctccgggggcacggcgcgtaacaggaggcttccggggctgagagcgttacaggctgcgctccggggccagataggccgggcgctcagaaggggagtatgagcctgatgtgggcagaatccagatgagctggccagtgctgtgaaggagctgagagcacccccgagagccgtgagatggtaggcagagttcagagtaagatgcatggaaagcgaacatgcctcccatcctgcatccccaaagatcttgactgcatgcaacactctgggggctgggcggcaaggaccaggatggagaccctggagaagagtgacaggaggtggcattgataccaaactttcgacgaccaaggtttcttctgagactctgagtgtccagctggaagcgtttttaagtgtctgtcactggtattgaggagtcaggggcacggaatagaagacatttccggtcacatgacatctcggctgggagggtttgcatgtcgtgtctgggaaaggagtgacctgcccgcccattggcacccatcgctggttagcagggctgtttccacgctctgaatgagtccgttctcagaaactataggaacacataaaggacttacatctctaaatgccattggtgctcttgcctctggttacttggcaaaaggcaacgcaattcattctgcattgccaatttccacctgtgttcactgtttggttttcttgatgtgatt

SEQ ID NO: 433250 - DNA, 595 bp, Homo sapiens
gcggcagcggctggaagcgggagccagtcctggccgggctgggcgacccgaatggagccagggccggcctggtcccagcggccgcacctccgggggcacggcgcgtaacaggaggcttccggggctgagagcgttacaggctgcgctccggggccagataggccgggcgctcagaagggtgacgcattgaggggcgcggagtctcgggacggaggggcgactccggctaggggtcttgcttaggggtggtctcgggatctgtaaaacgcctggcatggagtcggctgaatacatgtggggacggggttactctgtagccctttggccttggcaaaccaagcctagaaaatccccatagtctgagaagcccgtacaggatcgataggagatgccagaagttccttgatgtgttatgggacacatttggacttgtaggtcgtgaagtcgccattgcagagaaaaagaaacaaggccgggcacggtggctcacgcctgtaatcccgacactttgggaggccaaggcgggaggatcacttgaggccaggcgtctgggacgaccctgggcaacatagggagacccccgtctctacaaaaa

SEQ ID NO: 433251 - DNA, 4857 bp, Homo sapiens
gcggcagcggctggaagcgggagccagtcctggccgggctgggcgacccgaatggagccagggccggcctggtcccagcggccgcacctccgggggcacggcgcgtaacaggaggcttccggggctgagagcgttacaggctgcgctccggggccagataggccgggcgctcagaaggggagtatgagcctgatgtgggcagaatccagatgagctggccagtgctgtgaaggagctgagagcacccccgagagccgtgagatgcaccaaaaaccaagaaaggatgtaaaggctccattgatgattttcttggtgaccttctaggggatgatatgacactacctgagaagcctgttaaactagcttcacataccagagacaccacaggtgtatctcagatgttcccttcttcaaaggcgagaacaaagtccctcctgggtgatgatgtcttcagcaccatggcaggcctggaagaagctgatgctgaggtttcagttatctcagaggcagacccacaggctctgctccaggccatgaaggacctggacggcatggatgctgatatcttaggtctgaagaaatctaattcagcccctagcaaaaaagctgcaaaggaccctgggaaaggagagctgcccaaccaccccaagcctgcagggggtgccattcccaccaagaagtcacttccgtctcccagcagctctgggcatcagaacaggaggttttcctctgaagacttggaagacccattgggaggacttctctcctatgatgaaggaggaatcaccaagcagccgcctgtgacacagagtaaaacagcttctgacaagagccccagcacagtgagagatcaaggtccctctattcctctaactcctggggacacccccatccgaaaaaaagaagaattgttgtttgatgatggggatgacatcatggccaccttggggtttggagacagccccaaagcagagaagaggcagataggagaccaggaagggcctcgccctgctcgctccacgctggatgagctgctgggtcgaggcatggccaccaaactcctggcccgcccgggcaccggggagcacagggagttcaagctagacaagaagtaccagaggccacaggacagtgaagatatgtggggtgacgaggacttcacctttggagcctatcagcccactgtggtctcctctgagggccggcagtcccgccggcagtctgtcagtaggttcttcgcagacagtggcgcagaccccaagggagaaccaggctccaaacagagccctccaatggcttccagccccatccagcccaggaagggaggagctgactggttgggcctcaaggacgaggacttggacctgttccctgcctcacccaccagagaggcccatcgggaaagttcagtgcctgtcacgccctcagtgcctcctcctgcgagccagcactccacgccagctgggctgcccccctccagggcaaagccaccaactgaaggtgcagggtcccctgccaaagccagccaggcttccaagctgcgagcctccaaggaggagaaagaggactggctgagccatgccctgtctcggaagaagtcccaaggcctggccagagagcagcatgctgggacctctgagggcctgcatttggcggggacagcgggccatcccccttctggcagccaacctctcaccagcacacaagggcttgagcacgcagctgctggagggagttctggaacaactgcacgaggaaagaccgtgtgtcaggcctggtgtctcggggtcccctgtgactcagaaccatgccgcctcagcactccctacaggttccccaaagaggggaacagcccctggagacctctcagccactgagcctgccacgtgtttcccgagcacccagaaacccacagagccttccgtgcccgtccagcccctgctcccagagtccctggcccggagcctgctgccgagcacagaataccagaagcagctcctggcagcacaggtgcaacttcagtgcagccccgctgagctccaggccgagctgctgcatagccaggcccggctggcagagctggaggcccaggtgcggaagctggagctagaacgggcccagcatgagctgctgctggggagtctgcagcagcagcaccaggcagacctggagctcatcgagagtgcacacagaagccgcatcaaggtgctagaaacatcgtaccagcaacgggaggagcggctccggagagagaacgaagagctgtcagctcggtatctgtcgcagtgccaggaggccgaacaggcccgtgctgagcttacggcccagcaccagcggcgcttggcggccatagcgcaggagaaggaccaggaaatggagcggctccgggagctgcagcgggcgtccatcctagacatgcgcagagaccacgaggagcagctgcagcggctaaagctgctgaaggaccgagaggtcgatgcggccaccagtgccacctcccacacgcggtccctgaatagcatcatccaccagatggagaagttctccagcagcctgcacgagttgtcctcccgcgtggaggcctcgcacctcaccacctcccaggagcgggagctggggatccggcagcgtgacgagcagctgcgggcactgcaggagcggctgggccagcagcagcgggacatggaggaggagcggagccggcaacaggaggtcatcgggaagatggaggcacggctgaatgagcagagccggctgctggagcaggaacgctggcgggtgactgccgagcagtccaaggcggagtccatgcagcgcgccctagaggagcaaaggaaggtcacggcccagcagatggccatggaaagggcggagctggaacgggccaagagcgccttgctggaggagcagaagtctgtcatgctcaagtgcggggaggagcggcggcgcctggctgccgagtgggcggagttctccgcgcagcaaaagctgagtaaggagcgggccgagcgcgaggccgagcgggcattgcaggtggacacccagcgggagggcaccctcatcagcctggccaaggagcaggctgagctgaagatcagggccagcgagctccgggccgaggagaagcagctggcagcggagagagcagccctggagcaggagcggcaggagctgcggctggagaaggagaggatcaacgccaccgccctgcgtgtcaagctccgcgccgaggaggtggagagcatgagcaaggtggcctccgagaagtacgaggagggggagcgggcattgcgcgaggcccagcaggtgcaggcagagcagcaggcccggttgcaggcggtgcagcaacagcaggagcggctgcggaagcaggagcagcacatgcaccaggagcatctgagtctggcccagcagaggctgcaactggaccgcgcacgacaggacctgccctctagcctcgtgggtctgttccccagggcccagggccctgcagcctccagccagagtgccctcatgcctcctgctcccaccacccgttggtgcagccagccgccaactggcctggaccccagccccttgcacctccatgccaggctggcactgctgaggcacatggcagagcaggaccgtgacttcttggagaatgaacagttcttcctggagaccctgaagaaagggtcctacaatttgacatctcattcagcctgagtgggaccccagccgattccccaacagagggttcggaccccagaactgtcctgttcctccggctgcctccatggaggcagtgcctggggaggattctgagatgcttgaggcctgatgacagctcttccgtggacagggtgcaagtgcatcctttccaaatgtgccagcccggggcagcccctgcctctggggctctgtggtgtaggctatcttaccatggctttggctgccctgccccaaagccattggcttggatctgagggtctgagttggcagcaaggacccccagctctcactgggctctgtgggctccccctgggctctgtgggctccccctgctccacaggtagactgttgtgggctctttttgcctgggcctcttctgaggcaggagctttcttgagggatgccacaaacagccttccctactccctgccagagcagttccctccctgatgagctggagaagggccctctggcctcctgacagtacagggagggcaccagctagatcctcccttgtggtgtgagatgttcctggaactcagccaggccctcctcctcctgggcttgcccagagcccccaccctattcccagcattgcccgaaggaccaaccagtttgggtgaacagtggcctcctcagcttcctccccatctgggtgccccaccggcggcggagggagctgtggcgatggtggggtgtggggagggacgaggagggaagcctctgtgctgctcacctgcccaaagcccagctcagcgggtacgcagtggaggcgacaaggaaccaatcacaactacagaggtttctctgatcctcctccactcccgctgcttcaacttgactaagcttaaaaaaactgcttttgccatggctcatcggagtttatacttatttcttagaaaatgtttcctgttatttgctggacaagtcccaaagaacaggcagatgttcttattaaaagatcagcctataagattggtcaggaccaggcgcctctggccacgtgcctctcccctccagcacctgcggtctgcggtggcacctggcagctggaccacagccaggagaagggtactattagccctgcttcaaacatgcagaaactgaggcccggggagattaaataacctgcctgaaatgaca

SEQ ID NO: 433252 - DNA, 4866 bp, Homo sapiens
gcggcagcggctggaagcgggagccagtcctggccgggctgggcgacccgaatggagccagggccggcctggtcccagcggccgcacctccgggggcacggcgcgtaacaggaggcttccggggctgagagcgttacaggctgcgctccggggccagataggccgggcgctcagaaggggagtatgagcctgatgtgggcagaatccagatgagctggccagtgctgtgaaggagctgagagcacccccgagagccgtgagatggcaccaaaaaccaagaaaggatgtaaagtgacactacctgagaagcctgttaaactagcttcacataccagagacaccacaggtgtatctcagatgttcccttcttcaaaggcgagaacaaagtccctcctgggtgatgatgtcttcagcaccatggcaggcctggaagaagctgatgctgaggtttcagttatctcagaggcagacccacaggctctgctccaggccatgaaggacctggacggcatggatgctgatatcttaggtctgaagaaatctaattcagcccctagcaaaaaagctgcaaaggaccctgggaaaggagagctgcccaaccaccccaagcctgcagggggtgccattcccaccaagaagtcacttccgtctcccagcagctctgggcatcagaacaggaggttttcctctgaagacttggaagacccattgggaggacttctctcctatgatgaaggaggaatcaccaagcagccgcctgtgacacagagtaaaacagcttctgacaagagccccagcacagtgagagatcaaggtccctctattcctctaactcctggggacacccccatccgaaaaaaagaagaattgttgtttgatgatggggatgacatcatggccaccttggggtttggagacagccccaaagcagagaagaggcagataggagaccaggaagggcctcgccctgctcgctccacgctggatgagctgctgggtcgaggcatggccaccaaactcctggcccgcccgggcaccggggagcacagggagttcaagctagacaagaagtaccagaggccacaggacagtgaagatatgtggggtgacgaggacttcacctttggagcctatcagcccactgtggtctcctctgagggccggcagtcccgccggcagtctgtcagtaggttcttcgcagacagtggcgcagaccccaagggagaaccaggctccaaacagagccctccaatggcttccagccccatccagcccaggaagggaggagctgactggttgggcctcaaggacgaggacttggacctgttccctgcctcacccaccagagaggcccatcgggaaagttcagtgcctgtcacgccctcagtgcctcctcctgcgagccagcactccacgccagctgggctgcccccctccagggcaaagccaccaactgaaggtgcagggtcccctgccaaagccagccaggcttccaagctgcgagcctccaaggaggagaaagaggactggctgagccatgccctgtctcggaagaagtcccaaggcctggccagagagcagcatgctgggacctctgagggcctgcatttggcggggacagcgggccatcccccttctggcagcctgacctgggccttctgtcaccttcaccttgaacgctgcctttcctcagccaacctctcaccagcacacaagggcttgagcacgcagctgctggagggagttctggaacaactgcacgaggaaagaccgtgtgtcaggcctggtgtctcggggtcccctgtgactcagaaccatgccgcctcagcactccctacaggttccccaaagaggggaacagcccctggagacctctcagccactgagcctgccacgtgtttcccgagcacccagaaacccacagagccttccgtgcccgtccagcccctgctcccagagtccctggcccggagcctgctgccgagcacagaataccagaagcagctcctggcagcacaggtgcaacttcagtgcagccccgctgagctccaggccgagctgctgcatagccaggcccggctggcagagctggaggcccaggtgcggaagctggagctagaacgggcccagcatgagctgctgctggggagtctgcagcagcagcaccaggcagacctggagctcatcgagagtgcacacagaagccgcatcaaggtgctagaaacatcgtaccagcaacgggaggagcggctccggagagagaacgaagagctgtcagctcggtatctgtcgcagtgccaggaggccgaacaggcccgtgctgagcttacggcccagcaccagcggcgcttggcggccatagcgcaggagaaggaccaggaaatggagcggctccgggagctgcagcgggcgtccatcctagacatgcgcagagaccacgaggagcagctgcagcggctaaagctgctgaaggaccgagaggtcgatgcggccaccagtgccacctcccacacgcggtccctgaatagcatcatccaccagatggagaagttctccagcagcctgcacgagttgtcctcccgcgtggaggcctcgcacctcaccacctcccaggagcgggagctggggatccggcagcgtgacgagcagctgcgggcactgcaggagcggctgggccagcagcagcgggacatggaggaggagcggagccggcaacaggaggtcatcgggaagatggaggcacggctgaatgagcagagccggctgctggagcaggaacgctggcgggtgactgccgagcagtccaaggcggagtccatgcagcgcgccctagaggagcaaaggaaggtcacggcccagcagatggccatggaaagggcggagctggaacgggccaagagcgccttgctggaggagcagaagtctgtcatgctcaagtgcggggaggagcggcggcgcctggctgccgagtgggcggagttctccgcgcagcaaaagctgagtaaggagcgggccgagcgcgaggccgagcgggcattgcaggtggacacccagcgggagggcaccctcatcagcctggccaaggagcaggctgagctgaagatcagggccagcgagctccgggccgaggagaagcagctggcagcggagagagcagccctggagcaggagcggcaggagctgcggctggagaaggagaggatcaacgccaccgccctgcgtgtcaagctccgcgccgaggaggtggagagcatgagcaaggtggcctccgagaagtacgaggagggggagcgggcattgcgcgaggcccagcaggtgcaggcagagcagcaggcccggttgcaggcggtgcagcaacagcaggagcggctgcggaagcaggagcagcacatgcaccaggagcatctgagtctggcccagcagaggctgcaactggaccgcgcacgacaggacctgccctctagcctcgtgggtctgttccccagggcccagggccctgcagcctccagccagagtgccctcatgcctcctgctcccaccacccgttggtgcagccagccgccaactggcctggaccccagccccttgcacctccatgccaggctggcactgctgaggcacatggcagagcaggaccgtgacttcttggagaatgaacagttcttcctggagaccctgaagaaagggtcctacaatttgacatctcattcagcctgagtgggaccccagccgattccccaacagagggttcggaccccagaactgtcctgttcctccggctgcctccatggaggcagtgcctggggaggattctgagatgcttgaggcctgatgacagctcttccgtggacagggtgcaagtgcatcctttccaaatgtgccagcccggggcagcccctgcctctggggctctgtggtgtaggctatcttaccatggctttggctgccctgccccaaagccattggcttggatctgagggtctgagttggcagcaaggacccccagctctcactgggctctgtgggctccccctgggctctgtgggctccccctgctccacaggtagactgttgtgggctctttttgcctgggcctcttctgaggcaggagctttcttgagggatgccacaaacagccttccctactccctgccagagcagttccctccctgatgagctggagaagggccctctggcctcctgacagtacagggagggcaccagctagatcctcccttgtggtgtgagatgttcctggaactcagccaggccctcctcctcctgggcttgcccagagcccccaccctattcccagcattgcccgaaggaccaaccagtttgggtgaacagtggcctcctcagcttcctccccatctgggtgccccaccggcggcggagggagctgtggcgatggtggggtgtggggagggacgaggagggaagcctctgtgctgctcacctgcccaaagcccagctcagcgggtacgcagtggaggcgacaaggaaccaatcacaactacagaggtttctctgatcctcctccactcccgctgcttcaacttgactaagcttaaaaaaactgcttttgccatggctcatcggagtttatacttatttcttagaaaatgtttcctgttatttgctggacaagtcccaaagaacaggcagatgttcttattaaaagatcagcctataagattggtcaggaccaggcgcctctggccacgtgcctctcccctccagcacctgcggtctgcggtggcacctggcagctggaccacagccaggagaagggtactattagccctgcttcaaacatgcagaaactgaggcccggggagattaaataacctgcctgaaatgaca

SEQ ID NO: 433253 - DNA, 3985 bp, Homo sapiens
gcggcagcggctggaagcgggagccagtcctggccgggctgggcgacccgaatggagccagggccggcctggtcccagcggccgcacctccgggggcacggcgcgtaacaggaggcttccggggctgagagcgttacaggctgcgctccggggccagataggccgggcgctcagaaggggagtatgagcctgatgtgggcagaatccagatgagctggccagtgctgtgaaggagctgagagcacccccgagagccgtgagatggcaccaaaaaccaagaaaggatgtaaagtgacactacctgagaagcctgttaaactagcttcacataccagagacaccacaggtgtatctcagatgttcccttcttcaaaggcgagaacaaagtccctcctgggtgatgatgtcttcagcaccatggcaggcctggaagaagctgatgctgaggtttcagttatctcagaggcagacccacaggctctgctccaggccatgaaggacctggacggcatggatgctgatatcttaggtctgaagaaatctaattcagcccctagcaaaaaagctgcaaaggaccctgggaaaggagagctgcccaaccaccccaagcctgcagggggtgccattcccaccaagaagtcacttccgtctcccagcagctctgggcatcagaacaggaggttttcctctgaagacttggaagacccattgggaggacttctctcctatgatgaaggaggaatcaccaagcagccgcctgtgacacagagtaaaacagcttctgacaagagccccagcacagtgagagatcaaggtccctctattcctctaactcctggggacacccccatccgaaaaaaagaagaattgttgtttgatgatggggatgacatcatggccaccttggggtttggagacagccccaaagcagagaagaggcagataggagaccaggaagggcctcgccctgctcgctccacgctggatgagctgctgggtcgaggcatggccaccaaactcctggcccgcccgggcaccggggagcacagggagttcaagctagacaagaagtaccagaggccacaggacagtgaagatatgtggggtgacgaggacttcacctttggagcctatcagcccactgtggtctcctctgagggccggcagtcccgccggcagtctgtcagtaggttcttcgcagacagtggcgcagaccccaagggagaaccaggctccaaacagagccctccaatggcttccagccccatccagcccaggaagggaggagctgactggttgggcctcaaggacgaggacttggacctgttccctgcctcacccaccagagaggcccatcgggaaagttcagtgcctgtcacgccctcagtgcctcctcctgcgagccagcactccacgccagctgggctgcccccctccagggcaaagccaccaactgaaggtgcagggtcccctgccaaagccagccaggcttccaagctgcgagcctccaaggaggagaaagaggactggctgagccatgccctgtctcggaagaagtcccaaggcctggccagagagcagcatgctgggacctctgagggcctgcatttggcggggacagcgggccatcccccttctggcagcctgacctgggccttctgtcaccttcaccttgaacgctgcctttcctcagccaacctctcaccagcacacaagggcttgagcacgcagctgctggagggagttctggaacaactgcacgaggaaagaccgtgtgtcaggcctggtgtctcggggtcccctgtgactcagaaccatgccgcctcagcactccctacaggttccccaaagaggggaacagcccctggagacctctcagccactgagcctgccacgtgtttcccgagcacccagaaacccacagagccttccgtgcccgtccagcccctgctcccagagtccctggcccggagcctgctgccgagcacagaataccagaagcagctcctggcagcacaggtgcaacttcagtgcagccccgctgagctccaggccgagctgctgcatagccaggcccggctggcagagctggaggcccaggtgcggaagctggagctagaacgggcccagcatgagctgctgctggggagtctgcagcagcagcaccaggcagacctggagctcatcgagagtgcacacagaagccgcatcaaggtgctagaaacatcgtaccagcaacgggaggagcggctccggagagagaacgaagagctgtcagctcggtatctgtcgcagtgccaggaggccgaacaggcccgtgctgagcttacggcccagcaccagcggcgcttggcggccatagcgcaggagaaggaccaggaaatggagcggctccgggagctgcagcgggcgtccatcctagacatgcgcagagaccacgaggagcagctgcagcggctaaagctgctgaaggaccgagaggtcgatgcggccaccagtgccacctcccacacgcggtccctgaatagcatcatccaccagatggagaagttctccagcagcctgcacgagttgtcctcccgcgtggaggcctcgcacctcaccacctcccaggagcgggagctggggatccggcagcgtgacgagcagctgcgggcactgcaggagcggctgggccagcagcagcgggacatggaggaggagcggagccggcaacaggaggtcatcgggaagatggaggcacggctgaatgagcagagccggctgctggagcaggaacgctggcgggtgactgccgagcagtccaaggcggagtccatgcagcgcgccctagaggagcaaaggaaggtcacggcccagcagatggccatggaaagggcggagctggaacgggccaagagcgccttgctggaggagcagaagtctgtcatgctcaagtgcggggaggagcggcggcgcctggctgccgagtgggcggagttctccgcgcagcaaaagctgagtaaggagcgggccgagcgcgaggccgagcgggcattgcaggtggacacccagcgggagggcaccctcatcagcctggccaaggtagggcccagagcctccggacagtggagggcccagggttgcctgcgcccctccatctggacacatccgcttccagtcttaggaaaggagagtgtagcactaatgtcacaagagcatagggattaaaacagtaatcgcatcatcatgctaacatcttcctcgtattgtcccaggtgcattatacacattttatttgatcctcatgttcccatgactttggtcatttagaaatgaggaaaccgaacttcagagttgagcctgccacagtcacgtggcttgtgagatgttcctggaactcagccaggccctcctcctcctgggcttgcccagagcccccaccctattcccagcattgcccgaaggaccaaccagtttgggtgaacagtggcctcctcagcttcctccccatctgggtgccccaccggcggcggagggagctgtggcgatggtggggtgtggggagggacgaggagggaagcctctgtgctgctcacctgcccaaagcccagctcagcgggtacgcagtggaggcgacaaggaaccaatcacaactacagaggtttctctgatcctcctccactcccgctgcttcaacttgactaagcttaaaaaaactgcttttgccatggctcatcggagtttatacttatttcttagaaaatgtttcctgttatttgctggacaagtcccaaagaacaggcagatgttcttattaaaagatcagcctataagattggtcaggaccaggcgcctctggccacgtgcctctcccctccagcacctgcggtctgcggtggcacctggcagctggaccacagccaggagaagggtactattagccctgcttcaaacatgcagaaactgaggcccggggagattaaataacctgcctgaaatgaca

SEQ ID NO: 433254 - DNA, 1886 bp, Homo sapiens
  misc_feature (12)..(12): n is a, c, g, or t
aattcggcacgnggcgggacgagaaggagcgggccgagcgcgaggccgagcgggcattgcaggtggacacccagcgggagggcaccctcatcagcctggccaaggagcaggctgagctgaagatcagggccagcgagctccgggccgaggagaagcagctggcagcggagagagcagccctggagcaggagcggcaggagctgcggctggagaaggagaggatcaacgccaccgccctgcgtgtcaagctccgcgccgaggaggtggagagcatgagcaaggtggcctccgagaagtacgaggagggggagcgggcattgcgcgaggcccagcaggtgcaggcagagcagcaggcccggttgcaggcggtgcagcaacagcaggagcggctgcggaagcaggagcagcacatgcaccaggagcatctgagtctggcccagcagaggctgcaactggaccgcgcacgacaggacctgccctctagcctcgtgggtctgttccccagggcccagggccctgcagcctccagccagagtgccctcatgcctcctgctcccaccacccgttggtgcagccagccgccaactggcctggaccccagccccttgcacctccatgccaggctggcactgctgaggcacatggcagagcaggaccgtgacttcttggagaatgaacagttcttcctggagaccctgaagaaagggtcctacaatttgacatctcattcagcctgagtgggaccccagccgattccccaacagagggttcggaccccagaactgtcctgttcctccggctgcctccatggaggcagtgcctggggaggattctgagatgcttgaggcctgatgacagctcttccgtggacagggtgcaagtgcatcctttccaaatgtgccagcccggggcagcccctgcctctggggctctgtggtgtaggctatcttaccatggctttggctgccctgccccaaagccattggcttggatctgagggtctgagttggcagcaaggacccccagctctcactgggctctgtgggctccccctgggctctgtgggctccccctgctccacaggtagactgttgtgggctctttttgcctgggcctcttctgaggcaggagctttcttgagggatgccacaaacagccttccctactccctgccagagcagttccctccctgatgagctggagaagggccctctggcctcctgacagtacagggagggcaccagctagatcctcccttgtggtgtgagatgttcctggaactcagccaggccctcctcctcctgggcttgcccagagcccccaccctattcccagcattgcccgaaggaccaaccagtttgggtgaacagtggcctcctcagcttcctccccatctgggtgccccaccggcggcggagggagctgtggcgatggtggggtgtggggagggacgaggagggaagcctctgtgctgctcacctgcccaaagcccagctcagcgggtacgcagtggaggcgacaaggaaccaatcacaactacagaggtttctctgatcctcctccactcccgctgcttcaacttgactaagcttaaaaaaactgcttttgccatggctcatcggagtttatacttatttcttagaaaatgtttcctgttatttgctggacaagtcccaaagaacaggcagatgttcttattaaaagatcagcctataagattggtcaggaccaggcgcctctggccacgtgcctctcccctccagcacctgcggtctgcggtggcacctggcagctggaccacagccaggagaagggtactattagccctgcttcaaacatgcagaaactgaggcccggggagattaaataacctgcctgaaatgaca

SEQ ID NO: 433255 - DNA, 685 bp, Homo sapiens
gcggcagcggctggaagcgggagccagtcctggccgggctgggcgacccgaatggagccagggccggcctggtcccagcggccgcacctccgggggcacggcgcgtaacaggaggcttccggggctgagagcgttacaggctgcgctccggggccagataggccgggcgctcagaaggggagtatgagcctgatgtgggcagaatccagatgagctggccagtgctgtgaaggagctgagagcacccccgagagccgtgagatgcaccaaaaaccaagaaaggatgtaaaggctccattgatgattttcttggtgaccttctaggggatgatatgacactacctgagaagcctgttaaactagcttcacataccagagacaccacaggtgtatctcagatgttcccttcttcaaaggcgagaacaaagtccctcctgggtgatgatgtcttcagcaccatggcaggcctggaagaagctgatgctgaggtttcagttatctcagaggcagacccacaggctctgctccaggccatgaaggacctggacggcatggatgctgatatcttaggtctgaagaaatctaattcagcccctagcaaaaaagctgcaaaggaccctgggaaaggagagctgcccaaccaccccaagcctgcaggtgggtcagtagccagtgagaaaggtgc

SEQ ID NO: 433256 - DNA, 4816 bp, Homo sapiens
gcggcagcggctggaagcgggagccagtcctggccgggctgggcgacccgaatggagccagggccggcctggtcccagcggccgcacctccgggggcacggcgcgtaacaggaggcttccggggctgagagcgttacaggctgcgctccggggccagataggccgggcgctcagaaggggagtatgagcctgatgtgggcagaatccagatgagctggccagtgctgtgaaggagctgagagcacccccgagagccgtgagatggcaccaaaaaccaagaaaggatgtaaagtgacactacctgagaagcctgttaaactagcttcacataccagagacaccacaggtgtatctcagatgttcccttcttcaaaggcgagaacaaagtccctcctgggtgatgatgtcttcagcaccatggcaggcctggaagaagctgatgctgaggtttcagttatctcagaggcagacccacaggctctgctccaggccatgaaggacctggacggcatggatgctgatatcttaggtctgaagaaatctaattcagcccctagcaaaaaagctgcaaaggaccctgggaaaggagagctgcccaaccaccccaagcctgcagggggtgccattcccaccaagaagtcacttccgtctcccagcagctctgggcatcagaacaggaggttttcctctgaagacttggaagacccattgggaggacttctctcctatgatgaaggaggaatcaccaagcagccgcctgtgacacagagtaaaacagcttctgacaagagccccagcacagtgagagatcaaggtccctctattcctctaactcctggggacacccccatccgaaaaaaagaagaattgttgtttgatgatggggatgacatcatggccaccttggggtttggagacagccccaaagcagagaagaggcagataggagaccaggaagggcctcgccctgctcgctccacgctggatgagctgctgggtcgaggcatggccaccaaactcctggcccgcccgggcaccggggagcacagggagttcaagctagacaagaagtaccagaggccacaggacagtgaagatatgtggggtgacgaggacttcacctttggagcctatcagcccactgtggtctcctctgagggccggcagtcccgccggcagtctgtcagtaggttcttcgcagacagtggcgcagaccccaagggagaaccaggctccaaacagagccctccaatggcttccagccccatccagcccaggaagggaggagctgactggttgggcctcaaggacgaggacttggacctgttccctgcctcacccaccagagaggcccatcgggaaagttcagtgcctgtcacgccctcagtgcctcctcctgcgagccagcactccacgccagctgggctgcccccctccagggcaaagccaccaactgaaggtgcagggtcccctgccaaagccagccaggcttccaagctgcgagcctccaaggaggagaaagaggactggctgagccatgccctgtctcggaagaagtcccaaggcctggccagagagcagcatgctgggacctctgagggcctgcatttggcggggacagcgggccatcccccttctggcagccaacctctcaccagcacacaagggcttgagcacgcagctgctggagggagttctggaacaactgcacgaggaaagaccgtgtgtcaggcctggtgtctcggggtcccctgtgactcagaaccatgccgcctcagcactccctacaggttccccaaagaggggaacagcccctggagacctctcagccactgagcctgccacgtgtttcccgagcacccagaaacccacagagccttccgtgcccgtccagcccctgctcccagagtccctggcccggagcctgctgccgagcacagaataccagaagcagctcctggcagcacaggtgcaacttcagtgcagccccgctgagctccaggccgagctgctgcatagccaggcccggctggcagagctggaggcccaggtgcggaagctggagctagaacgggcccagcatgagctgctgctggggagtctgcagcagcagcaccaggcagacctggagctcatcgagagtgcacacagaagccgcatcaaggtgctagaaacatcgtaccagcaacgggaggagcggctccggagagagaacgaagagctgtcagctcggtatctgtcgcagtgccaggaggccgaacaggcccgtgctgagcttacggcccagcaccagcggcgcttggcggccatagcgcaggagaaggaccaggaaatggagcggctccgggagctgcagcgggcgtccatcctagacatgcgcagagaccacgaggagcagctgcagcggctaaagctgctgaaggaccgagaggtcgatgcggccaccagtgccacctcccacacgcggtccctgaatagcatcatccaccagatggagaagttctccagcagcctgcacgagttgtcctcccgcgtggaggcctcgcacctcaccacctcccaggagcgggagctggggatccggcagcgtgacgagcagctgcgggcactgcaggagcggctgggccagcagcagcgggacatggaggaggagcggagccggcaacaggaggtcatcgggaagatggaggcacggctgaatgagcagagccggctgctggagcaggaacgctggcgggtgactgccgagcagtccaaggcggagtccatgcagcgcgccctagaggagcaaaggaaggtcacggcccagcagatggccatggaaagggcggagctggaacgggccaagagcgccttgctggaggagcagaagtctgtcatgctcaagtgcggggaggagcggcggcgcctggctgccgagtgggcggagttctccgcgcagcaaaagctgagtaaggagcgggccgagcgcgaggccgagcgggcattgcaggtggacacccagcgggagggcaccctcatcagcctggccaaggagcaggctgagctgaagatcagggccagcgagctccgggccgaggagaagcagctggcagcggagagagcagccctggagcaggagcggcaggagctgcggctggagaaggagaggatcaacgccaccgccctgcgtgtcaagctccgcgccgaggaggtggagagcatgagcaaggtggcctccgagaagtacgaggagggggagcgggcattgcgcgaggcccagcaggtgcaggcagagcagcaggcccggttgcaggcggtgcagcaacagcaggagcggctgcggaagcaggagcagcacatgcaccaggagcatctgagtctggcccagcagaggctgcaactggaccgcgcacgacaggacctgccctctagcctcgtgggtctgttccccagggcccagggccctgcagcctccagccagagtgccctcatgcctcctgctcccaccacccgttggtgcagccagccgccaactggcctggaccccagccccttgcacctccatgccaggctggcactgctgaggcacatggcagagcaggaccgtgacttcttggagaatgaacagttcttcctggagaccctgaagaaagggtcctacaatttgacatctcattcagcctgagtgggaccccagccgattccccaacagagggttcggaccccagaactgtcctgttcctccggctgcctccatggaggcagtgcctggggaggattctgagatgcttgaggcctgatgacagctcttccgtggacagggtgcaagtgcatcctttccaaatgtgccagcccggggcagcccctgcctctggggctctgtggtgtaggctatcttaccatggctttggctgccctgccccaaagccattggcttggatctgagggtctgagttggcagcaaggacccccagctctcactgggctctgtgggctccccctgggctctgtgggctccccctgctccacaggtagactgttgtgggctctttttgcctgggcctcttctgaggcaggagctttcttgagggatgccacaaacagccttccctactccctgccagagcagttccctccctgatgagctggagaagggccctctggcctcctgacagtacagggagggcaccagctagatcctcccttgtggtgtgagatgttcctggaactcagccaggccctcctcctcctgggcttgcccagagcccccaccctattcccagcattgcccgaaggaccaaccagtttgggtgaacagtggcctcctcagcttcctccccatctgggtgccccaccggcggcggagggagctgtggcgatggtggggtgtggggagggacgaggagggaagcctctgtgctgctcacctgcccaaagcccagctcagcgggtacgcagtggaggcgacaaggaaccaatcacaactacagaggtttctctgatcctcctccactcccgctgcttcaacttgactaagcttaaaaaaactgcttttgccatggctcatcggagtttatacttatttcttagaaaatgtttcctgttatttgctggacaagtcccaaagaacaggcagatgttcttattaaaagatcagcctataagattggtcaggaccaggcgcctctggccacgtgcctctcccctccagcacctgcggtctgcggtggcacctggcagctggaccacagccaggagaagggtactattagccctgcttcaaacatgcagaaactgaggcccggggagattaaataacctgcctgaaatgaca

SEQ ID NO: 433257 - DNA, 5787 bp, Homo sapiens
  misc_feature (4929)..(4929): n is a, c, g, or t
gcggcagcggctggaagcgggagccagtcctggccgggctgggcgacccgaatggagccagggccggcctggtcccagcggccgcacctccgggggcacggcgcgtaacaggaggcttccggggctgagagcgttacaggctgcgctccggggccagataggccgggcgctcagaaggggagtatgagcctgatgtgggcagaatccagatgagctggccagtgctgtgaaggagctgagagcacccccgagagccgtgagatggcaccaaaaaccaagaaaggatgtaaagtgacactacctgagaagcctgttaaactagcttcacataccagagacaccacaggtgtatctcagatgttcccttcttcaaaggcgagaacaaagtccctcctgggtgatgatgtcttcagcaccatggcaggcctggaagaagctgatgctgaggtttcagttatctcagaggcagacccacaggctctgctccaggccatgaaggacctggacggcatggatgctgatatcttaggtctgaagaaatctaattcagcccctagcaaaaaagctgcaaaggaccctgggaaaggagagctgcccaaccaccccaagcctgcagggggtgccattcccaccaagaagtcacttccgtctcccagcagctctgggcatcagaacaggaggttttcctctgaagacttggaagacccattgggaggacttctctcctatgatgaaggaggaatcaccaagcagccgcctgtgacacagagtaaaacagcttctgacaagagccccagcacagtgagagatcaaggtccctctattcctctaactcctggggacacccccatccgaaaaaaagaagaattgttgtttgatgatggggatgacatcatggccaccttggggtttggagacagccccaaagcagagaagaggcagataggagaccaggaagggcctcgccctgctcgctccacgctggatgagctgctgggtcgaggcatggccaccaaactcctggcccgcccgggcaccggggagcacagggagttcaagctagacaagaagtaccagaggccacaggacagtgaagatatgtggggtgacgaggacttcacctttggagcctatcagcccactgtggtctcctctgagggccggcagtcccgccggcagtctgtcagtaggttcttcgcagacagtggcgcagaccccaagggagaaccaggctccaaacagagccctccaatggcttccagccccatccagcccaggaagggaggagctgactggttgggcctcaaggacgaggacttggacctgttccctgcctcacccaccagagaggcccatcgggaaagttcagtgcctgtcacgccctcagtgcctcctcctgcgagccagcactccacgccagctgggctgcccccctccagggcaaagccaccaactgaaggtgcagggtcccctgccaaagccagccaggcttccaagctgcgagcctccaaggaggagaaagaggactggctgagccatgccctgtctcggaagaagtcccaaggcctggccagagagcagcatgctgggacctctgagggcctgcatttggcggggacagcgggccatcccccttctggcagccaacctctcaccagcacacaagggcttgagcacgcagctgctggagggagttctggaacaactgcacgaggaaagaccgtgtgtcaggcctggtgtctcggggtcccctgtgactcagaaccatgccgcctcagcactccctacaggttccccaaagaggggaacagcccctggagacctctcagccactgagcctgccacgtgtttcccgagcacccagaaacccacagagccttccgtgcccgtccagcccctgctcccagagtccctggcccggagcctgctgccgagcacagaataccagaagcagctcctggcagcacaggtgcaacttcagtgcagccccgctgagctccaggccgagctgctgcatagccaggcccggctggcagagctggaggcccaggtgcggaagctggagctagaacgggcccagcatgagctgctgctggggagtctgcagcagcagcaccaggcagacctggagctcatcgagagtgcacacagaagccgcatcaaggtgctagaaacatcgtaccagcaacgggaggagcggctccggagagagaacgaagagctgtcagctcggtatctgtcgcagtgccaggaggccgaacaggcccgtgctgagcttacggcccagcaccagcggcgcttggcggccatagcgcaggagaaggaccaggaaatggagcggctccgggagctgcagcgggcgtccatcctagacatgcgcagagaccacgaggagcagctgcagcggctaaagctgctgaaggaccgagaggtcgatgcggccaccagtgccacctcccacacgcggtccctgaatagcatcatccaccagatggagaagttctccagcagcctgcacgagttgtcctcccgcgtggaggcctcgcacctcaccacctcccaggagcgggagctggggatccggcagcgtgacgagcagctgcgggcactgcaggagcggctgggccagcagcagcgggacatggaggaggagcggagccggcaacaggaggtcatcgggaagatggaggcacggctgaatgagcagagccggctgctggagcaggaacgctggcgggtgactgccgagcagtccaaggcggagtccatgcagcgcgccctagaggagcaaaggaaggtcacggcccagcagatggccatggaaagggcggagctggaacgggccaagagcgccttgctggaggagcagaagtctgtcatgctcaagtgcggggaggagcggcggcgcctggctgccgagtgggcggagttctccgcgcagcaaaagctgagtaaggagcgggccgagcgcgaggccgagcgggcattgcaggtggacacccagcgggagggcaccctcatcagcctggccaaggagcaggctgagctgaagatcagggccagcgagctccgggccgaggagaagcagctggcagcggagagagcagccctggagcaggagcggcaggagctgcggctggagaaggagaggatcaacgccaccgccctgcgtgtcaagctccgcgccgaggaggtggagagcatgagcaaggtggcctccgagaagtacgaggagggggagcgggcattgcgcgaggcccagcaggtgcaggcagagcagcaggcccggttgcaggcggtgcagcaacagcaggagcggctgcggaagcaggagcagcacatgcaccaggagcatctgagtctggcccagcagaggctgcaactggaccgcgcacgacaggacctgccctctagcctcgtgggtctgttccccagggcccagggccctgcagcctccagccagagtgccctcatgcctcctgctcccaccacccgttggtgcagccagccgccaactggcctggaccccagccccttgcacctccatgccaggctggcactgctgaggcacatggcagagcaggaccgtgacttcttggagaatgaacagttcttcctggagaccctgaagaaagggtcctacaatttgacatctcattcagcctgagtgggaccccagccgattccccaacagagggttcggaccccagaactgtcctgttcctccggctgcctccatggaggcagtgcctggggaggattctgagatgcttgaggcctgatgacagctcttccgtggacagggtgcaagtgcatcctttccaaatgtgccagcccggggcagcccctgcctctggggctctgtggtgtaggctatcttaccatggctttggctgccctgccccaaagccattggcttggatctgagggtctgagttggcagcaaggacccccagctctcactgggctctgtgggctccccctgggctctgtgggctccccctgctccacaggtagactgttgtgggctctttttgcctgggcctcttctgaggcaggagctttcttgagggatgccacaaacagccttccctactccctgccagagcagttccctccctgatgagctggagaagggccctctggcctcctgacagtacagggagggcaccagctagatcctcccttgtggtgtgagatgttcctggaactcagccaggccctcctcctcctgggcttgcccagagcccccaccctattcccagcattgcccgaaggaccaaccagtttgggtgaacagtggcctcctcagcttcctccccatctgggtgccccaccggcggcggagggagctgtggcgatggtggggtgtggggagggacgaggagggaagcctctgtgctgctcacctgcccaaagcccagctcagcgggtacgcagtggaggcgacaaggaaccaatcacaactacagaggtttctctgatcctcctccactcccgctgcttcaacttgactaagcttaaaaaaactgcttttgccatggctcatcggagtttatacttatttcttagaaaatgtttcctgttatttgctggacaagtcccaaagaacaggcagatgttcttattaaaagatcagcctataagattggtcaggaccaggcgcctctggccacgtgcctctcccctccagcacctgcggtctgcggtggcacctggcagctggaccacagccaggagaagggtactattagccctgcttcaaacatgcagaaactgaggcccggggagattaaataacctgcctgaaatgacaccgtcctgggccgccggacacccccgctggggccgatgcccaacagtgacatcgacttgagcaacctggagcggctggagaagtaccggagcttcgaccgctaccggcgccgngcagagcaggaggcgcaggccccgcactggtggcggacctaccgagagtatttcggggagaagacagatcccaaagagaagattgatattgggctgcctccacccaaagtctcccggacccaacagctactggaacggaaacaggccatccaggagcttcgggccaatgtggaagaggagcgggctgcccgcctccgcacagtgtcccgctggatgccgtgcgggccgagtgggagaggacctgtggcccctaccacaagcagcgtctggctgagtattacggcctctaccgagacctgttccacggtgccacctttgtgccccgagtccccctgcacgtggcctacgctgtgggtgaggatgacctgatgcctgtgtactgtggcaatgaggtgactccaaccgaggctgcccaagcgccagaggtgacctatgaggcagaagagggctccttgtggacgttgctactcactagcttggatgggcacctgctggagccagatgctgagtacctccactggctgctaaccaacatcccgggtaaccgggtggctgaaggacaggtgacgtgtccctacctcccccccttccctgcccgaggctccggcatccaccgtcttgccttcctgctcttcaagcaggaccagccgattgacttctctgaggacgcacgcccctcaccctgctatcagctggcccagcggaccttccgcacttttgatttctacaagaaacaccaagaaaccatgactccagccggcttgtccttcttccagtgccgctgggatgactccgtcacctacatcttccaccagcttctggacatgcgggagccggtgtttgagttcgtgcggccgc

SEQ ID NO: 433258 - DNA, 3833 bp, Homo sapiens
gcggcagcggctggaagcgggagccagtcctggccgggctgggcgacccgaatggagccagggccggcctggtcccagcggccgcacctccgggggcacggcgcgtaacaggaggcttccggggctgagagcgttacaggctgcgctccggggccagataggccgggcgctcagaaggggagtatgagcctgatgtgggcagaatccagatgagctggccagtgctgtgaaggagctgagagcacccccgagagccgtgagatggcaccaaaaaccaagaaaggatgtaaagtgacactacctgagaagcctgttaaactagcttcacataccagagacaccacaggtgtatctcagatgttcccttcttcaaaggcgagaacaaagtccctcctgggtgatgatgtcttcagcaccatggcaggcctggaagaagctgatgctgaggtttcagttatctcagaggcagacccacaggctctgctccaggccatgaaggacctggacggcatggatgctgatatcttaggtctgaagaaatctaattcagcccctagcaaaaaagctgcaaaggaccctgggaaaggagagctgcccaaccaccccaagcctgcagggggtgccattcccaccaagaagtcacttccgtctcccagcagctctgggcatcagaacaggaggttttcctctgaagacttggaagacccattgggaggacttctctcctatgatgaaggaggaatcaccaagcagccgcctgtgacacagagtaaaacagcttctgacaagagccccagcacagtgagagatcaaggtccctctattcctctaactcctggggacacccccatccgaaaaaaagaagaattgttgtttgatgatggggatgacatcatggccaccttggggtttggagacagccccaaagcagagaagaggcagataggagaccaggaagggcctcgccctgctcgctccacgctggatgagctgctgggtcgaggcatggccaccaaactcctggcccgcccgggcaccggggagcacagggagttcaagctagacaagaagtaccagaggccacaggacagtgaagatatgtggggtgacgaggacttcacctttggagcctatcagcccactgtggtctcctctgagggccggcagtcccgccggcagtctgtcagtaggttcttcgcagacagtggcgcagaccccaagggagaaccaggctccaaacagagccctccaatggcttccagccccatccagcccaggaagggaggagctgactggttgggcctcaaggacgaggacttggacctgttccctgcctcacccaccagagaggcccatcgggaaagttcagtgcctgtcacgccctcagtgcctcctcctgcgagccagcactccacgccagctgggctgcccccctccagggcaaagccaccaactgaaggtgcagggtcccctgccaaagccagccaggcttccaagctgcgagcctccaaggaggagaaagaggactggctgagccatgccctgtctcggaagaagtcccaaggcctggccagagagcagcatgctgggacctctgagggcctgcatttggcggggacagcgggccatcccccttctggcagcctgacctgggccttctgtcaccttcaccttgaacgctgcctttcctcagccaacctctcaccagcacacaagggcttgagcacgcagctgctggagggagttctggaacaactgcacgaggaaagaccgtgtgtcaggcctggtgtctcggggtcccctgtgactcagaaccatgccgcctcagcactccctacaggttccccaaagaggggaacagcccctggagacctctcagccactgagcctgccacgtgtttcccgagcacccagaaacccacagagccttccgtgcccgtccagcccctgctcccagagtccctggcccggagcctgctgccgagcacagaataccagaagcagctcctggcagcacaggtgcaacttcagtgcagccccgctgagctccaggccgagctgctgcatagccaggcccggctggcagagctggaggcccaggtgcggaagctggagctagaacgggcccagcatgagctgctgctggggagtctgcagcagcagcaccaggcagacctggagctcatcgagagtgcacacagaagccgcatcaaggtgctagaaacatcgtaccagcaacgggaggagcggctccggagagagaacgaagagctgtcagctcggtatctgtcgcagtgccaggaggccgaacaggcccgtgctgagcttacggcccagcaccagcggcgcttggcggccatagcgcaggagaaggaccaggaaatggagcggctccgggagctgcagcgggcgtccatcctagacatgcgcagagaccacgaggagcagctgcagcggctaaagctgctgaaggaccgagaggtcgatgcggccaccagtgccacctcccacacgcggtccctgaatagcatcatccaccagatggagaagttctccagcagcctgcacgagttgtcctcccgcgtggaggcctcgcacctcaccacctcccaggagcgggagctggggatccggcagcgtgacgagcagctgcgggcactgcaggagcggctgggccagcagcagcgggacatggaggaggagcggagccggcaacaggaggtcatcgggaagatggaggcacggctgaatgagcagagccggctgctggagcaggaacgctggcgggtgactgccgagcagtccaaggcggagtccatgcagcgcgccctagaggagcaaaggaaggtcacggcccagcagatggccatggaaagggcggagctggaacgggccaagagcgccttgctggaggagcagaagtctgtcatgctcaagtgcggggaggagcggcggcgcctggctgccgagtgggcggagttctccgcgcagcaaaagctgagtaaggagcgggccgagcgcgaggccgagcgggcattgcaggtggacacccagcgggagggcaccctcatcagcctggccaaggagcaggctgagctgaagatcagggccagcgagctccgggccgaggagaagcagctggcagcggagagagcagccctggagcaggagcggcaggagctgcggctggagaaggagaggatcaacgccaccgccctgcgtgtcaagctccgcgccgaggaggtggagagcatgagcaaggtggcctccgagaagtacgaggagggggagcgggcattgcgcgaggcccagcaggtgcaggcagagcagcaggcccggttgcaggcggtgcagcaacagcaggagcggctgcggaagcaggagcagcacatgcaccaggcaaggctccctgagtgtatggcgcccctgcccccggcacccccagcctcccacctcacagctgagtccttctttctgggggaacggggacaggagcatctgagtctggcccagcagaggctgcaactggaccgcgcacgacaggacctgccctctagcctcgtgggtctgttccccagggcccagggccctgcagcctccagccagagtggtgagtggctccagaaggaagggccggcggctcaggactgggcaggggcagtgctaggagtgggcaggccctcctccagccgctccagttaaggcggccagctgggttttatagtcgccttatttcttttttacacaaataatgtgtgttaattttagataaatcagaaatagaggaacactattatgaaaaatgtcacctttttgtaactctggactcagga

SEQ ID NO: 433259 - DNA, 3732 bp, Homo sapiens
gcggcagcggctggaagcgggagccagtcctggccgggctgggcgacccgaatggagccagggccggcctggtcccagcggccgcacctccgggggcacggcgcgtaacaggaggcttccggggctgagagcgttacaggctgcgctccggggccagataggccgggcgctcagaaggggagtatgagcctgatgtgggcagaatccagatgagctggccagtgctgtgaaggagctgagagcacccccgagagccgtgagatggcaccaaaaaccaagaaaggatgtaaagtgacactacctgagaagcctgttaaactagcttcacataccagagacaccacaggtgtatctcagatgttcccttcttcaaaggcgagaacaaagtccctcctgggtgatgatgtcttcagcaccatggcaggcctggaagaagctgatgctgaggtttcagttatctcagaggcagacccacaggctctgctccaggccatgaaggacctggacggcatggatgctgatatcttaggtctgaagaaatctaattcagcccctagcaaaaaagctgcaaaggaccctgggaaaggagagctgcccaaccaccccaagcctgcagggggtgccattcccaccaagaagtcacttccgtctcccagcagctctgggcatcagaacaggaggttttcctctgaagacttggaagacccattgggaggacttctctcctatgatgaaggaggaatcaccaagcagccgcctgtgacacagagtaaaacagcttctgacaagagccccagcacagtgagagatcaaggtccctctattcctctaactcctggggacacccccatccgaaaaaaagaagaattgttgtttgatgatggggatgacatcatggccaccttggggtttggagacagccccaaagcagagaagaggcagataggagaccaggaagggcctcgccctgctcgctccacgctggatgagctgctgggtcgaggcatggccaccaaactcctggcccgcccgggcaccggggagcacagggagttcaagctagacaagaagtaccagaggccacaggacagtgaagatatgtggggtgacgaggacttcacctttggagcctatcagcccactgtggtctcctctgagggccggcagtcccgccggcagtctgtcagtaggttcttcgcagacagtggcgcagaccccaagggagaaccaggctccaaacagagccctccaatggcttccagccccatccagcccaggaagggaggagctgactggttgggcctcaaggacgaggacttggacctgttccctgcctcacccaccagagaggcccatcgggaaagttcagtgcctgtcacgccctcagtgcctcctcctgcgagccagcactccacgccagctgggctgcccccctccagggcaaagccaccaactgaaggtgcagggtcccctgccaaagccagccaggcttccaagctgcgagcctccaaggaggagaaagaggactggctgagccatgccctgtctcggaagaagtcccaaggcctggccagagagcagcatgctgggacctctgagggcctgcatttggcggggacagcgggccatcccccttctggcagcctgacctgggccttctgtcaccttcaccttgaacgctgcctttcctcagccaacctctcaccagcacacaagggcttgagcacgcagctgctggagggagttctggaacaactgcacgaggaaagaccgtgtgtcaggcctggtgtctcggggtcccctgtgactcagaaccatgccgcctcagcactccctacaggttccccaaagaggggaacagcccctggagacctctcagccactgagcctgccacgtgtttcccgagcacccagaaacccacagagccttccgtgcccgtccagcccctgctcccagagtccctggcccggagcctgctgccgagcacagaataccagaagcagctcctggcagcacaggtgcaacttcagtgcagccccgctgagctccaggccgagctgctgcatagccaggcccggctggcagagctggaggcccaggtgcggaagctggagctagaacgggcccagcatgagctgctgctggggagtctgcagcagcagcaccaggcagacctggagctcatcgagagtgcacacagaagccgcatcaaggtgctagaaacatcgtaccagcaacgggaggagcggctccggagagagaacgaagagctgtcagctcggtatctgtcgcagtgccaggaggccgaacaggcccgtgctgagcttacggcccagcaccagcggcgcttggcggccatagcgcaggagaaggaccaggaaatggagcggctccgggagctgcagcgggcgtccatcctagacatgcgcagagaccacgaggagcagctgcagcggctaaagctgctgaaggaccgagaggtcgatgcggccaccagtgccacctcccacacgcggtccctgaatagcatcatccaccagatggagaagttctccagcagcctgcacgagttgtcctcccgcgtggaggcctcgcacctcaccacctcccaggagcgggagctggggatccggcagcgtgacgagcagctgcgggcactgcaggagcggctgggccagcagcagcgggacatggaggaggagcggagccggcaacaggaggtcatcgggaagatggaggcacggctgaatgagcagagccggctgctggagcaggaacgctggcgggtgactgccgagcagtccaaggcggagtccatgcagcgcgccctagaggagcaaaggaaggtcacggcccagcagatggccatggaaagggcggagctggaacgggccaagagcgccttgctggaggagcagaagtctgtcatgctcaagtgcggggaggagcggcggcgcctggctgccgagtgggcggagttctccgcgcagcaaaagctgagtaaggagcgggccgagcgcgaggccgagcgggcattgcaggtggacacccagcgggagggcaccctcatcagcctggccaaggtagggcccagagcctccggacagtggagggcccagggttgcctgcgcccctccatctggacacatccgcttccagtcttaggaaaggagagtgtagcactaatgtcacaagagcatagggattaaaacagtaatcgcatcatcatgctaacatcttcctcgtattgtcccaggtgcattatacacattttatttgatcctcatgttcccatgactttggtcatttagaaatgaggaaaccgaacttcagagttgagcctgccacagtcacgtggcttgtgagggcagcactccggcttggccccaggcttctctggctctccctggaagcccctggctccaccacctcctcccaggggcagggtgggcagaggggaccctagagtcctgcacagagtgcagcgcaattcctgggaggagaatgcagcagggcctccgctgtctccaggagcaggctgagctgaagatcagggccagcgagctccgggccgaggagaagcagctggcagcggagagagcagccctggagcaggagcggcaggagctgcggctggagaaggagaggatcaacgccaccgccctgcgtgtcaagctccgcgccgaggaggtggagagcatgagcaaggtgctgctcgggcacatgggcgt

SEQ ID NO: 433260 - DNA, 648 bp, Homo sapiens
tagcgatccccggtttataccaccatcctcaatcacccaggcctaacgcaatcctcccacctgtagctgggactacagctcacagcacacctggctaaaattttttttttgttgagacggattctctatgtgcccaggctggtctcaggctcctgggctcagatggtcctcctgcctcagcttccaaaggcacaggccaagtgttggcagctgagtatggagccaggagcctgccatgaggttttgagaacagagtgctgttttagagctggcagcagcatctcagcccaagagaaggttatattcccagaggatgtcagtcccaaggaccagtagctgccatcagtttggattctgaaaactaactggcatcaacactgggtgtagaaacatgcttgccttatgtatcagaggacatgctcagcagatccaagagatatatttggcaactttttctagaaaaggcacattgggtatcattcattacattcttgagtttttttgggtttttttttttttttggagacagtcttgctgtattgcccaggctggagtgtggtggcaccctacaataagggagggtctggcggtgtcaaaaaacaagaacacaccataggacaaacagaacgcacaatcgacgacactcca

SEQ ID NO: 433261 - DNA, 917 bp, Homo sapiens
  misc_feature (19)..(19): n is a, c, g, or t
atccttaattaaattaatncttcccccccgcttttcattcccgttgttatggagggccacatctgccagagcctggagtctgcgaaggccgggacccggttccccggcccacagtgggggtgtgcaaacccgagagaactgggttgcaaattcgtgaagaatcagcatcatgtttggcagctgagtattggagccaggagcctgccatgaggttttgagaacagagtgctgttttagagctggcagcagcatctcagcccaagagaaggttatattcccagaggatgtcagtcccaaggaccagtagctgccatcagtttggattctgaaaactaactggcatcaacactgggtgtagaaacatgcttgccttatgtatcagaggacatgctcagcagatccaagagatatatttggcaactttttctagaaaaggcacattgggtatcattcattacattcttgagtttttttgggtttttttttttttttggagacagtcttgctgtattgcccaggctggagtgtggtggcacaatcacagctcattgcatcctcaatcacccaggcctaagcaatcctcccaccttgtagctgggactacagctcacagcacacctggctaaaattttttttttgttgagacggattctctatgttgcccaggctggtctcaggctcctgggctcagatggtcctcctgcctcagcttccaaaggcacaggccaagttgtagctttgtcccttgccatcatgcccaacaagaggttctataccttttaatgaattgactttcataaattggttatgttggtgggcaagttctttaagctggaaattgtaaattcctcctgaaatgttttttcatgcagttaccatgaactaatactacaataaaggatggtcttgggtgtcaa

SEQ ID NO: 433262 - DNA, 1010 bp, Homo sapiens
acccagttctgcttcttgaaagcttcacttcctcatctaggaagtgagtctcaggaagtcacagagatgggggtcgtgcgggcagaacccacggcatgaagatccaaaagggcctggttcagctttttcattcccgttgttatggagggccacatctgccagagcctggagtctgcgaaggccgggacccggttccccggcccacagtgggggtgtgcaaacccgagagaactgggttgcaaattcgtgaagaatcagcatcatgtttggcagctgagtattggagccaggagcctgccatgaggttttgagaacagagtgctgttttagagctggcagcagcatctcagcccaagagaaggttatattcccagaggatgtcagtcccaaggaccagtagctgccatcagtttggattctgaaaactaactggcatcaacactgggtgtagaaacatgcttgccttatgtatcagaggacatgctcagcagatccaagagatatatttggcaactttttctagaaaaggcacattgggtatcattcattacattcttgagtttttttgggtttttttttttttttggagacagtcttgctgtattgcccaggctggagtgtggtggcacaatcacagctcattgcatcctcaatcacccaggcctaagcaatcctcccaccttgtagctgggactacagctcacagcacacctggctaaaattttttttttgttgagacggattctctatgttgcccaggctggtctcaggctcctgggctcagatggtcctcctgcctcagcttccaaaggcacaggccaagttgtagctttgtcccttgccatcatgcccaacaagaggttctataccttttaatgaattgactttcataaattggttatgttggtgggcaagttctttaagctggaaattgtaaattcctcctgaaatgttttttcatgcagttaccatgaactaatactacaataaaggatggtcttgggtgtcaa

SEQ ID NO: 433263 - DNA, 1220 bp, Homo sapiens
tccccctccttttgtgaggattgggatattccgactccttaagggcctggcgcacataaggtgtgaccttttcattcccgttgttatggaggtaggctctctaggaatctgggagtagtagctggggggcaagagcaaataaagagctcgagcttctgtggtctctggggagatgttcccgggaagcctgtctagagggcggagggcagctgttgagatggcgtggctccccggctcctgcgcccgcgtggctttcgcggcgggcgctgcggcccggtattggacagcctggcagggcagcgcggggccgaatccggctgccgtggctgaggctcatggatcactcttttgtggtagggccacatctgccagagcctggagtctgcgaaggccgggacccggttccccggcccacagtgggggtgtgcaaacccgagagaactgggttgcaaattcgtgaagaatcagcatcatgtttggcagctgagtattggagccaggagcctgccatgaggttttgagaacagagtgctgttttagagctggcagcagcatctcagcccaagagaaggttatattcccagaggatgtcagtcccaaggaccagtagctgccatcagtttggattctgaaaactaactggcatcaacactgggtgtagaaacatgcttgccttatgtatcagaggacatgctcagcagatccaagagatatatttggcaactttttctagaaaaggcacattgggtatcattcattacattcttgagtttttttgggtttttttttttttttggagacagtcttgctgtattgcccaggctggagtgtggtggcacaatcacagctcattgcatcctcaatcacccaggcctaagcaatcctcccaccttgtagctgggactacagctcacagcacacctggctaaaattttttttttgttgagacggattctctatgttgcccaggctggtctcaggctcctgggctcagatggtcctcctgcctcagcttccaaaggcacaggccaagttgtagctttgtcccttgccatcatgcccaacaagaggttctataccttttaatgaattgactttcataaattggttatgttggtgggcaagttctttaagctggaaattgtaaattcctcctgaaatgttttttcatgcagttaccatgaactaatactacaataaaggatggtcttgggtgtcaa

SEQ ID NO: 433264 - DNA, 977 bp, Homo sapiens
  misc_feature (19)..(19): n is a, c, g, or t
atccttaattaaattaatncttcccccccgcttttcattcccgttgttatggagggccacatctgccagagcctggagtctgcgaaggccgggacccggttccccggcccacagtgggggtgtgcaaacccgagagaactgggttgcaaattcgtgaagaatcagcatcatgtttggcagctgagtattggagccaggagcctgccatgaggttttgagaacagagtgctgttttagagctggcagcagcatctcagcccaagagaaggttatattcccagaggatgtcagtcccaaggaccagtagctgccatcagtttggattctgaaaactaactggcatcaacactgggtgtagaaacatgcttgccttatgtatcagaggacatgctcagcagatccaagagatatatttggcaactttttctagaaaaggcacattgggtatcattcattacattcttgagtttttttgggtttttttttttttttggagacagtcttgctgtattgcccaggctggagtgtggtggcacaatcacagctcattgcatcctcaatcacccaggcctaagcaatcctcccaccttgtagctgggactacagctcacagcacacctggctaaaattttttttttgttgagacggattctctatgttgcccaggctggtctcaggctcctgggctcagatggtcctcctgcctcagcttccaaaggcacaggccaagttgtagctttgtcccttgccatcatgcccaacaagaggttctataccttttaatgaattgactttcataaattggttatgttggtgggcaagttctttaagctggaaattgtaaattcctcctgaaatgttttttcatgcagttaccatgaactaatactacaataaaggatggtcttgggtgtcaaacaacatcaaaacactcaataacatcaaccagataaaagagggggcgcaccaaaaaattc

SEQ ID NO: 433265 - DNA, 2453 bp, Homo sapiens
  misc_feature (19)..(19): n is a, c, g, or t
atccttaattaaattaatncttcccccccgcttttcattcccgttgttatggagggccacatctgccagagcctggagtctgcgaaggccgggacccggttccccggcccacagtgggggtgtgcaaacccgagagaactgggttgcaaattcgtgaagaatcagcatcatgtttggcagctgagtattggagccaggagcctgccatgaggttttgagaacagagtgctgttttagagctggcagcagcatctcagcccaagagaaggttatattcccagaggatgtcagtcccaaggaccagtagctgccatcagtttggattctgaaaactaactggcatcaacactgggtgtagaaacatgcttgccttatgtatcagaggacatgctcagcagatccaagagatatatttggcaactttttctagaaaaggcacattgggtatcattcattacattcttgagtttttttgggtttttttttttttttggagacagtcttgctgtattgcccaggctggagtgtggtggcacaatcacagctcattgcatcctcaatcacccaggcctaagcaatcctcccaccttgtagctgggactacagctcacagcacacctggctaaaattttttttttgttgagacggattctctatgttgcccaggctggtctcaggctcctgggctcagatggtcctcctgcctcagcttccaaaggcacaggccaagttgtagctttgtcccttgccatcatgcccaacaagaggttctataccttttaatgaattgactttcataaattggttatgttggtgggcaagttctttaagctggaaattgtaaattcctcctgaaatgttttttcatgcagttaccatgaactaatactacaataaaggatggtcttgggtgtcaagtcaattcttgaaaatgtgtatttgaagaaaaagtaaatttcgcctactgttgtcagatattagcagtccagatattcgctctagcttgtaaacttccctgtggtcagcctaagctcttaaccccctattctacagctttagactgaaggcaaaagctcaaagcatttaaggcctcctcaatttcggcccctgctgctctgtgctctgttccttggtgtagctttgttccagctcctgcagcattgcaccattcctaaccacaaccttaacagcatgtagggccccatactctaggccccatcttgctgtcttcctgtgttggaatcttgcctaccaaggcctgtcaagagggtcctcccccatactgtttgcccacaaggttcaagagtgattggctcccagtcttcctggactgaactacttggatctaggggttgcctgttatttagaagagatcccttaactggtagggccctttcagtaggacagtatttgggtaaggggagggtataagatgagaacctttgctaagttaggttcctttgggagcctccagtttgtttctccctctccccagccatcttgttggatctgccaagggattggactccttcattgtcctaggtttttaaggttttaaagcccaccttctgcagtcggttttctggaatgtgttggtggattacttaagagttatggggaaagagttcttacggcctgtctaggtcagtgaagtcatactggcaagtgacaagaaggaagccaggtttgtcacttaccctgcatgctaaggacatcagagcccacatagaagtctggtagtttttcagccagcagtgggtagggaagcgtggataggggatttctgaacaggactttatgcctgtatgcatgggcaccatgtctgtcctgagcactaccacatggcatcgtaggctgctctgtcaaaggatatagcgatagctggtcctatgggcagatgcctagaatcaaggtgggcctcagaaatagggctgggtctccataaggaggtaggccacgttcagtccacccctagcatagatggaactggggtctcgggcaaccaggagttacaggaattttgctaaagattcccaccttccttgagtggggacacattcctctggttggagcttgttcccctaaatgaaaaatgtaatgcagtacatgtaggggccctactgtattctttttctgggggaaagctcttggtgttcacaatggctcaggcttacagtacctccagccatgtgcccatttccacaagtctttggggaaggccatgagctgagctgagagggttctctggggcctgggatgacttaagaaccaaatggcagataatgggatagggggcagatgcagaggaccaacgggaagttttaacacaaatccccttccccagatgatatggtttgcctttctgtaggtgggtggcccaggccaatttttggcaatatccttaacccacctgataggagaagcgccctcccctgcctgccttgcccattcta

SEQ ID NO: 433266 - DNA, 1350 bp, Homo sapiens
  misc_feature (19)..(19): n is a, c, g, or t
  misc_feature (1017)..(1017): n is a, c, g, or t
  misc_feature (1019)..(1019): n is a, c, g, or t
atccttaattaaattaatncttcccccccgcttttcattcccgttgttatggagggccacatctgccagagcctggagtctgcgaaggccgggacccggttccccggcccacagtgggggtgtgcaaacccgagagaactgggttgcaaattcgtgaagaatcagcatcatgtttggcagctgagtattggagccaggagcctgccatgaggttttgagaacagagtgctgttttagagctggcagcagcatctcagcccaagagaaggttatattcccagaggatgtcagtcccaaggaccagtagctgccatcagtttggattctgaaaactaactggcatcaacactgggtgtagaaacatgcttgccttatgtatcagaggacatgctcagcagatccaagagatatatttggcaactttttctagaaaaggcacattgggtatcattcattacattcttgagtttttttgggtttttttttttttttggagacagtcttgctgtattgcccaggctggagtgtggtggcacaatcacagctcattgcatcctcaatcacccaggcctaagcaatcctcccaccttgtagctgggactacagctcacagcacacctggctaaaattttttttttgttgagacggattctctatgttgcccaggctggtctcaggctcctgggctcagatggtcctcctgcctcagcttccaaaggcacaggccaagttgtagctttgtcccttgccatcatgcccaacaagaggttctataccttttaatgaattgactttcataaattggttatgttggtgggcaagttctttaagctggaaattgtaaattcctcctgaaatgttttttcatgcagttaccatgaactaatactacaataaaggatggtcttgggtgtcaagtcaattcttgaaaatgtgtatttgaagaaaaagtaaaaaaaataaaaaaacaaaaaaaaaataaataaaaaatacaaaaaaaaaaaaaaaaaaaaaaananaaaaaaaaaaagaaaaaaagataaaaactggactaactgaaaaaaaaaaacttgggggggggcccggtccccaaatctcccttaagggggtcccttttaaatttcatgtgcccagttttaaaaccttaggattgggaaaaccctgggtttacccaatttaattcccttggaagaaaatccccttttcacaagtggcgtaatacccaaaaaggccccaccattcccctttcaaaaattgccaccctaaaggccaatggcaatttgaacctaaattttggtaaaattccgtaaattttggaaaacgactttttttaaccataggccaaatggg

SEQ ID NO: 433267 - DNA, 1478 bp, Homo sapiens
  misc_feature (19)..(19): n is a, c, g, or t
atccttaattaaattaatncttcccccccgcttttcattcccgttgttatggagggccacatctgccagagcctggagtctgcgaaggccgggacccggttccccggcccacagtgggggtgtgcaaacccgagagaactgggttgcaaattcgtgaagaatcagcatcatgtttggcagctgagtattggagccaggagcctgccatgaggttttgagaacagagtgctgttttagagctggcagcagcatctcagcccaagagaaggttatattcccagaggatgtcagtcccaaggaccagtagctgccatcagtttggattctgaaaactaactggcatcaacactgggtgtagaaacatgcttgccttatgtatcagaggacatgctcagcagatccaagagatatatttggcaactttttctagaaaaggcacattgggtatcattcattacattcttgagtttttttgggtttttttttttttttggagacagtcttgctgtattgcccaggctggagtgtggtggcacaatcacagctcattgcatcctcaatcacccaggcctaagcaatcctcccaccttgtagctgggactacagctcacagcacacctggctaaaattttttttttgttgagacggattctctatgttgcccaggctggtctcaggctcctgggctcagatggtcctcctgcctcagcttccaaaggcacaggccaagttgtagctttgtcccttgccatcatgcccaacaagaggttctataccttttaatgaattgactttcataaattggttatgttggtgggcaagttctttaagctggaaattgtaaattcctcctgaaatgttttttcatgcagttaccatgaactaatactacaataaaggatggtcttgggtgtcaacaaaaaaaacaaacacaaacacaaaaaacaaaacaaaacaaaacaaaacaaacacacaaaacccaccgtcgagcgccgtctctgttgcttgcgggcggcgcacaaaaacgagggagtcagagaacggccaccacccgagtcacttacaagtacatcgtccagcacacaacagcacttgatgtcagtcacaccgcagggccaaccaccatgcggctgagccacacctcaactaatgagtcgtggcttgactgttatagctagattagtgcgctaaacaacacgcgccgccgaggtggtctaaccacacgtcgagcataatagatgaagccgcttcggccggccagcagacaccaccacgcccgcacgcacccacatgtctgctaccgccaccgacgacgatcaacagccactgctactagccgcctcacgcgtcacaacgcacacagagagcgctagactcacatgcgctacccgacgcatcccagctctcacgcacgcagcgtgacgaaggccgagcgcaacccagccacccccacacgacacgcgcacgcacgtcagaac

SEQ ID NO: 433268 - DNA, 1220 bp, Homo sapiens
  misc_feature (19)..(19): n is a, c, g, or t
atccttaattaaattaatncttcccccccgcttttcattcccgttgttatggagggccacatctgccagagcctggagtctgcgaaggccgggacccggttccccggcccacagtgggggtgtgcaaacccgagagaactgggttgcaaattcgtgaagaatcagcatcatgtttggcagctgagtattggagccaggagcctgccatgaggttttgagaacagagtgctgttttagagctggcagcagcatctcagcccaagagaaggttatattcccagaggatgtcagtcccaaggaccagtagctgccatcagtttggattctgaaaactaactggcatcaacactgggtgtagaaacatgcttgccttatgtatcagaggacatgctcagcagatccaagagatatatttggcaactttttctagaaaaggcacattgggtatcattcattacattcttgagtttttttgggtttttttttttttttggagacagtcttgctgtattgcccaggctggagtgtggtggcacaatcacagctcattgcatcctcaatcacccaggcctaagcaatcctcccaccttgtagctgggactacagctcacagcacacctggctaaaattttttttttgttgagacggattctctatgttgcccaggctggtctcaggctcctgggctcagatggtcctcctgcctcagcttccaaaggcacaggccaagttgtagctttgtcccttgccatcatgcccaacaagaggttctataccttttaatgaattgactttcataaattggttatgttggtgggcaagttctttaagctggaaattgtaaattcctcctgaaatgttttttcatgcagttaccatgaactaatactacaataaaggatggtcttgggtgtcaacaacaaaacacacctacccacagaagttactacacgaaaatcaacaaaaaaaacaggcgggggccccacaaaatacccgaggggaccagtagtctaccactttttggcaaagggctcagagggggtataaaaacggcaggccggcaaaaacgcggagggaacacacctggttccgggggacccttctgcggctatggaaccgcacagaaaagccgataaattagttttgaacctttcgcggtgtgttattaacatcagctgataagaaggaggtccgtgtatgtcgataagaaaacttactta

SEQ ID NO: 433269 - DNA, 940 bp, Homo sapiens
  misc_feature (19)..(19): n is a, c, g, or t
atccttaattaaattaatncttcccccccgcttttcattcccgttgttatggagggccacatctgccagagcctggagtctgcgaaggccgggacccggttccccggcccacagtgggggtgtgcaaacccgagagaactgggttgcaaattcgtgaagaatcagcatcatgtttggcagctgagtattggagccaggagcctgccatgaggttttgagaacagagtgctgttttagagctggcagcagcatctcagcccaagagaaggttatattcccagaggatgtcagtcccaaggaccagtagctgccatcagtttggattctgaaaactaactggcatcaacactgggtgtagaaacatgcttgccttatgtatcagaggacatgctcagcagatccaagagatatatttggcaactttttctagaaaaggcacattgggtatcattcattacattcttgagtttttttgggtttttttttttttttggagacagtcttgctgtattgcccaggctggagtgtggtggcacaatcacagctcattgcatcctcaatcacccaggcctaagcaatcctcccaccttgtagctgggactacagctcacagcacacctggctaaaattttttttttgttgagacggattctctatgttgcccaggctggtctcaggctcctgggctcagatggtcctcctgcctcagcttccaaaggcacaggccaagttgtagctttgtcccttgccatcatgcccaacaagaggttctataccttttaatgaattgactttcataaattggttatgttggtgggcaagttctttaagctggaaattgtaaattcctcctgaaatgttttttcatgcagttaccatgaactaatactacaataaaggatggtcttgggtgtcaattgggagcttgggtacccgaagc

SEQ ID NO: 433270 - DNA, 945 bp, Homo sapiens
  misc_feature (19)..(19): n is a, c, g, or t
  misc_feature (919)..(919): n is a, c, g, or t
atccttaattaaattaatncttcccccccgcttttcattcccgttgttatggagggccacatctgccagagcctggagtctgcgaaggccgggacccggttccccggcccacagtgggggtgtgcaaacccgagagaactgggttgcaaattcgtgaagaatcagcatcatgtttggcagctgagtattggagccaggagcctgccatgaggttttgagaacagagtgctgttttagagctggcagcagcatctcagcccaagagaaggttatattcccagaggatgtcagtcccaaggaccagtagctgccatcagtttggattctgaaaactaactggcatcaacactgggtgtagaaacatgcttgccttatgtatcagaggacatgctcagcagatccaagagatatatttggcaactttttctagaaaaggcacattgggtatcattcattacattcttgagtttttttgggtttttttttttttttggagacagtcttgctgtattgcccaggctggagtgtggtggcacaatcacagctcattgcatcctcaatcacccaggcctaagcaatcctcccaccttgtagctgggactacagctcacagcacacctggctaaaattttttttttgttgagacggattctctatgttgcccaggctggtctcaggctcctgggctcagatggtcctcctgcctcagcttccaaaggcacaggccaagttgtagctttgtcccttgccatcatgcccaacaagaggttctataccttttaatgaattgactttcataaattggttatgttggtgggcaagttctttaagctggaaattgtaaattcctcctgaaatgttttttcatgcagttaccatgaactaatactacaataaaggatggtcttgggtgtcaatnggagcttggtaacctctagagtcacc

SEQ ID NO: 433271 - DNA, 1274 bp, Homo sapiens
  misc_feature (19)..(19): n is a, c, g, or t
  misc_feature (941)..(941): n is a, c, g, or t
  misc_feature (943)..(943): n is a, c, g, or t
atccttaattaaattaatncttcccccccgcttttcattcccgttgttatggagggccacatctgccagagcctggagtctgcgaaggccgggacccggttccccggcccacagtgggggtgtgcaaacccgagagaactgggttgcaaattcgtgaagaatcagcatcatgtttggcagctgagtattggagccaggagcctgccatgaggttttgagaacagagtgctgttttagagctggcagcagcatctcagcccaagagaaggttatattcccagaggatgtcagtcccaaggaccagtagctgccatcagtttggattctgaaaactaactggcatcaacactgggtgtagaaacatgcttgccttatgtatcagaggacatgctcagcagatccaagagatatatttggcaactttttctagaaaaggcacattgggtatcattcattacattcttgagtttttttgggtttttttttttttttggagacagtcttgctgtattgcccaggctggagtgtggtggcacaatcacagctcattgcatcctcaatcacccaggcctaagcaatcctcccaccttgtagctgggactacagctcacagcacacctggctaaaattttttttttgttgagacggattctctatgttgcccaggctggtctcaggctcctgggctcagatggtcctcctgcctcagcttccaaaggcacaggccaagttgtagctttgtcccttgccatcatgcccaacaagaggttctataccttttaatgaattgactttcataaattggttatgttggtgggcaagttctttaagctggaaattgtaaattcctcctgaaatgttttttcatgcagttaccatgaactaatactacaataaaggatggtcttgggtgtcaaaaaaaaaaaaaaaaaaaaaaaaananaaaaaaaaaaagaaaaaaagataaaaactggactaactgaaaaaaaaaaacttgggggggggcccggtccccaaatctcccttaagggggtcccttttaaatttcatgtgcccagttttaaaaccttaggattgggaaaaccctgggtttacccaatttaattcccttggaagaaaatccccttttcacaagtggcgtaatacccaaaaaggccccaccattcccctttcaaaaattgccaccctaaaggccaatggcaatttgaacctaaattttggtaaaattccgtaaattttggaaaacgactttttttaaccataggccaaatggg

SEQ ID NO: 433272 - DNA, 972 bp, Homo sapiens
  misc_feature (19)..(19): n is a, c, g, or t
  misc_feature (892)..(892): n is a, c, g, or t
  misc_feature (894)..(894): n is a, c, g, or t
  misc_feature (896)..(896): n is a, c, g, or t
  misc_feature (914)..(914): n is a, c, g, or t
atccttaattaaattaatncttcccccccgcttttcattcccgttgttatggagggccacatctgccagagcctggagtctgcgaaggccgggacccggttccccggcccacagtgggggtgtgcaaacccgagagaactgggttgcaaattcgtgaagaatcagcatcatgtttggcagctgagtattggagccaggagcctgccatgaggttttgagaacagagtgctgttttagagctggcagcagcatctcagcccaagagaaggttatattcccagaggatgtcagtcccaaggaccagtagctgccatcagtttggattctgaaaactaactggcatcaacactgggtgtagaaacatgcttgccttatgtatcagaggacatgctcagcagatccaagagatatatttggcaactttttctagaaaaggcacattgggtatcattcattacattcttgagtttttttgggtttttttttttttttggagacagtcttgctgtattgcccaggctggagtgtggtggcacaatcacagctcattgcatcctcaatcacccaggcctaagcaatcctcccaccttgtagctgggactacagctcacagcacacctggctaaaattttttttttgttgagacggattctctatgttgcccaggctggtctcaggctcctgggctcagatggtcctcctgcctcagcttccaaaggcacaggccaagttgtagctttgtcccttgccatcatgcccaacaagaggttctataccttttaatgaattgactttcataaattggttatgttggtgggcaagttctttaagctggaaattgtaaattcctcctgacacagcgtacctgaactatttcacaaaggtgttcggntntngaaaacaaaacaaaaaanggggtataatctagggcgattgcactttaaggcatagtgttaacagcgacgcacggat

SEQ ID NO: 433273 - DNA, 860 bp, Homo sapiens
  misc_feature (19)..(19): n is a, c, g, or t
atccttaattaaattaatncttcccccccgcttttcattcccgttgttatggagggccacatctgccagagcctggagtctgcgaaggccgggacccggttccccggcccacagtgggggtgtgcaaacccgagagaactgggttgcaaattcgtgaagaatcagcatcatgtttggcagctgagtattggagccaggagcctgccatgaggttttgagaacagagtgctgttttagagctggcagcagcatctcagcccaagagaaggttatattcccagaggatgtcagtcccaaggaccagtagctgccatcagtttggattctgaaaactaactggcatcaacactgggtgtagaaacatgcttgccttatgtatcagaggacatgctcagcagatccaagagatatatttggcaactttttctagaaaaggcacattgggtatcattcattacattcttgagtttttttgggtttttttttttttttggagacagtcttgctgtattgcccaggctggagtgtggtggcacaatcacagctcattgcatcctcaatcacccaggcctaagcaatcctcccaccttgtagctgggactacagctcacagcacacctggctaaaattttttttttgttgagacggattctctatgttgcccaggctggtctcaggctcctgggctcagatggtcctcctgcctcagcttccaaaggcacaggccaagttgtagctttgtcccttgccatcatgcccaacaagaggttctataccttttaatgaattgactttcataaattggttatgttggtgggtcagaacataaggtttatcctctagattcagctctgaccatg

SEQ ID NO: 433274 - DNA, 1396 bp, Homo sapiens
tccccctccttttgtgaggattgggatattccgactccttaagggcctggcgcacataaggtgtgaccttttcattcccgttgttatggaggtaggctctctaggaatctgggagtagtagctggggggcaagagcaaataaagagctcgagcttctgtggtctctggggagatgttcccgggaagcctgtctagagggcggagggcagctgttgagatggcgtggctccccggctcctgcgcccgcgtggctttcgcggcgggcgctgcggcccggtattggacagcctggcagggcagcgcggggccgaatccggctgccgtggctgaggctcatggatcactcttttgtggtagggccacatctgccagagcctggagtctgcgaaggccgggacccggttccccggcccacagtgggggtgtgcaaacccgagagaactgggaagtgccgtcagaagcgataactgacgacgtctaatgtctatctgaccgcagtcgctgaaacctctacaacttagttgaccgtaactgccagagccctgccctgaattcctgtccttactccctctttaagattgcgtacccactgcagagtgctgaagacggggtagccacgaggttgcaaattcgtgaagaatcagcatcatgtttggcagctgagtattggagccaggagcctgccatgaggttttgagaacagagtgctgttttagagctggcagcagcatctcagcccaagagaaggttatattcccagaggatgtcagtcccaaggaccagtagctgccatcagtttggattctgaaaactaactggcatcaacactgggtgtagaaacatgcttgccttatgtatcagaggacatgctcagcagatccaagagatatatttggcaactttttctagaaaaggcacattgggtatcattcattacattcttgagtttttttgggtttttttttttttttggagacagtcttgctgtattgcccaggctggagtgtggtggcacaatcacagctcattgcatcctcaatcacccaggcctaagcaatcctcccaccttgtagctgggactacagctcacagcacacctggctaaaattttttttttgttgagacggattctctatgttgcccaggctggtctcaggctcctgggctcagatggtcctcctgcctcagcttccaaaggcacaggccaagttgtagctttgtcccttgccatcatgcccaacaagaggttctataccttttaatgaattgactttcataaattggttatgttggtgggcaagttctttaagctggaaattgtaaattcctcctgaaatgttttttcatgcagttaccatgaactaatactacaataaaggatggtcttgggtgtcaa

SEQ ID NO: 433275 - DNA, 1392 bp, Homo sapiens
ggttggatcaagtttaaatgactgtgctgcccctttcacatcaaagaactactgacaacgaaggccgcgcctgcctttcccatctgtctatctatctggctggcagggaaggaaagaacttgcatgttggtgaaggaagaagtggggtggaagaagtggggtgggacgacagtgaaatctagagtaaaatcaagctggcccaaggtgtcctgcaggctgtaatgcagtttaatcagagtgccattttttttttggttcaaatgattttaattatgggaatgcacaatttttttaatatgcaaataaaaagtttaaaaacttaaaaaaaacccacgcgtccgcgtgttatggagggccacatctgccagagcctggagtctgcgaaggccgggacccggttccccggcccacagtgggggtgtgcaaacccgagagaactgggaagtgccgtcagaagcgataactgacgacgtctaatgtctatctgaccgcagtcgctgaaacctctacaacttagttgaccgtaactgccagagccctgccctgaattcctgtccttactccctctttaagattgcgtacccactgcagagtgctgaagacggggtagccacgaggttgcaaattcgtgaagaatcagcatcatgtttggcagctgagtattggagccaggagcctgccatgaggttttgagaacagagtgctgttttagagctggcagcagcatctcagcccaagagaaggttatattcccagaggatgtcagtcccaaggaccagtagctgccatcagtttggattctgaaaactaactggcatcaacactgggtgtagaaacatgcttgccttatgtatcagaggacatgctcagcagatccaagagatatatttggcaactttttctagaaaaggcacattgggtatcattcattacattcttgagtttttttgggtttttttttttttttggagacagtcttgctgtattgcccaggctggagtgtggtggcacaatcacagctcattgcatcctcaatcacccaggcctaagcaatcctcccaccttgtagctgggactacagctcacagcacacctggctaaaattttttttttgttgagacggattctctatgttgcccaggctggtctcaggctcctgggctcagatggtcctcctgcctcagcttccaaaggcacaggccaagttgtagctttgtcccttgccatcatgcccaacaagaggttctataccttttaatgaattgactttcataaattggttatgttggtgggcaagttctttaagctggaaattgtaaattcctcctgaaatgttttttcatgcagttaccatgaactaatactacaataaaggatggtcttgggtgtcaa

SEQ ID NO: 433276 - DNA, 1339 bp, Homo sapiens
tccccctccttttgtgaggattgggatattccgactccttaagggcctggcgcacataaggtgtgaccttttcattcccgttgttatggaggtaggctctctaggaatctgggagtagtagctggggggcaagagcaaataaagagctcgagcttctgtggtctctggggagatgttcccgggaagcctgtctagagggcggagggcagctgttgagatggcgtggctccccggctcctgcgcccgcgtggctttcgcggcgggcgctgcggcccggtattggacagcctggcagggcagcgcggggccgaatccggctgccgtggctgaggctcatggatcactcttttgtggtagggccacatctgccagagcctggagtctgcgaaggccgggacccggttccccggcccacagtgggggtgtgcaaacccgagagaactggtgaaacctctacaacttagttgaccgtaactgccagagccctgccctgaattcctgtccttactccctctttaagattgcgtacccactgcagagtgctgaagacggggtagccacgaggttgcaaattcgtgaagaatcagcatcatgtttggcagctgagtattggagccaggagcctgccatgaggttttgagaacagagtgctgttttagagctggcagcagcatctcagcccaagagaaggttatattcccagaggatgtcagtcccaaggaccagtagctgccatcagtttggattctgaaaactaactggcatcaacactgggtgtagaaacatgcttgccttatgtatcagaggacatgctcagcagatccaagagatatatttggcaactttttctagaaaaggcacattgggtatcattcattacattcttgagtttttttgggtttttttttttttttggagacagtcttgctgtattgcccaggctggagtgtggtggcacaatcacagctcattgcatcctcaatcacccaggcctaagcaatcctcccaccttgtagctgggactacagctcacagcacacctggctaaaattttttttttgttgagacggattctctatgttgcccaggctggtctcaggctcctgggctcagatggtcctcctgcctcagcttccaaaggcacaggccaagttgtagctttgtcccttgccatcatgcccaacaagaggttctataccttttaatgaattgactttcataaattggttatgttggtgggcaagttctttaagctggaaattgtaaattcctcctgaaatgttttttcatgcagttaccatgaactaatactacaataaaggatggtcttgggtgtcaa

SEQ ID NO: 433277 - DNA, 1264 bp, Homo sapiens
tccccctccttttgtgaggattgggatattccgactccttaagggcctggcgcacataaggtgtgaccttttcattcccgttgttatggaggtaggctctctaggaatctgggagtagtagctggggggcaagagcaaataaagagctcgagcttctgtggtctctggggagatgttcccgggaagcctgtctagagggcggagggcagctgttgagatggcgtggctccccggctcctgcgcccgcgtggctttcgcggcgggcgctgcggcccggtattggacagcctggcagggcagcgcggggccgaatccggctgccgtggctgaggctcatggatcactcttttgtggtagggccacatctgccagagcctggagtctgcgaaggccgggacccggttccccggcccacagtgggggtgtgcaaacccgagagaactggattgcgtacccactgcagagtgctgaagacggggtagccacgaggttgcaaattcgtgaagaatcagcatcatgtttggcagctgagtattggagccaggagcctgccatgaggttttgagaacagagtgctgttttagagctggcagcagcatctcagcccaagagaaggttatattcccagaggatgtcagtcccaaggaccagtagctgccatcagtttggattctgaaaactaactggcatcaacactgggtgtagaaacatgcttgccttatgtatcagaggacatgctcagcagatccaagagatatatttggcaactttttctagaaaaggcacattgggtatcattcattacattcttgagtttttttgggtttttttttttttttggagacagtcttgctgtattgcccaggctggagtgtggtggcacaatcacagctcattgcatcctcaatcacccaggcctaagcaatcctcccaccttgtagctgggactacagctcacagcacacctggctaaaattttttttttgttgagacggattctctatgttgcccaggctggtctcaggctcctgggctcagatggtcctcctgcctcagcttccaaaggcacaggccaagttgtagctttgtcccttgccatcatgcccaacaagaggttctataccttttaatgaattgactttcataaattggttatgttggtgggcaagttctttaagctggaaattgtaaattcctcctgaaatgttttttcatgcagttaccatgaactaatactacaataaaggatggtcttgggtgtcaa

SEQ ID NO: 433278 - DNA, 1163 bp, Homo sapiens
tccccctccttttgtgaggattgggatattccgactccttaagggcctggcgcacataaggtgtgaccttttcattcccgttgttatggaggtaggctctctaggaatctgggagtagtagctggggggcaagagcaaataaagagctcgagcttctgtggtctctggggagatgttcccgggaagcctgtctagagggcggagggcagctgttgagatggcgtggctccccggctcctgcgcccgcgtggctttcgcggcgggcgctgcggcccggtattggacagcctggcagggcagcgcggggccgaatccggctgccgtggctgaggctcatggatcactcttttgtggtagggccacatctgccagagcctggagtctgcgaaggccgggacccggttccccggcccacagtgggggtgtgcaaacccgagagaactgggttgcaaattcgtgaagaatcagcatcatgtttggcagctgagtattggagccaggagcctgccatgaggttatattcccagaggatgtcagtcccaaggaccagtagctgccatcagtttggattctgaaaactaactggcatcaacactgggtgtagaaacatgcttgccttatgtatcagaggacatgctcagcagatccaagagatatatttggcaactttttctagaaaaggcacattgggtatcattcattacattcttgagtttttttgggtttttttttttttttggagacagtcttgctgtattgcccaggctggagtgtggtggcacaatcacagctcattgcatcctcaatcacccaggcctaagcaatcctcccaccttgtagctgggactacagctcacagcacacctggctaaaattttttttttgttgagacggattctctatgttgcccaggctggtctcaggctcctgggctcagatggtcctcctgcctcagcttccaaaggcacaggccaagttgtagctttgtcccttgccatcatgcccaacaagaggttctataccttttaatgaattgactttcataaattggttatgttggtgggcaagttctttaagctggaaattgtaaattcctcctgaaatgttttttcatgcagttaccatgaactaatactacaataaaggatggtcttgggtgtcaa

SEQ ID NO: 433279 - DNA, 1509 bp, Homo sapiens
tccccctccttttgtgaggattgggatattccgactccttaagggcctggcgcacataaggtgtgaccttttcattcccgttgttatggaggtaggctctctaggaatctgggagtagtagctggggggcaagagcaaataaagagctcgagcttctgtggtctctggggagatgttcccgggaagcctgtctagagggcggagggcagctgttgagatggcgtggctccccggctcctgcgcccgcgtggctttcgcggcgggcgctgcggcccggtattggacagcctggcagggcagcgcggggccgaatccggctgccgtggctgaggctcatggatcactcttttgtggtagggccacatctgccagagcctggagtctgcgaaggccgggacccggttccccggcccacagtgggggtgtgcaaacccgagagaactgggtaagttggggtcggcttgcagtttggggtaccccgagggcggtgtacgtcggtaagattgtaacagtattactggaagacttattcgactgtcctgatgatacttgtaataggaagtgccgtcagaagcgataactgacgacgtctaatgtctatctgaccgcagtcgctgaaacctctacaacttagttgaccgtaactgccagagccctgccctgaattcctgtccttactccctctttaagattgcgtacccactgcagagtgctgaagacggggtagccacgaggttgcaaattcgtgaagaatcagcatcatgtttggcagctgagtattggagccaggagcctgccatgaggttttgagaacagagtgctgttttagagctggcagcagcatctcagcccaagagaaggttatattcccagaggatgtcagtcccaaggaccagtagctgccatcagtttggattctgaaaactaactggcatcaacactgggtgtagaaacatgcttgccttatgtatcagaggacatgctcagcagatccaagagatatatttggcaactttttctagaaaaggcacattgggtatcattcattacattcttgagtttttttgggtttttttttttttttggagacagtcttgctgtattgcccaggctggagtgtggtggcacaatcacagctcattgcatcctcaatcacccaggcctaagcaatcctcccaccttgtagctgggactacagctcacagcacacctggctaaaattttttttttgttgagacggattctctatgttgcccaggctggtctcaggctcctgggctcagatggtcctcctgcctcagcttccaaaggcacaggccaagttgtagctttgtcccttgccatcatgcccaacaagaggttctataccttttaatgaattgactttcataaattggttatgttggtgggcaagttctttaagctggaaattgtaaattcctcctgaaatgttttttcatgcagttaccatgaactaatactacaataaaggatggtcttgggtgtcaa

SEQ ID NO: 433280 - DNA, 1990 bp, Homo sapiens
tccccctccttttgtgaggattgggatattccgactccttaagggcctggcgcacataaggtgtgaccttttcattcccgttgttatggaggtaggctctctaggaatctgggagtagtagctggggggcaagagcaaataaagagctcgagcttctgtggtctctggggagatgttcccgggaagcctgtctagagggcggagggcagctgttgagatggcgtggctccccggctcctgcgcccgcgtggctttcgcggcgggcgctgcggcccggtattggacagcctggcagggcagcgcggggccgaatccggctgccgtggctgaggctcatggatcactcttttgtggtagggccacatctgccagagcctggagtctgcgaaggccgggacccggttccccggcccacagtgggggtgtgcaaacccgagagaactgggtaagttggggtcggcttgcagtttggggtaccccgagggcggtgtacgtcggtaagattgtaacagtattactggaagacttattcgactgtcctgatgatacttgtaataggaagtgccgtcagaagcgataactgacgacgtctaatgtctatctgaccgcagtcgctgaaacctctacaacttagttgaccgtaactgccagagccctgccctgaattcctgtccttactccctctttaagattgcgtacccactgcagagtgctgaagacggggtagccacgaggtgagaggctctctggtgtagggtttaacatggaacgtagttttgtcacttgaatgcacggaaattggcgttttgacagttttctacgtttaggtgttttatacactttagggtaacgttatcatgtcattgcatagggtggaacttaaatagaaactggagatggctgcttcagccacagtcctaacctagaactgcatttaaagcaaactgataatgcagaaacaaactccttcgttaagaaatgtctccagtagcagggttagcttaagtttcaggtagggtctagatctgcggttggaacagtactggagggttgtgaggtgcttgactgctctgatgaaatcactaataggaagtgccgtcagaagcgataactgacgaagactactcctgtctgattgcagtcaagtcttcaccacttgctggttcccaggagtaaacttgtttgaacggtgacctaattgctatattcacctaggttgcaaattcgtgaagaatcagcatcatgtttggcagctgagtattggagccaggagcctgccatgaggttttgagaacagagtgctgttttagagctggcagcagcatctcagcccaagagaaggttatattcccagaggatgtcagtcccaaggaccagtagctgccatcagtttggattctgaaaactaactggcatcaacactgggtgtagaaacatgcttgccttatgtatcagaggacatgctcagcagatccaagagatatatttggcaactttttctagaaaaggcacattgggtatcattcattacattcttgagtttttttgggtttttttttttttttggagacagtcttgctgtattgcccaggctggagtgtggtggcacaatcacagctcattgcatcctcaatcacccaggcctaagcaatcctcccaccttgtagctgggactacagctcacagcacacctggctaaaattttttttttgttgagacggattctctatgttgcccaggctggtctcaggctcctgggctcagatggtcctcctgcctcagcttccaaaggcacaggccaagttgtagctttgtcccttgccatcatgcccaacaagaggttctataccttttaatgaattgactttcataaattggttatgttggtgggcaagttctttaagctggaaattgtaaattcctcctgaaatgttttttcatgcagttaccatgaactaatactacaataaaggatggtcttgggtgtcaa

SEQ ID NO: 433281 - DNA, 1724 bp, Homo sapiens
tccccctccttttgtgaggattgggatattccgactccttaagggcctggcgcacataaggtgtgaccttttcattcccgttgttatggagggccacatctgccagagcctggagtctgcgaaggccgggacccggttccccggcccacagtgggggtgtgcaaacccgagagaactgggtaagttggggtcggcttgcagtttggggtaccccgagggcggtgtacgtcggtaagattgtaacagtattactggaagacttattcgactgtcctgatgatacttgtaataggaagtgccgtcagaagcgataactgacgacgtctaatgtctatctgaccgcagtcgctgaaacctctacaacttagttgaccgtaactgccagagccctgccctgaattcctgtccttactccctctttaagattgcgtacccactgcagagtgctgaagacggggtagccacgaggtgagaggctctctggtgtagggtttaacatggaacgtagttttgtcacttgaatgcacggaaattggcgttttgacagttttctacgtttaggtgttttatacactttagggtaacgttatcatgtcattgcatagggtggaacttaaatagaaactggagatggctgcttcagccacagtcctaacctagaactgcatttaaagcaaactgataatgcagaaacaaactccttcgttaagaaatgtctccagtagcagggttagcttaagtttcaggtagggtctagatctgcggttggaacagtactggagggttgtgaggtgcttgactgctctgatgaaatcactaataggaagtgccgtcagaagcgataactgacgaagactactcctgtctgattgcagtcaagtcttcaccacttgctggttcccaggagtaaacttgtttgaacggtgacctaattgctatattcacctaggttgcaaattcgtgaagaatcagcatcatgtttggcagctgagtattggagccaggagcctgccatgaggttttgagaacagagtgctgttttagagctggcagcagcatctcagcccaagagaaggttatattcccagaggatgtcagtcccaaggaccagtagctgccatcagtttggattctgaaaactaactggcatcaacactgggtgtagaaacatgcttgccttatgtatcagaggacatgctcagcagatccaagagatatatttggcaactttttctagaaaaggcacattgggtatcattcattacattcttgagtttttttgggtttttttttttttttggagacagtcttgctgtattgcccaggctggagtgtggtggcacaatcacagctcattgcatcctcaatcacccaggcctaagcaatcctcccaccttgtagctgggactacagctcacagcacacctggctaaaattttttttttgttgagacggattctctatgttgcccaggctggtctcaggctcctgggctcagatggtcctcctgcctcagcttccaaaggcacaggccaagttgtagctttgtcccttgccatcatgcccaacaagaggttctataccttttaatgaattgactttcataaattggttatgttggtgggcaagttctttaagctggaaattgtaaattcctcctgaaatgttttttcatgcagttaccatgaactaatactacaataaaggatggtcttgggtgtcaa

SEQ ID NO: 433282 - DNA, 1339 bp, Homo sapiens
tccccctccttttgtgaggattgggatattccgactccttaagggcctggcgcacataaggtgtgaccttttcattcccgttgttatggaggtaggctctctaggaatctgggagtagtagctggggggcaagagcaaataaagagctcgagcttctgtggtctctggggagatgttcccgggaagcctgtctagagggcggagggcagctgttgagatggcgtggctccccggctcctgcgcccgcgtggctttcgcggcgggcgctgcggcccggtattggacagcctggcagggcagcgcggggccgaatccggctgccgtggctgaggctcatggatcactcttttgtggtagggccacatctgccagagcctggagtctgcgaaggccgggacccggttccccggcccacagtgggggtgtgcaaacccgagagaactgggaagtgccgtcagaagcgataactgacgacgtctaatgtctatctgaccgcagtcgctgaaacctctacaacttagttgaccgtaactgccagagccctgccctgaattcctgtccttactccctctttaagattgcgtacccactgcagagtgctgaagacggggtagccacgaggttgcaaattcgtgaagaatcagcatcatgtttggcagctgagtattggagccaggagcctgccatgaggttatattcccagaggatgtcagtcccaaggaccagtagctgccatcagtttggattctgaaaactaactggcatcaacactgggtgtagaaacatgcttgccttatgtatcagaggacatgctcagcagatccaagagatatatttggcaactttttctagaaaaggcacattgggtatcattcattacattcttgagtttttttgggtttttttttttttttggagacagtcttgctgtattgcccaggctggagtgtggtggcacaatcacagctcattgcatcctcaatcacccaggcctaagcaatcctcccaccttgtagctgggactacagctcacagcacacctggctaaaattttttttttgttgagacggattctctatgttgcccaggctggtctcaggctcctgggctcagatggtcctcctgcctcagcttccaaaggcacaggccaagttgtagctttgtcccttgccatcatgcccaacaagaggttctataccttttaatgaattgactttcataaattggttatgttggtgggcaagttctttaagctggaaattgtaaattcctcctgaaatgttttttcatgcagttaccatgaactaatactacaataaaggatggtcttgggtgtcaa

SEQ ID NO: 433283 - DNA, 2227 bp, Homo sapiens
tccccctccttttgtgaggattgggatattccgactccttaagggcctggcgcacataaggtgtgaccttttcattcccgttgttatggaggtaggctctctaggaatctgggagtagtagctggggggcaagagcaaataaagagctcgagcttctgtggtctctggggagatgttcccgggaagcctgtctagagggcggagggcagctgttgagatggcgtggctccccggctcctgcgcccgcgtggctttcgcggcgggcgctgcggcccggtattggacagcctggcagggcagcgcggggccgaatccggctgccgtggctgaggctcatggatcactcttttgtggtagggccacatctgccagagcctggagtctgcgaaggccgggacccggttccccggcccacagtgggggtgtgcaaacccgagagaactgggtaagttggggtcggcttgcagtttggggtaccccgagggcggtgtacgtcggtaagattgtaacagtattactggaagacttattcgactgtcctgatgatacttgtaataggaagtgccgtcagaagcgataactgacgacgtctaatgtctatctgaccgcagtcgctgaaacctctacaacttagttgaccgtaactgccagagccctgccctgaattcctgtccttactccctctttaagattgcgtacccactgcagagtgctgaagacggggtagccacgaggtgagaggctctctggtgtagggtttaacatggaacgtagttttgtcacttgaatgcacggaaattggcgttttgacagttttctacgtttaggtgttttatacactttagggtaacgttatcatgtcattgcatagggtggaacttaaatagaaactggagatggctgcttcagccacagtcctaacctagaactgcatttaaagcaaactgataatgcagaaacaaactccttcgttaagaaatgtctccagtagcagggttagcttaagtttcaggtagggtctagatctgcggttggaacagtactggagggttgtgaggtgcttgactgctctgatgaaatcactaataggaagtgccgtcagaagcgataactgacgaagactactcctgtctgattgcagtcaagtcttcaccacttgctggttcccaggagtaaacttgtttgaacggtgacctaattgctatattcacctaggttgcaaattcgtgaagaatcagcatcatgtttggcagctgagtattggagccaggagcctgccatgaggttttgagaacagagtgctgttttagagctggcagcagcatctcagcccaagagaaggtaagccttgagctggccaatgatcccttcaaccccatagtggaatgaataaacagctgatcttgttaaaactcgcttcaaaaaaaaaagatatcaaatgatgaaatcacccaaaatagctggaattaccggcagattgtgtagtggtgaacctatggttttctgaagatatctcttaccctgtgattgactgtcagttggtgcagaaagtgagattgaaatgtagtttctttgcaggttatattcccagaggatgtcagtcccaaggaccagtagctgccatcagtttggattctgaaaactaactggcatcaacactgggtgtagaaacatgcttgccttatgtatcagaggacatgctcagcagatccaagagatatatttggcaactttttctagaaaaggcacattgggtatcattcattacattcttgagtttttttgggtttttttttttttttggagacagtcttgctgtattgcccaggctggagtgtggtggcacaatcacagctcattgcatcctcaatcacccaggcctaagcaatcctcccaccttgtagctgggactacagctcacagcacacctggctaaaattttttttttgttgagacggattctctatgttgcccaggctggtctcaggctcctgggctcagatggtcctcctgcctcagcttccaaaggcacaggccaagttgtagctttgtcccttgccatcatgcccaacaagaggttctataccttttaatgaattgactttcataaattggttatgttggtgggcaagttctttaagctggaaattgtaaattcctcctgaaatgttttttcatgcagttaccatgaactaatactacaataaaggatggtcttgggtgtcaa

SEQ ID NO: 433284 - DNA, 974 bp, Homo sapiens
tgtctccaaccggcaggtcgtactccaccggcaggttgtactccaccggcaggttgtactccaccggcaggttgtactactgaaacctctacaacttagttgaccgtaactgccagagccctgccctgaattcctgtccttactccctctttaagattgcgtacccactgcagagtgctgaagacggggtagccacgaggttgcaaattcgtgaagaatcagcatcatgtttggcagctgagtattggagccaggagcctgccatgaggttttgagaacagagtgctgttttagagctggcagcagcatctcagcccaagagaaggttatattcccagaggatgtcagtcccaaggaccagtagctgccatcagtttggattctgaaaactaactggcatcaacactgggtgtagaaacatgcttgccttatgtatcagaggacatgctcagcagatccaagagatatatttggcaactttttctagaaaaggcacattgggtatcattcattacattcttgagtttttttgggtttttttttttttttggagacagtcttgctgtattgcccaggctggagtgtggtggcacaatcacagctcattgcatcctcaatcacccaggcctaagcaatcctcccaccttgtagctgggactacagctcacagcacacctggctaaaattttttttttgttgagacggattctctatgttgcccaggctggtctcaggctcctgggctcagatggtcctcctgcctcagcttccaaaggcacaggccaagttgtagctttgtcccttgccatcatgcccaacaagaggttctataccttttaatgaattgactttcataaattggttatgttggtgggcaagttctttaagctggaaattgtaaattcctcctgaaatgttttttcatgcagttaccatgaactaatactacaataaaggatggtcttgggtgtcaa

SEQ ID NO: 433285 - DNA, 1470 bp, Homo sapiens
tccccctccttttgtgaggattgggatattccgactccttaagggcctggcgcacataaggtgtgaccttttcattcccgttgttatggaggtaggctctctaggaatctgggagtagtagctggggggcaagagcaaataaagagctcgagcttctgtggtctctggggagatgttcccgggaagcctgtctagagggcggagggcagctgttgagatggcgtggctccccggctcctgcgcccgcgtggctttcgcggcgggcgctgcggcccggtattggacagcctggcagggcagcgcggggccgaatccggctgccgtggctgaggctcatggatcactcttttgtggtagggccacatctgccagagcctggagtctgcgaaggccgggacccggttccccggcccacagtgggggtgtgcaaacccgagagaactgggaagtgccgtcagaagcgataactgacgacgtctaatgtctatctgaccgcagtcgctgaaacctctacaacttagttgaccgtaactgccagagccctgccctgaattcctgtccttactccctctttaagattgcgtacccactgcagagtgctgaagacggggtagccacgagtcaagtcttcaccacttgctggttcccaggagtaaacttgtttgaacggtgacctaattgctatattcacctaggttgcaaattcgtgaagaatcagcatcatgtttggcagctgagtattggagccaggagcctgccatgaggttttgagaacagagtgctgttttagagctggcagcagcatctcagcccaagagaaggttatattcccagaggatgtcagtcccaaggaccagtagctgccatcagtttggattctgaaaactaactggcatcaacactgggtgtagaaacatgcttgccttatgtatcagaggacatgctcagcagatccaagagatatatttggcaactttttctagaaaaggcacattgggtatcattcattacattcttgagtttttttgggtttttttttttttttggagacagtcttgctgtattgcccaggctggagtgtggtggcacaatcacagctcattgcatcctcaatcacccaggcctaagcaatcctcccaccttgtagctgggactacagctcacagcacacctggctaaaattttttttttgttgagacggattctctatgttgcccaggctggtctcaggctcctgggctcagatggtcctcctgcctcagcttccaaaggcacaggccaagttgtagctttgtcccttgccatcatgcccaacaagaggttctataccttttaatgaattgactttcataaattggttatgttggtgggcaagttctttaagctggaaattgtaaattcctcctgaaatgttttttcatgcagttaccatgaactaatactacaataaaggatggtcttgggtgtcaa

SEQ ID NO: 433286 - DNA, 946 bp, Homo sapiens
tagcgatccccggtttataccaccatcctcaatcacccaggcctaacgcaatcctcccacctgtagctgggactacagctcacagcacacctggctaaaattttttttttgttgagacggattctctatgtgcccaggctggtctcaggctcctgggctcagatggtcctcctgcctcagcttccaaaggcacaggccaagtgttggcagctgagtatggagccaggagcctgccatgaggttttgagaacagagtgctgttttagagctggcagcagcatctcagcccaagagaaggttatattcccagaggatgtcagtcccaaggaccagtagctgccatcagtttggattctgaaaactaactggcatcaacactgggtgtagaaacatgcttgccttatgtatcagaggacatgctcagcagatccaagagatatatttggcaactttttctagaaaaggcacattgggtatcattcattacattcttgagtttttttgggtttttttttttttttggagacagtcttgctgtattgcccaggctggagtgtggtggcacaatcacagctcattgcatcctcaatcacccaggcctaagcaatcctcccaccttgtagctgggactacagctcacagcacacctggctaaaattttttttttgttgagacggattctctatgttgcccaggctggtctcaggctcctgggctcagatggtcctcctgcctcagcttccaaaggcacaggccaagttgtagctttgtcccttgccatcatgcccaacaagaggttctataccttttaatgaattgactttcataaattggttatgttggtgggcaagttctttaagctggaaattgtaaattcctcctgaaatgttttttcatgcagttaccatgaactaatactacaataaaggatggtcttgggtgtcaa

SEQ ID NO: 433287 - DNA, 1207 bp, Homo sapiens
tccccctccttttgtgaggattgggatattccgactccttaagggcctggcgcacataaggtgtgaccttttcattcccgttgttatggaggtaggctctctaggaatctgggagtagtagctggggggcaagagcaaataaagagctcgagcttctgtggtctctggggagatgttcccgggaagcctgtctagagggcggagggcagctgttgagatggcgtggctccccggctcctgcgcccgcgtggctttcgcggcgggcgctgcggcccggtattggacagcctggcagggcagcgcggggccgaatccggctgccgtggctgaggctcatggatcactcttttgtggtagggccacatctgccagagcctggagtctgcgaaggccgggacccggttccccggcccacagtgggggtgtgcaaacccgagagaactggattgcgtacccactgcagagtgctgaagacggggtagccacgaggttgcaaattcgtgaagaatcagcatcatgtttggcagctgagtattggagccaggagcctgccatgaggttatattcccagaggatgtcagtcccaaggaccagtagctgccatcagtttggattctgaaaactaactggcatcaacactgggtgtagaaacatgcttgccttatgtatcagaggacatgctcagcagatccaagagatatatttggcaactttttctagaaaaggcacattgggtatcattcattacattcttgagtttttttgggtttttttttttttttggagacagtcttgctgtattgcccaggctggagtgtggtggcacaatcacagctcattgcatcctcaatcacccaggcctaagcaatcctcccaccttgtagctgggactacagctcacagcacacctggctaaaattttttttttgttgagacggattctctatgttgcccaggctggtctcaggctcctgggctcagatggtcctcctgcctcagcttccaaaggcacaggccaagttgtagctttgtcccttgccatcatgcccaacaagaggttctataccttttaatgaattgactttcataaattggttatgttggtgggcaagttctttaagctggaaattgtaaattcctcctgaaatgttttttcatgcagttaccatgaactaatactacaataaaggatggtcttgggtgtcaa

SEQ ID NO: 433288 - DNA, 1633 bp, Homo sapiens
tccccctccttttgtgaggattgggatattccgactccttaagggcctggcgcacataaggtgtgaccttttcattcccgttgttatggaggtaggctctctaggaatctgggagtagtagctggggggcaagagcaaataaagagctcgagcttctgtggtctctggggagatgttcccgggaagcctgtctagagggcggagggcagctgttgagatggcgtggctccccggctcctgcgcccgcgtggctttcgcggcgggcgctgcggcccggtattggacagcctggcagggcagcgcggggccgaatccggctgccgtggctgaggctcatggatcactcttttgtggtagggccacatctgccagagcctggagtctgcgaaggccgggacccggttccccggcccacagtgggggtgtgcaaacccgagagaactgggaagtgccgtcagaagcgataactgacgacgtctaatgtctatctgaccgcagtcgctgaaacctctacaacttagttgaccgtaactgccagagccctgccctgaattcctgtccttactccctctttaagattgcgtacccactgcagagtgctgaagacggggtagccacgaggttgcaaattcgtgaagaatcagcatcatgtttggcagctgagtattggagccaggagcctgccatgaggttttgagaacagagtgctgttttagagctggcagcagcatctcagcccaagagaaggtaagccttgagctggccaatgatcccttcaaccccatagtggaatgaataaacagctgatcttgttaaaactcgcttcaaaaaaaaaagatatcaaatgatgaaatcacccaaaatagctggaattaccggcagattgtgtagtggtgaacctatggttttctgaagatatctcttaccctgtgattgactgtcagttggtgcagaaagtgagattgaaatgtagtttctttgcaggttatattcccagaggatgtcagtcccaaggaccagtagctgccatcagtttggattctgaaaactaactggcatcaacactgggtgtagaaacatgcttgccttatgtatcagaggacatgctcagcagatccaagagatatatttggcaactttttctagaaaaggcacattgggtatcattcattacattcttgagtttttttgggtttttttttttttttggagacagtcttgctgtattgcccaggctggagtgtggtggcacaatcacagctcattgcatcctcaatcacccaggcctaagcaatcctcccaccttgtagctgggactacagctcacagcacacctggctaaaattttttttttgttgagacggattctctatgttgcccaggctggtctcaggctcctgggctcagatggtcctcctgcctcagcttccaaaggcacaggccaagttgtagctttgtcccttgccatcatgcccaacaagaggttctataccttttaatgaattgactttcataaattggttatgttggtgggcaagttctttaagctggaaattgtaaattcctcctgaaatgttttttcatgcagttaccatgaactaatactacaataaaggatggtcttgggtgtcaa

SEQ ID NO: 433289 - DNA, 2304 bp, Homo sapiens
  misc_feature (19)..(19): n is a, c, g, or t
atccttaattaaattaatncttcccccccgcttttcattcccgttgttatggagggccacatctgccagagcctggagtctgcgaaggccgggacccggttccccggcccacagtgggggtgtgcaaacccgagagaactgggttgcaaattcgtgaagaatcagcatcatgtttggcagctgagtattggagccaggagcctgccatgaggttttgagaacagagtgctgttttagagctggcagcagcatctcagcccaagagaaggttatattcccagaggatgtcagtcccaaggaccagtagctgccatcagtttggattctgaaaactaactggcatcaacactgggtgtagaaacatgcttgccttatgtatcagaggacatgctcagcagatccaagagatatatttggcaactttttctagaaaaggcacattgggtatcattcattacattcttgagtttttttgggtttttttttttttttggagacagtcttgctgtattgcccaggctggagtgtggtggcacaatcacagctcattgcatcctcaatcacccaggcctaagcaatcctcccaccttgtagctgggactacagctcacagcacacctggctaaaattttttttttgttgagacggattctctatgttgcccaggctggtctcaggctcctgggctcagatggtcctcctgcctaatgttttttcatgcagttaccatgaactaatactacaataaaggatggtcttgggtgtcaagtcaattcttgaaaatgtgtatttgaagaaaaagtaaatttcgcctactgttgtcagatattagcagtccagatattcgctctagcttgtaaacttccctgtggtcagcctaagctcttaaccccctattctacagctttagactgaaggcaaaagctcaaagcatttaaggcctcctcaatttcggcccctgctgctctgtgctctgttccttggtgtagctttgttccagctcctgcagcattgcaccattcctaaccacaaccttaacagcatgtagggccccatactctaggccccatcttgctgtcttcctgtgttggaatcttgcctaccaaggcctgtcaagagggtcctcccccatactgtttgcccacaaggttcaagagtgattggctcccagtcttcctggactgaactacttggatctaggggttgcctgttatttagaagagatcccttaactggtagggccctttcagtaggacagtatttgggtaaggggagggtataagatgagaacctttgctaagttaggttcctttgggagcctccagtttgtttctccctctccccagccatcttgttggatctgccaagggattggactccttcattgtcctaggtttttaaggttttaaagcccaccttctgcagtcggttttctggaatgtgttggtggattacttaagagttatggggaaagagttcttacggcctgtctaggtcagtgaagtcatactggcaagtgacaagaaggaagccaggtttgtcacttaccctgcatgctaaggacatcagagcccacatagaagtctggtagtttttcagccagcagtgggtagggaagcgtggataggggatttctgaacaggactttatgcctgtatgcatgggcaccatgtctgtcctgagcactaccacatggcatcgtaggctgctctgtcaaaggatatagcgatagctggtcctatgggcagatgcctagaatcaaggtgggcctcagaaatagggctgggtctccataaggaggtaggccacgttcagtccacccctagcatagatggaactggggtctcgggcaaccaggagttacaggaattttgctaaagattcccaccttccttgagtggggacacattcctctggttggagcttgttcccctaaatgaaaaatgtaatgcagtacatgtaggggccctactgtattctttttctgggggaaagctcttggtgttcacaatggctcaggcttacagtacctccagccatgtgcccatttccacaagtctttggggaaggccatgagctgagctgagagggttctctggggcctgggatgacttaagaaccaaatggcagataatgggatagggggcagatgcagaggaccaacgggaagttttaacacaaatccccttccccagatgatatggtttgcctttctgtaggtgggtggcccaggccaatttttggcaatatccttaacccacctgataggagaagcgccctcccctgcctgccttgcccattcta

SEQ ID NO: 433290 - DNA, 1282 bp, Homo sapiens
tccccctccttttgtgaggattgggatattccgactccttaagggcctggcgcacataaggtgtgaccttttcattcccgttgttatggaggtaggctctctaggaatctgggagtagtagctggggggcaagagcaaataaagagctcgagcttctgtggtctctggggagatgttcccgggaagcctgtctagagggcggagggcagctgttgagatggcgtggctccccggctcctgcgcccgcgtggctttcgcggcgggcgctgcggcccggtattggacagcctggcagggcagcgcggggccgaatccggctgccgtggctgaggctcatggatcactcttttgtggtagggccacatctgccagagcctggagtctgcgaaggccgggacccggttccccggcccacagtgggggtgtgcaaacccgagagaactggtgaaacctctacaacttagttgaccgtaactgccagagccctgccctgaattcctgtccttactccctctttaagattgcgtacccactgcagagtgctgaagacggggtagccacgaggttgcaaattcgtgaagaatcagcatcatgtttggcagctgagtattggagccaggagcctgccatgaggttatattcccagaggatgtcagtcccaaggaccagtagctgccatcagtttggattctgaaaactaactggcatcaacactgggtgtagaaacatgcttgccttatgtatcagaggacatgctcagcagatccaagagatatatttggcaactttttctagaaaaggcacattgggtatcattcattacattcttgagtttttttgggtttttttttttttttggagacagtcttgctgtattgcccaggctggagtgtggtggcacaatcacagctcattgcatcctcaatcacccaggcctaagcaatcctcccaccttgtagctgggactacagctcacagcacacctggctaaaattttttttttgttgagacggattctctatgttgcccaggctggtctcaggctcctgggctcagatggtcctcctgcctcagcttccaaaggcacaggccaagttgtagctttgtcccttgccatcatgcccaacaagaggttctataccttttaatgaattgactttcataaattggttatgttggtgggcaagttctttaagctggaaattgtaaattcctcctgaaatgttttttcatgcagttaccatgaactaatactacaataaaggatggtcttgggtgtcaa

SEQ ID NO: 433291 - DNA, 1457 bp, Homo sapiens
tccccctccttttgtgaggattgggatattccgactccttaagggcctggcgcacataaggtgtgaccttttcattcccgttgttatggaggtaggctctctaggaatctgggagtagtagctggggggcaagagcaaataaagagctcgagcttctgtggtctctggggagatgttcccgggaagcctgtctagagggcggagggcagctgttgagatggcgtggctccccggctcctgcgcccgcgtggctttcgcggcgggcgctgcggcccggtattggacagcctggcagggcagcgcggggccgaatccggctgccgtggctgaggctcatggatcactcttttgtggtagggccacatctgccagagcctggagtctgcgaaggccgggacccggttccccggcccacagtgggggtgtgcaaacccgagagaactgggttgcaaattcgtgaagaatcagcatcatgtttggcagctgagtattggagccaggagcctgccatgaggttttgagaacagagtgctgttttagagctggcagcagcatctcagcccaagagaaggtaagccttgagctggccaatgatcccttcaaccccatagtggaatgaataaacagctgatcttgttaaaactcgcttcaaaaaaaaaagatatcaaatgatgaaatcacccaaaatagctggaattaccggcagattgtgtagtggtgaacctatggttttctgaagatatctcttaccctgtgattgactgtcagttggtgcagaaagtgagattgaaatgtagtttctttgcaggttatattcccagaggatgtcagtcccaaggaccagtagctgccatcagtttggattctgaaaactaactggcatcaacactgggtgtagaaacatgcttgccttatgtatcagaggacatgctcagcagatccaagagatatatttggcaactttttctagaaaaggcacattgggtatcattcattacattcttgagtttttttgggtttttttttttttttggagacagtcttgctgtattgcccaggctggagtgtggtggcacaatcacagctcattgcatcctcaatcacccaggcctaagcaatcctcccaccttgtagctgggactacagctcacagcacacctggctaaaattttttttttgttgagacggattctctatgttgcccaggctggtctcaggctcctgggctcagatggtcctcctgcctcagcttccaaaggcacaggccaagttgtagctttgtcccttgccatcatgcccaacaagaggttctataccttttaatgaattgactttcataaattggttatgttggtgggcaagttctttaagctggaaattgtaaattcctcctgaaatgttttttcatgcagttaccatgaactaatactacaataaaggatggtcttgggtgtcaa

SEQ ID NO: 433292 - DNA, 1456 bp, Homo sapiens
tccccctccttttgtgaggattgggatattccgactccttaagggcctggcgcacataaggtgtgaccttttcattcccgttgttatggaggtaggctctctaggaatctgggagtagtagctggggggcaagagcaaataaagagctcgagcttctgtggtctctggggagatgttcccgggaagcctgtctagagggcggagggcagctgttgagatggcgtggctccccggctcctgcgcccgcgtggctttcgcggcgggcgctgcggcccggtattggacagcctggcagggcagcgcggggccgaatccggctgccgtggctgaggctcatggatcactcttttgtggtagggccacatctgccagagcctggagtctgcgaaggccgggacccggttccccggcccacagtgggggtgtgcaaacccgagagaactgggaagtgccgtcagaagcgataactgacgacgtctaatgtctatctgaccgcagtcgctgaaacctctacaacttagttgaccgtaactgccagagccctgccctgaattcctgtccttactccctctttaagattgcgtacccactgcagagtgctgaagacggggtagccacgaggttgcaaattcgtgaagaatcagcatcatgtttggcagctgagtattggagccaggagcctgccatgaggttttgagaacagagtgctgttttagagctggcagcagcatctcagcccaagagaaggttatattcccagaggatgtcagtcccaaggaccagtagctgccatcagtttggattctgaaaactaactggcatcaacactgggtgtagaaacatgcttgccttatgtatcagaggacatgctcagcagatccaagagatatatttggcaactttttctagaaaaggcacattgggtatcattcattacattcttgagtttttttgggtttttttttttttttggagacagtcttgctgtattgcccaggctggagtgtggtggcacaatcacagctcattgcatcctcaatcacccaggcctaagcaatcctcccaccttgtagctgggactacagctcacagcacacctggctaaaattttttttttgttgagacggattctctatgttgcccaggctggtctcaggctcctgggctcagatggtcctcctgcctcagcttccaaaggcacaggccaagttgtagctttgtcccttgccatcatgcccaacaagaggttctataccttttaatgaattgactttcataaattggttatgttggtgggcaagttctttaagctggaaattgtaaattcctcctgaaatgttttttcatgcagttaccatgaactaatactacaataaaggatggtcttgggtgtcaaacaacatcaaaacactcaataacatcaaccagataaaagagggggcgcaccaaaaaattc

SEQ ID NO: 433293 - DNA, 701 bp, Homo sapiens
acctggccctagatgccaaactgatggcagcagcatctcaggcctagagaaggttatattcccagaggatgtcagtcccaaggaccagtagctgccatcagtttggattctgaaaactaactggcatcaacactgggtgtagaaacatgcttgccttatgtatcagaggacatgctcagcagatccaagagatatatttggcaactttttctagaaaaggcacattgggtatcattcattacattcttgagtttttttgggtttttttttttttttggagacagtcttgctgtattgcccaggctggagtgtggtggcacaatcacagctcattgcatcctcaatcacccaggcctaagcaatcctcccaccttgtagctgggactacagctcacagcacacctggctaaaattttttttttgttgagacggattctctatgttgcccaggctggtctcaggctcctgggctcagatggtcctcctgcctcagcttccaaaggcacaggccaagttgtagctttgtcccttgccatcatgcccaacaagaggttctataccttttaatgaattgactttcataaattggttatgttggtgggcaagttctttaagctggaaattgtaaattcctcctgaaatgttttttcatgcagttaccatgaactaatactacaataaaggatggtcttgggtgtcaa

SEQ ID NO: 433294 - DNA, 1163 bp, Homo sapiens
tccccctccttttgtgaggattgggatattccgactccttaagggcctggcgcacataaggtgtgaccttttcattcccgttgttatggaggtaggctctctaggaatctgggagtagtagctggggggcaagagcaaataaagagctcgagcttctgtggtctctggggagatgttcccgggaagcctgtctagagggcggagggcagctgttgagatggcgtggctccccggctcctgcgcccgcgtggctttcgcggcgggcgctgcggcccggtattggacagcctggcagggcagcgcggggccgaatccggctgccgtggctgaggctcatggatcactcttttgtggtagggccacatctgccagagcctggagtctgcgaaggccgggacccggttccccggcccacagtgggggtgtgcaaacccgagagaactgggttgcaaattcgtgaagaatcagcatcatgtttggcagctgagtattggagccaggagcctgccatgaggttttgagaacagagtgctgttttagagctggcagcagcatctcagcccaagagaaggttatattcccagaggatgtcagtcccaaggaccaacatgcttgccttatgtatcagaggacatgctcagcagatccaagagatatatttggcaactttttctagaaaaggcacattgggtatcattcattacattcttgagtttttttgggtttttttttttttttggagacagtcttgctgtattgcccaggctggagtgtggtggcacaatcacagctcattgcatcctcaatcacccaggcctaagcaatcctcccaccttgtagctgggactacagctcacagcacacctggctaaaattttttttttgttgagacggattctctatgttgcccaggctggtctcaggctcctgggctcagatggtcctcctgcctcagcttccaaaggcacaggccaagttgtagctttgtcccttgccatcatgcccaacaagaggttctataccttttaatgaattgactttcataaattggttatgttggtgggcaagttctttaagctggaaattgtaaattcctcctgaaatgttttttcatgcagttaccatgaactaatactacaataaaggatggtcttgggtgtcaa

SEQ ID NO: 433295 - DNA, 935 bp, Homo sapiens
  misc_feature (19)..(19): n is a, c, g, or t
atccttaattaaattaatncttcccccccgcttttcattcccgttgttatggagggccacatctgccagagcctggagtctgcgaaggccgggacccggttccccggcccacagtgggggtgtgcaaacccgagagaactgggttgcaaattcgtgaagaatcagcatcatgtttggcagctgagtattggagccaggagcctgccatgaggttttgagaacagagtgctgttttagagctggcagcagcatctcagcccaagagaaggttatattcccagaggatgtcagtcccaaggaccagtagctgccatcagtttggattctgaaaactaactggcatcaacactgggtgtagaaacatgcttgccttatgtatcagaggacatgctcagcagatccaagagatatatttggcaactttttctagaaaaggcacattgggtatcattcattacattcttgagtttttttgggtttttttttttttttggagacagtcttgctgtattgcccaggctggagtgtggtggcacaatcacagctcattgcatcctcaatcacccaggcctaagcaatcctcccaccttgtagctgggactacagctcacagcacacctggctaaaattttttttttgttgagacggattctctatgttgcccaggctggtctcaggctcctgggctcagatggtcctcctgcctgtacgcccaaacatcggatccgcactgactcgagtcgacatcgccccgtatgcccacacatcggatccgcactgactcgagtcgacatcgattttttttttttttttttaacgtattcacaagtcttgtgactgtcatctggccatgggttgggcctatcattttcaggaacaaagccatgggactagaatctgagtcacagtaagtcagcatctcatgcaaagtgact

SEQ ID NO: 433296 - DNA, 1466 bp, Homo sapiens
tccccctccttttgtgaggattgggatattccgactccttaagggcctggcgcacataaggtgtgaccttttcattcccgttgttatggaggtaggctctctaggaatctgggagtagtagctggggggcaagagcaaataaagagctcgagcttctgtggtctctggggagatgttcccgggaagcctgtctagagggcggagggcagctgttgagatggcgtggctccccggctcctgcgcccgcgtggctttcgcggcgggcgctgcggcccggtattggacagcctggcagggcagcgcggggccgaatccggctgccgtggctgaggctcatggatcactcttttgtggtagggccacatctgccagagcctggagtctgcgaaggccgggacccggttccccggcccacagtgggggtgtgcaaacccgagagaactgggttgcaaattcgtgaagaatcagcatcatgtttggcagctgagtattggagccaggagcctgccatgaggttatattcccagaggatgtcagtcccaaggaccagtagctgccatcagtttggattctgaaaactaactggcatcaacactgggtgtagaaacatgcttgccttatgtatcagaggacatgctcagcagatccaagagatatatttggcaactttttctagaaaaggcacattgggtatcattcattacattcttgagtttttttgggtttttttttttttttggagacagtcttgctgtattgcccaggctggagtgtggtggcacaatcacagctcattgcatcctcaatcacccaggcctaagcaatcctcccaccttgtagctgggactacagctcacagcacacctggctaaaattttttttttgttgagacggattctctatgttgcccaggctggtctcaggctcctgggctcagatggtcctcctgcctcagcttccaaaggcacaggccaagttgtagctttgtcccttgccatcatgcccaacaagaggttctataccttttaatgaattgactttcataaattggttatgttggtgggcaagttctttaagctggaaattgtaaattcctcctgaaatgttttttcatgcagttaccatgaactaatactacaataaaggatggtcttgggtgtcaacaacaaaacacacctacccacagaagttactacacgaaaatcaacaaaaaaaacaggcgggggccccacaaaatacccgaggggaccagtagtctaccactttttggcaaagggctcagagggggtataaaaacggcaggccggcaaaaacgcggagggaacacacctggttccgggggacccttctgcggctatggaaccgcacagaaaagccgataaattagttttgaacctttcgcggtgtgttattaacatcagctgataagaaggaggtccgtgtatgtcgataagaaaacttactta

SEQ ID NO: 433297 - DNA, 657 bp, Homo sapiens
  misc_feature (19)..(19): n is a, c, g, or t
  misc_feature (499)..(499): n is a, c, g, or t
  misc_feature (513)..(513): n is a, c, g, or t
  misc_feature (594)..(594): n is a, c, g, or t
  misc_feature (642)..(642): n is a, c, g, or t
atccttaattaaattaatncttcccccccgcttttcattcccgttgttatggagggccacatctgccagagcctggagtctgcgaaggccgggacccggttccccggcccacagtgggggtgtgcaaacccgagagaactgggttgcaaattcgtgaagaatcagcatcatgtttggcagctgagtattggagccaggagcctgccatgaggttttgagaacagagtgctgttttagagctggcagcagcatctcagcccaagagaaggttatattcccagaggatgtcagtcccaaggaccagtagctgccatcagtttggattctgaaaactaactggcatcaacactgggtgtagaaacatgcttgccttatgtatcagaggacatgctcagcagatccaagagatatatttggcaactttttctagaaaaggcacattgggtatcattcattacattcttgagtttttttgggtttttttttttttttgttcaanaattgacacccaanaccatcctttattgtagtattagttcatggtaactgcatgaaaaaacatttcaggaggaatttacaatttccagcttaaanaacttgcccaccaacataaccaatttatgaaagtccattcattaaaangtataaaaacctctt

SEQ ID NO: 433298 - DNA, 539 bp, Homo sapiens
  misc_feature (19)..(19): n is a, c, g, or t
atccttaattaaattaatncttcccccccgcttttcattcccgttgttatggagggccacatctgccagagcctggagtctgcgaaggccgggacccggttccccggcccacagtgggggtgtgcaaacccgagagaactgggttgcaaattcgtgaagaatcagcatcatgtttggcagctgagtattggagccaggagcctgccatgaggttttgagaacagagtgctgttttagagctggcagcagcatctcagcccaagagaaggttatattcccagaggatgtcagtcccaaggaccagtagctgccatcagtttggattctgaaaactaactggcatcaacactgggtgtagaaacatgcttgccttatgtatcagaggacatgctcagcagatccaagagatatatttggcaactttttctagaaaaggcacattgggtatcattcattacattcttgagtttttttgggtttttttttttttttgttttttttttttttttttttttttttttattatatttttttatttt

SEQ ID NO: 433299 - DNA, 769 bp, Homo sapiens
  misc_feature (19)..(19): n is a, c, g, or t
atccttaattaaattaatncttcccccccgcttttcattcccgttgttatggagggccacatctgccagagcctggagtctgcgaaggccgggacccggttccccggcccacagtgggggtgtgcaaacccgagagaactgggttgcaaattcgtgaagaatcagcatcatgtttggcagctgagtattggagccaggagcctgccatgaggttttgagaacagagtgctgttttagagctggcagcagcatctcagcccaagagaaggttatattcccagaggatgtcagtcccaaggaccagtagctgccatcagtttggattctgaaaactaactggcatcaacactgggtgtagaaacatgcttgccttatgtatcagaggacatgctcagcagatccaagagatatatttggcaactttttctagaaaaggcacattgggtatcattcattacattcttgagtttttttgggtttttttttttttttggggagatgggagtctcgctttttgggcccgggccaagatcgtggcaggggggctttctcgggctcatgtggcaagctccggttcccggggtgtcccaccgcaatttctcggtgcctcagcggtgttctaaacatttttaaatataagatttacacctctggctcgtagaaattggcccggggtattataactcgtgctataatgccccataaggtggaatttcatccctttcatgagaaggcaaagaagttggaggtggcatagaggcccatttga

SEQ ID NO: 433300 - DNA, 556 bp, Homo sapiens
  misc_feature (19)..(19): n is a, c, g, or t
atccttaattaaattaatncttcccccccgcttttcattcccgttgttatggagggccacatctgccagagcctggagtctgcgaaggccgggacccggttccccggcccacagtgggggtgtgcaaacccgagagaactgggttgcaaattcgtgaagaatcagcatcatgtttggcagctgagtattggagccaggagcctgccatgaggttttgagaacagagtgctgttttagagctggcagcagcatctcagcccaagagaaggttatattcccagaggatgtcagtcccaaggaccagtagctgccatcagtttggattctgaaaactaactggcatcaacactgggtgtagaaacatgcttgccttatgtatcagaggacatgctcagcagatccaagagatatatttggcaactttttctagaaaaggcacattgggtatcattcattacattcttgagtttttttgggtttttttttttttttgttttttggaaggtatatatacggcgtgtgtggtgtggaggtgttttataaagtgccaatttaa

SEQ ID NO: 433301 - DNA, 1134 bp, Homo sapiens
tccccctccttttgtgaggattgggatattccgactccttaagggcctggcgcacataaggtgtgaccttttcattcccgttgttatggaggtaggctctctaggaatctgggagtagtagctggggggcaagagcaaataaagagctcgagcttctgtggtctctggggagatgttcccgggaagcctgtctagagggcggagggcagctgttgagatggcgtggctccccggctcctgcgcccgcgtggctttcgcggcgggcgctgcggcccggtattggacagcctggcagggcagcgcggggccgaatccggctgccgtggctgaggctcatggatcactcttttgtggtagggccacatctgccagagcctggagtctgcgaaggccgggacccggttccccggcccacagtgggggtgtgcaaacccgagagaactggtgaaacctctacaacttagttgaccgtaactgccagagccctgccctgaattcctgtccttactccctctttaagattgcgtacccactgcagagtgctgaagacggggtagccacgaggttgcaaattcgtgaagaatcagcatcatgtttggcagctgagtattggagccaggagcctgccatgaggttttgagaacagagtgctgttttagagctggcagcagcatctcagcccaagagaaggttatattcccagaggatgtcagtcccaaggaccagtagctgccatcagtttggattctgaaaactaactggcatcaacactgggtgtagaaacatgcttgccttatgtatcagaggacatgctcagcagatccaagagatatatttggcaactttttctagaaaaggcacattgggtatcattcattacattcttgagtttttttgggtttttttttttttttggagacagtcttgctgtattgcccaggctggagtgtggtggcacggtcatgggtctcaaataccaggctaggaacctcccccgttgttggggataagtccaggaacccggttattaggggacgagaattatttccccgggtacaacctgggaacgccctacataggagggagagactatcgccataacaacagaggttcctagagtcagaggtgacgcgt

SEQ ID NO: 433302 - DNA, 1990 bp, Homo sapiens
ggctccccaaggaggtccacgtcctaatccccagaacctgtgactatgttgggttacacagcaagggggagttaaggttgcagacagaattgaggttgctaatcagatgtccttgagatgagactacctaagatatccagctggattctatgcaatcacaagagtccttttttttgttgagacggattctctatgttgcccaggctggtctcaggctcctgggctcagatggtcctcctgcctcagcttccaaaggcacaggccaagttgtagctttgtcccttgccatcatgcccaacaagaggttctataccttttaatgaattgactttcataaattggttatgttggtgggcaagttctttaagctggaaattgtaaattcctcctgaaatgttttttcatgcagttaccatgaactaatactacaataaaggatggtcttgggtgtcaagtcaattcttgaaaatgtgtatttgaagaaaaagtaaatttcgcctactgttgtcagatattagcagtccagatattcgctctagcttgtaaacttccctgtggtcagcctaagctcttaaccccctattctacagctttagactgaaggcaaaagctcaaagcatttaaggcctcctcaatttcggcccctgctgctctgtgctctgttccttggtgtagctttgttccagctcctgcagcattgcaccattcctaaccacaaccttaacagcatgtagggccccatactctaggccccatcttgctgtcttcctgtgttggaatcttgcctaccaaggcctgtcaagagggtcctcccccatactgtttgcccacaaggttcaagagtgattggctcccagtcttcctggactgaactacttggatctaggggttgcctgttatttagaagagatcccttaactggtagggccctttcagtaggacagtatttgggtaaggggagggtataagatgagaacctttgctaagttaggttcctttgggagcctccagtttgtttctccctctccccagccatcttgttggatctgccaagggattggactccttcattgtcctaggtttttaaggttttaaagcccaccttctgcagtcggttttctggaatgtgttggtggattacttaagagttatggggaaagagttcttacggcctgtctaggtcagtgaagtcatactggcaagtgacaagaaggaagccaggtttgtcacttaccctgcatgctaaggacatcagagcccacatagaagtctggtagtttttcagccagcagtgggtagggaagcgtggataggggatttctgaacaggactttatgcctgtatgcatgggcaccatgtctgtcctgagcactaccacatggcatcgtaggctgctctgtcaaaggatatagcgatagctggtcctatgggcagatgcctagaatcaaggtgggcctcagaaatagggctgggtctccataaggaggtaggccacgttcagtccacccctagcatagatggaactggggtctcgggcaaccaggagttacaggaattttgctaaagattcccaccttccttgagtggggacacattcctctggttggagcttgttcccctaaatgaaaaatgtaatgcagtacatgtaggggccctactgtattctttttctgggggaaagctcttggtgttcacaatggctcaggcttacagtacctccagccatgtgcccatttccacaagtctttggggaaggccatgagctgagctgagagggttctctggggcctgggatgacttaagaaccaaatggcagataatgggatagggggcagatgcagaggaccaacgggaagttttaacacaaatccccttccccagatgatatggtttgcctttctgtaggtgggtggcccaggccaatttttggcaatatccttaacccacctgataggagaagcgccctcccctgcctgccttgcccattcta

SEQ ID NO: 433303 - DNA, 1903 bp, Homo sapiens
  misc_feature (28)..(28): n is a, c, g, or t
  misc_feature (115)..(117): n is a, c, g, or t
  misc_feature (124)..(124): n is a, c, g, or t
  misc_feature (126)..(126): n is a, c, g, or t
gggtgactatagaggatccaagctcccnacaagaggtctataccttttaatgaattgactttcataaattggttatgttggtgggcaagttctttaagctggagtgtggtggcannntcacagntnatttcctgggctcagatggtcctcctgcctcagcttccaaaggcacaggccaagttgtagctttgtcccttgccatcatgcccaacaagaggttctataccttttaatgaattgactttcataaattggttatgttggtgggcaagttctttaagctggaaattgtaaattcctcctgaaatgttttttcatgcagttaccatgaactaatactacaataaaggatggtcttgggtgtcaagtcaattcttgaaaatgtgtatttgaagaaaaagtaaatttcgcctactgttgtcagatattagcagtccagatattcgctctagcttgtaaacttccctgtggtcagcctaagctcttaaccccctattctacagctttagactgaaggcaaaagctcaaagcatttaaggcctcctcaatttcggcccctgctgctctgtgctctgttccttggtgtagctttgttccagctcctgcagcattgcaccattcctaaccacaaccttaacagcatgtagggccccatactctaggccccatcttgctgtcttcctgtgttggaatcttgcctaccaaggcctgtcaagagggtcctcccccatactgtttgcccacaaggttcaagagtgattggctcccagtcttcctggactgaactacttggatctaggggttgcctgttatttagaagagatcccttaactggtagggccctttcagtaggacagtatttgggtaaggggagggtataagatgagaacctttgctaagttaggttcctttgggagcctccagtttgtttctccctctccccagccatcttgttggatctgccaagggattggactccttcattgtcctaggtttttaaggttttaaagcccaccttctgcagtcggttttctggaatgtgttggtggattacttaagagttatggggaaagagttcttacggcctgtctaggtcagtgaagtcatactggcaagtgacaagaaggaagccaggtttgtcacttaccctgcatgctaaggacatcagagcccacatagaagtctggtagtttttcagccagcagtgggtagggaagcgtggataggggatttctgaacaggactttatgcctgtatgcatgggcaccatgtctgtcctgagcactaccacatggcatcgtaggctgctctgtcaaaggatatagcgatagctggtcctatgggcagatgcctagaatcaaggtgggcctcagaaatagggctgggtctccataaggaggtaggccacgttcagtccacccctagcatagatggaactggggtctcgggcaaccaggagttacaggaattttgctaaagattcccaccttccttgagtggggacacattcctctggttggagcttgttcccctaaatgaaaaatgtaatgcagtacatgtaggggccctactgtattctttttctgggggaaagctcttggtgttcacaatggctcaggcttacagtacctccagccatgtgcccatttccacaagtctttggggaaggccatgagctgagctgagagggttctctggggcctgggatgacttaagaaccaaatggcagataatgggatagggggcagatgcagaggaccaacgggaagttttaacacaaatccccttccccagatgatatggtttgcctttctgtaggtgggtggcccaggccaatttttggcaatatccttaacccacctgataggagaagcgccctcccctgcctgccttgcccattcta

SEQ ID NO: 433304 - DNA, 1986 bp, Homo sapiens
tccccctccttttgtgaggattgggatattccgactccttaagggcctggcgcacataaggtgtgaccttttcattcccgttgttatggaggtaggctctctaggaatctgggagtagtagctggggggcaagagcaaataaagagctcgagcttctgtggtctctggggagatgttcccgggaagcctgtctagagggcggagggcagctgttgagatggcgtggctccccggctcctgcgcccgcgtggctttcgcggcgggcgctgcggcccggtattggacagcctggcagggcagcgcggggccgaatccggctgccgtggctgaggctcatggatcactcttttgtggtagggccacatctgccagagcctggagtctgcgaaggccgggacccggttccccggcccacagtgggggtgtgcaaacccgagagaactgggtaagttggggtcggcttgcagtttggggtaccccgagggcggtgtacgtcggtaagattgtaacagtattactggaagacttattcgactgtcctgatgatacttgtaataggaagtgccgtcagaagcgataactgacgacgtctaatgtctatctgaccgcagtcgctgaaacctctacaacttagttgaccgtaactgccagagccctgccctgaattcctgtccttactccctctttaagattgcgtacccactgcagagtgctgaagacggggtagccacgaggtgagaggctctctggtgtagggtttaacatggaacgtagttttgtcacttgaatgcacggaaattggcgttttgacagttttctacgtttaggtgttttatacactttagggtaacgttatcatgtcattgcatagggtggaacttaaatagaaactggagatggctgcttcagccacagtcctaacctagaactgcatttaaagcaaactgataatgcagaaacaaactccttcgttaagaaatgtctccagtagcagggttagcttaagtttcaggtagggtctagatctgcggttggaacagtactggagggttgtgaggtgcttgactgctctgatgaaatcactaataggaagtgccgtcagaagcgataactgacgaagactactcctgtctgattgcagtcaagtcttcaccacttgctggttcccaggagtaaacttgtttgaacggtgacctaattgctatattcacctaggttgcaaattcgtgaagaatcagcatcatgtttggcagctgagtattggagccaggagcctgccatgaggttttgagaacagagtgctgttttagagctggcagcagcatctcagcccaagagaagccgatgcagcctcagtgttcctttgccttgggggtttctgagtggtggggttgtaagcagatcctgccaggcacccagaaggaaacctcatcaggactccctcagaaagcaggccctgaagaatcctgtgaccttcatctaaagtaggtcatgagacccctgagcttaaaacggagtgatcggctttggagaagtaaggagacatgacgtgcctgccctggggtggggactaaacttcgtgccactccacgtgaaagggggagaaatccctggaaggcacgcaggctggacatcatcatatattctctacagatggagacaccaaggcccacgccttctgtgctgttggaatttcaggaaggatgggggtggggcacggcctcagccctgggcatgttctgcagattgcactgctcttatctgccagggggtggtgagagggtggctgagctggacagatggcgggcagggacgggctctgcggtctggcagctgacattgatacaagcaaataaagagtctttgctggggaaacaaaaaaaaggggcgccttaaatatccctagggcccagtaacgctccccctttctgccaggggccttggagcttttacaaccgcgccctaacacatacgggaacgcggagt

SEQ ID NO: 433305 - DNA, 1916 bp, Homo sapiens
tccccctccttttgtgaggattgggatattccgactccttaagggcctggcgcacataaggtgtgaccttttcattcccgttgttatggaggtaggctctctaggaatctgggagtagtagctggggggcaagagcaaataaagagctcgagcttctgtggtctctggggagatgttcccgggaagcctgtctagagggcggagggcagctgttgagatggcgtggctccccggctcctgcgcccgcgtggctttcgcggcgggcgctgcggcccggtattggacagcctggcagggcagcgcggggccgaatccggctgccgtggctgaggctcatggatcactcttttgtggtagggccacatctgccagagcctggagtctgcgaaggccgggacccggttccccggcccacagtgggggtgtgcaaacccgagagaactgggtaagttggggtcggcttgcagtttggggtaccccgagggcggtgtacgtcggtaagattgtaacagtattactggaagacttattcgactgtcctgatgatacttgtaataggaagtgccgtcagaagcgataactgacgacgtctaatgtctatctgaccgcagtcgctgaaacctctacaacttagttgaccgtaactgccagagccctgccctgaattcctgtccttactccctctttaagattgcgtacccactgcagagtgctgaagacggggtagccacgaggtgagaggctctctggtgtagggtttaacatggaacgtagttttgtcacttgaatgcacggaaattggcgttttgacagttttctacgtttaggtgttttatacactttagggtaacgttatcatgtcattgcatagggtggaacttaaatagaaactggagatggctgcttcagccacagtcctaacctagaactgcatttaaagcaaactgataatgcagaaacaaactccttcgttaagaaatgtctccagtagcagggttagcttaagtttcaggtagggtctagatctgcggttggaacagtactggagggttgtgaggtgcttgactgctctgatgaaatcactaataggaagtgccgtcagaagcgataactgacgaagactactcctgtctgattgcagtcaagtcttcaccacttgctggttcccaggagtaaacttgtttgaacggtgacctaattgctatattcacctaggttgcaaattcgtgaagaatcagcatcatgtttggcagctgagtattggagccaggagcctgccatgaggttttgagaacagagtgctgttttagagctggcagcagcatctcagcccaagagaagccgatgcagcctcagtgttcctttgccttgggggtttctgagtggtggggttgtaagcagatcctgccaggcacccagaaggaaacctcatcaggactccctcagaaagcaggccctgaagaatcctgtgaccttcatctaaagtaggtcatgagacccctgagcttaaaacggagtgatcggctttggagaaaaatccctggaaggcacgcaggctggacatcatcatatattctctacagatggagacaccaaggcccacgccttctgtgctgttggaatttcaggaaggatgggggtggggcacggcctcagccctgggcatgttctgcagattgcactgctcttatctgccagggggtggtgagagggtggctgagctggacagatggcgggcagggacgggctctgcggtctggcagctgacattgatacaagcaaataaagagtctttgctggggaaacaaaaaaaaggggcgccttaaatatccctagggcccagtaacgctccccctttctgccaggggccttggagcttttacaaccgcgccctaacacatacgggaacgcggagt

SEQ ID NO: 433306 - DNA, 1303 bp, Homo sapiens
tccccctccttttgtgaggattgggatattccgactccttaagggcctggcgcacataaggtgtgaccttttcattcccgttgttatggaggtaggctctctaggaatctgggagtagtagctggggggcaagagcaaataaagagctcgagcttctgtggtctctggggagatgttcccgggaagcctgtctagagggcggagggcagctgttgagatggcgtggctccccggctcctgcgcccgcgtggctttcgcggcgggcgctgcggcccggtattggacagcctggcagggcagcgcggggccgaatccggctgccgtggctgaggctcatggatcactcttttgtggtagggccacatctgccagagcctggagtctgcgaaggccgggacccggttccccggcccacagtgggggtgtgcaaacccgagagaactgggttgcaaattcgtgaagaatcagcatcatgtttggcagctgagtattggagccaggagcctgccatgaggttatattcccagaggatgtcagtcccaaggaccagtagctgccatcagtttggattctgaaaactaactggcatcaacactgggtgtagaaacatgcttgccttatgtatcagaggacatgctcagcagatccaagagatatatttggcaactttttctagaaaaggcacattgggtatcattcattacattcttgagtttttttgggtttttttttttttttgtgggagaacaagctcttgtgcgtgtttgtgcccgaggctgtgggagtgtggtgggggccacataattccacggcctcatatgggctctccctcaaactccacccgaggccttagagcaaaactcctctcccaaccttgtgttagctgtgggacaattcacgagctctccacagggcaaacacacctgtggcttaaagtattttttttgtgtgggtgtgaagacagaggagtattcctctattttgttgtgcccccggggcgtggggctctctcagaggcgccgcgggggcctcagaagagtggcgcctctcgtgggccctcaagttctccaaaagaggggcaaaggcgcccaagagttgggtaagttgtgtgcgcccccttgtgcgcattttagtgacccccaaacagagagagaggggctctatattcacgctttttatagcgtggaaaattgggggactttctcaaataaactgtgcggggataagtgtggtgggggcggggggcaagagtcctctttaaaaaggcgcgttgacaccatttgtgcgcacaatgttgccttca

SEQ ID NO: 433307 - DNA, 1265 bp, Homo sapiens
tccccctccttttgtgaggattgggatattccgactccttaagggcctggcgcacataaggtgtgaccttttcattcccgttgttatggaggtaggctctctaggaatctgggagtagtagctggggggcaagagcaaataaagagctcgagcttctgtggtctctggggagatgttcccgggaagcctgtctagagggcggagggcagctgttgagatggcgtggctccccggctcctgcgcccgcgtggctttcgcggcgggcgctgcggcccggtattggacagcctggcagggcagcgcggggccgaatccggctgccgtggctgaggctcatggatcactcttttgtggtagggccacatctgccagagcctggagtctgcgaaggccgggacccggttccccggcccacagtgggggtgtgcaaacccgagagaactgggaagtgccgtcagaagcgataactgacgacgtctaatgtctatctgaccgcagtcgctgaaacctctacaacttagttgaccgtaactgccagagccctgccctgaattcctgtccttactccctctttaagattgcgtacccactgcagagtgctgaagacggggtagccacgaggttgcaaattcgtgaagaatcagcatcatgtttggcagctgagtattggagccaggagcctgccatgagccgatgcagcctcagtgttcctttgccttgggggtttctgagtggtggggttgtaagcagatcctgccaggcacccagaaggaaacctcatcaggactccctcagaaagcaggccctgaagaatcctgtgaccttcatctaaagtaggtcatgagacccctgagcttaaaacggagtgatcggctttggagaaaaatccctggaaggcacgcaggctggacatcatcatatattctctacagatggagacaccaaggcccacgccttctgtgctgttggaatttcaggaaggatgggggtggggcacggcctcagccctgggcatgttctgcagattgcactgctcttatctgccagggggtggtgagagggtggctgagctggacagatggcgggcagggacgggctctgcggtctggcagctgacattgatacaagcaaataaagagtctttgctggggaaacaaaaaaaaggggcgccttaaatatccctagggcccagtaacgctccccctttctgccaggggccttggagcttttacaaccgcgccctaacacatacgggaacgcggagt

SEQ ID NO: 433308 - DNA, 1409 bp, Homo sapiens
tccccctccttttgtgaggattgggatattccgactccttaagggcctggcgcacataaggtgtgaccttttcattcccgttgttatggaggtaggctctctaggaatctgggagtagtagctggggggcaagagcaaataaagagctcgagcttctgtggtctctggggagatgttcccgggaagcctgtctagagggcggagggcagctgttgagatggcgtggctccccggctcctgcgcccgcgtggctttcgcggcgggcgctgcggcccggtattggacagcctggcagggcagcgcggggccgaatccggctgccgtggctgaggctcatggatcactcttttgtggtagggccacatctgccagagcctggagtctgcgaaggccgggacccggttccccggcccacagtgggggtgtgcaaacccgagagaactgggttgcaaattcgtgaagaatcagcatcatgtttggcagctgagtattggagccaggagcctgccatgaggttttgagaacagagtgctgttttagagctggcagcagcatctcagcccaagagaagccgatgcagcctcagtgttcctttgccttgggggtttctgagtggtggggttgtaagcagatcctgccaggcacccagaaggaaacctcatcaggactccctcagaaagcaggccctgaagaatcctgtgaccttcatctaaagtaggtcatgagacccctgagcttaaaacggagtgatcggctttggagaagtaaggagacatgacgtgcctgccctggggtggggactaaacttcgtgccactccacgtgaaagggggaggcatgactccacagtttctgcaacaacagagccggggaaaggaggacgcagcaagcgctgaatattaaccagcaaaggtagatgcttcaatatcgaaaccaccgggacccgcatgtgcaaagctacttaatgagggtgtaatcaaacacagtctaccagaaggaaattaattagagtccggagagcaagcaggaagcagaaccaggctgctccccctcctggctctagaacatcactggcagccactgctaagggagggacaaggctgggggatgccaggcctcagctggtgtgccagggctcctgtcctcttccccgtgacattccggcttgcctttgggggacacccaggggagggaagggaaatgtcaggtgctgttagggaaacacagcctgaggaagcccccagggagagaagctgggacatcccagagttaaggagctgggcacagagaagacttgcttctctaggaagacaatggtctcataagaagaaggacggaatcataaacaacagaaatgtattctctcatagttttggagaccagaaatctgaaatcagggtgttggcagag

SEQ ID NO: 433309 - DNA, 1159 bp, Homo sapiens
tccccctccttttgtgaggattgggatattccgactccttaagggcctggcgcacataaggtgtgaccttttcattcccgttgttatggaggtaggctctctaggaatctgggagtagtagctggggggcaagagcaaataaagagctcgagcttctgtggtctctggggagatgttcccgggaagcctgtctagagggcggagggcagctgttgagatggcgtggctccccggctcctgcgcccgcgtggctttcgcggcgggcgctgcggcccggtattggacagcctggcagggcagcgcggggccgaatccggctgccgtggctgaggctcatggatcactcttttgtggtagggccacatctgccagagcctggagtctgcgaaggccgggacccggttccccggcccacagtgggggtgtgcaaacccgagagaactgggttgcaaattcgtgaagaatcagcatcatgtttggcagctgagtattggagccaggagcctgccatgagccgatgcagcctcagtgttcctttgccttgggggtttctgagtggtggggttgtaagcagatcctgccaggcacccagaaggaaacctcatcaggactccctcagaaagcaggccctgaagaatcctgtgaccttcatctaaagtaggtcatgagacccctgagcttaaaacggagtgatcggctttggagaagtaaggagacatgacgtgcctgccctggggtggggactaaacttcgtgccactccacgtgaaagggggagaaatccctggaaggcacgcaggctggacatcatcatatattctctacagatggagacaccaaggcccacgccttctgtgctgttggaatttcaggaaggatgggggtggggcacggcctcagccctgggcatgttctgcagattgcactgctcttatctgccagggggtggtgagagggtggctgagctggacagatggcgggcagggacgggctctgcggtctggcagctgacattgatacaagcaaataaagagtctttgctggggaaacaaaaaaaaggggcgccttaaatatccctagggcccagtaacgctccccctttctgccaggggccttggagcttttacaaccgcgccctaacacatacgggaacgcggagt

SEQ ID NO: 433310 - DNA, 1146 bp, Homo sapiens
tccccctccttttgtgaggattgggatattccgactccttaagggcctggcgcacataaggtgtgaccttttcattcccgttgttatggaggtaggctctctaggaatctgggagtagtagctggggggcaagagcaaataaagagctcgagcttctgtggtctctggggagatgttcccgggaagcctgtctagagggcggagggcagctgttgagatggcgtggctccccggctcctgcgcccgcgtggctttcgcggcgggcgctgcggcccggtattggacagcctggcagggcagcgcggggccgaatccggctgccgtggctgaggctcatggatcactcttttgtggtagggccacatctgccagagcctggagtctgcgaaggccgggacccggttccccggcccacagtgggggtgtgcaaacccgagagaactgggttgcaaattcgtgaagaatcagcatcatgtttggcagctgagtattggagccaggagcctgccatgaggttttgagaacagagtgctgttttagagctggcagcagcatctcagcccaagagaaggcatgactccacagtttctgcaacaacagagccggggaaaggaggacgcagcaagcgctgaatattaaccagcaaaggtagatgcttcaatatcgaaaccaccgggacccgcatgtgcaaagctacttaatgagggtgtaatcaaacacagtctaccagaaggaaattaattagagtccggagagcaagcaggaagcagaaccaggctgctccccctcctggctctagaacatcactggcagccactgctaagggagggacaaggctgggggatgccaggcctcagctggtgtgccagggctcctgtcctcttccccgtgacattccggcttgcctttgggggacacccaggggagggaagggaaatgtcaggtgctgttagggaaacacagcctgaggaagcccccagggagagaagctgggacatcccagagttaaggagctgggcacagagaagacttgcttctctaggaagacaatggtctcataagaagaaggacggaatcataaacaacagaaatgtattctctcatagttttggagaccagaaatctgaaatcagggtgttggcagag

SEQ ID NO: 433311 - DNA, 709 bp, Homo sapiens
  misc_feature (625)..(625): n is a, c, g, or t
  misc_feature (642)..(642): n is a, c, g, or t
  misc_feature (675)..(675): n is a, c, g, or t
tccccctccttttgtgaggattgggatattccgactccttaagggcctggcgcacataaggtgtgaccttttcattcccgttgttatggaggtaggctctctaggaatctgggagtagtagctggggggcaagagcaaataaagagctcgagcttctgtggtctctggggagatgttcccgggaagcctgtctagagggcggagggcagctgttgagatggcgtggctccccggctcctgcgcccgcgtggctttcgcggcgggcgctgcggcccggtattggacagcctggcagggcagcgcggggccgaatccggctgccgtggctgaggctcatggatcactcttttgtggtagggccacatctgccagagcctggagtctgcgaaggccgggacccggttccccggcccacagtgggggtgtgcaaacccgagagaactgggttgcaaattcgtgaagaatcagcatcatgtttggcagctgagtattggagccaggagcctgccatgaggttttgagaacagagtgctgttttagagctggcagcagcatctcagcccaagagaagtatattcccagaggatgtcagtcctgctggtcctaggggccctgctggtccttntggccctgctggaaaanatggtcgcactggacatcctggtacatttgganctgctgggcattcgaggccttagggtcaccaagg

SEQ ID NO: 433312 - DNA, 2419 bp, Homo sapiens
tccccctccttttgtgaggattgggatattccgactccttaagggcctggcgcacataaggtgtgaccttttcattcccgttgttatggaggtaggctctctaggaatctgggagtagtagctggggggcaagagcaaataaagagctcgagcttctgtggtctctggggagatgttcccgggaagcctgtctagagggcggagggcagctgttgagatggcgtggctccccggctcctgcgcccgcgtggctttcgcggcgggcgctgcggcccggtattggacagcctggcagggcagcgcggggccgaatccggctgccgtggctgaggctcatggatcactcttttgtggtagggccacatctgccagagcctggagtctgcgaaggccgggacccggttccccggcccacagtgggggtgtgcaaacccgagagaactggattgcgtacccactgcagagtgctgaagacggggtagccacgagtgcaaattcgtgaagaaccagcctgggcaacatagcaagacccctttatctataaaaataataataactaggtaccattgtgaaaaataataactagggattgattatagtatctttactctgtattcacaaatatctgtattcctggacatatttaatcctttgatttacctctgactaggtttgtcattgtaatccctgggctgcttaggaggataccatttggtttgatgaaaaagctggaatgataatagctcaaactcttttgagcatttagtacatgcttggcactgttctatatgtcttaagttattcactcttgtatttaaccatcaacactcttatgaggtaaatatcccgcaattacttttgcgccaacctagtaccactacagacaaggaaacagatgcagagaggctaagttacaagggcacacagccataaactttggatctgtggagtgactgggcttcagagtcctcttcctgactgctgttcctatgtcttttgcaaagagaagtctttgacaggtatatgctttattaaaatcatgtttagaaaaaaatgagagaatagaattagaaaaaggaatgactgtaggcttcgatgaaaatgacttttgtgactaggtgaaaattgtttggctgggtatcctggaaaattgtcttctgggaatatctatattccagggttcacttttgtcatagaattgtttcttggcccatttaagagagatactttgtttattaataaatcaaacgttttaattttagacatctgtgatcagttcttttaaagagactatatttatttaagtacttcccaagtttagtgcaggggtactacctaccatttattcaggatcatagaggataagttagggtcaaagaaaatagagactgccatgacagcggcttgcttgctttctccccaggaataatgcacaaataatttatagcagctgatatttttcggtgttaacagataataggggaatttgctgaaatttttatttggagcctcggatttaattttaggccactgggctaatttatttttaaatgtaaattaattccagtactttatttgtaaagtttacttgagatctaactgttctaagacatgctgttgcattacaaataagaattgctgcatttattttgatcccattgccagaggcaaaattagtcaaaatttaaaggtatgtagaaatacttttgtaatccttctaaactacattaaatttctggctgactggtggctcacacctgcagtctcagcactttgggaggctgaggttggcagatcaacatggtgaaagcaggtctctactaaaaaataccaaaaaaaattagccgggcatggtggcgcatgctactcaggaggctgaggcgcgagaatctcttgaacctggaaggtggagtttgcagagagccgagatggtgccactatactcaagcctgggctacagagtaagacactgtctcaaaaataaataaaattataatttcttagatttaaaaattagatttgttttccaaagacagggtagtagaatatgtagggtacttgtatagatagatatatgttacttaatgcagtactgtctggtgcagggtatcttcacgtggcataatagacccagagcttcaggtctaggctctgtaaagcgaaatgccaaactactgtgtgtgcatttctcgaaagaaaggtgatgtagttttatacaattttgaaacaagtccatgactcccaagggtttaaggaccaatggttcagtgagacatttacagattttgaagttagaattcagtttgaattctatacacatttactagctatgcaaccttggacaagttacctaacatctgtgagcctcagtttctttacctgtagaatgatatatttgccccattgggttgttagggtt

SEQ ID NO: 433313 - DNA, 762 bp, Homo sapiens
  misc_feature (694)..(694): n is a, c, g, or t
  misc_feature (707)..(707): n is a, c, g, or t
  misc_feature (744)..(744): n is a, c, g, or t
  misc_feature (746)..(746): n is a, c, g, or t
  misc_feature (756)..(756): n is a, c, g, or t
ctccgtgcccccaccatcaaaagaaaaaaatcagagatcacctatgaaatcagcaccacaaagccagactgtggcaacgtattggttttctaggactgccagagcagagtataaggggcagggtggctcaaccaccggttcctcatagttccggagccagaagtctgagaccgaggtgtcagcagggtgggctccttctgaggctcctctcctgggcctgtagatgccctcttctccctgtgtcctcacacggccctccctctgtatgtgtctgtgtcctgctcaccgcttcctcgaaggacaccagtcctttggattacaagcctgcccctaacaacctcatttaactatgtcacccatttaaagtcactgtctccaaatagagtcccattctgagatactgggggttaggacttcaccagatagattttgggaagacacaatttagcccataatagggagccactactattaatacttagtgaaataaaagaaagtgaggcatcagcccgtgtaacccctcaacgtgcaggcagaggaactgaggccgcagattcagcagcactctgggccttgcttgtgaatggggattttagtcactatcaaatgtattactgacttctactcactaatgtctttgataaattttggagttatcttttttctttattttttgaaactgagtatcgcgccnctgcatttcagtntgggcaacaacagcgaaactctaactcaaaaaaactncnaaaaaaaaancaaaaa

SEQ ID NO: 433314 - DNA, 776 bp, Homo sapiens
ctccgtgcccccaccatcaaaagaaaaaaatcagagatcacctatgaaatcagcaccacaaagccagactgtggcaacgtattggttttctaggactgccagagcagagtataaggggcagggtggctcaaccaccggttcctcatagttccggagccagaagtctgagaccgaggtgtcagcagggtgggctccttctgaggctcctctcctgggcctgtagatgccctcttctccctgtgtcctcacacggccctccctctgtatgtgtctgtgtcctgctcaccgcttcctcgaaggacaccagtcctttggattacaagcctgcccctaacaacctcatttaactatgtcacccatttaaagtcactgtctccaaatagagtcccattctgagatactgggggttaggacttcaccagatagattttgggaagacacaatttagcccataatagggagccactactattaatacttagtgaaataaaagaaagtgaggcatcagcccgtgtaacccctcaacgtgcaggcagaggaactgaggccgcagattcagcagcactctgggccttgcttgtgaatggggattttagtcactatcaaatgtattactgacttctactcactaatgtctttgataaattttggagttatcttttttctttattttttgaaactgagtcttgctctgttgcccaggctggggtgcagtgagctgagaccgttcattgtactccagcctaggtgacagagtgagatcctgcccccaccat

SEQ ID NO: 433315 - DNA, 2284 bp, Homo sapiens
gttgatacggatcctttgcaagacacgttgtctagtaccaaggaatctgaagaaggtcagttgaagtctgctttggaagctggccaggtctcatctgcactgacttgccactcctttggggatggatccggggctgcaggcttggagttgaactgcccatcaatgggagaaaacacgatgaaaacagaaccgacttctccccttgtggaattacaagagatttcgactgtggaagtaacaaatacttttaagaaaacagatgattttgggtcatctaatgcaccagctgtcgacctagaccataagtttagatgcaaagttgtggactgtttaaaatttttccgcaaagccaaactgttgcactatcacatgaagtatttccatggaatggagaagtcactggagccagaagagagcccgggaaagaggcatgtccaaaccaggggcccttcagcttcagacaagcccagccaggagaccctgaccaggaagcgggtctctgccagttccccaactacaaaagacaaggaaaagaataaagagaagaaattcaaggagtttgtgagagtgaagccaaagaagaaaaaaaaaaaaaaaaaaaaacgcgagactagttctctctccctgcgcctggtcgcccccatgtggaatgggcgtatcaggggcatccatcgcctgggtgcggcagtggccccagagggcaatcagaagaagaaaaggacaatactccagttcctgaccaactatttctacgatgtggaggctctgagggattacttgctccaaagggagatgtacaaggtgcatgagaaaaatcgatcttacacctggctggagaagcaacatggtccatacggcgcaggtgcctttttcatcctgaagcagggaggcgcagtcaagtttcgagacaaggagtggatcaggccagataagtatggccatttctctcaggagttctggaatttctgtgaagtgcctgtcgaagctgtggatgccggtgactgtgacatcaactacgagggcctggataacctcctccgcctgaaggagctccagtccttgtcgctgcagcgctgctgccacgtggacgactggtgtctcagccgcctctacccactggccgactcgttgcaggagctctcgctggccggttgcccccgcatctccgaacggggcctcgcctgcctccaccacctccagaacctccgcaggctggacatctcggacctccctgccgtgtccaaccctggcctcactcagatattggtggaggagatgctgcccaattgcgaggttgtgggagtcgactgggctgagggcctgaagtcagggccggaggagcagcctcgggacacagccagccctgtccctgcctagcctttagccctgtccccactcacgtggcttctcagcgggctgcatggaatgtctggtagctcaccacacttctggcttccatttgtcttcactcaacgtcagggtgggggagtggtgctggccaatcacaggagagagcgtgagttcccagtatttattcctggctgcccttggctaaaggtcacagctcctgtcaccctgtcaggcagccctttccatgcccctgttcaggcctggggaggtaaaggctcaggctgttagtagccgcagagagccacactcaccttgtcaggagactcttctcaaactgtccttatgtgagtgcactgccatttcttgcagggaccctgactgacacaggggctactactgacactttacagggatggttctcccccgtgcagggccgctgtgcccactgcaggacatgcagcatccttcgccccactccactcactaaaggccagcgcaccccaggccccatagtattgctggttatggatttattgactttatgttccaaattcagctttttcagttggctgttttttgaaaggggataagctttgtcagtagagggcaccgaacaggcattataggaggaaaggcgcctccttcgtggttcttgttggttgtgcttctgcctctggacgccgcagtgcatgtggcttccccagcacccagctcctgaagcaccaggcggtcagcagctgcccttggcaccctccagccctcagaagttgcgtaggagacacagcgcctccactgaggcacctctctgggaataacgttccccagcaccccaaatggatttccagtcaattcagaagcattttaccagtgaagccctcattattccagttcactgttaaagccagtaattctctatattaaactttccctgttc

SEQ ID NO: 433316 - DNA, 1476 bp, Homo sapiens
gataagaccggccccttccggttacgaaaccttagcaagatggcggctccctgggcgtccctgcgcctggtcgcccccatgtggaatgggcgtatcaggggcatccatcgcctgggtgcggcagtggccccagagggcaatcagaagaagaaaaggacaatactccagttcctgaccaactatttctacgatgtggaggctctgagggattacttgctccaaagggagatgtacaaggtgcatgagaaaaatcggtttcgagacaaggagtggatcaggccagataagtatggccatttctctcaggagttctggaatttctgtgaagtgcctgtcgaagctgtggatgccggtgactgtgacatcaactacgagggcctggataacctccgaacctccgcaggctggacatctcggacctccctgccgtgtccaaccctggcctcactcagatattggtggaggagatgctgcccaattgcgaggttgtgggagtcgactgggctgagggcctgaagtcagggccggaggagcagcctcgggacacagccagccctgtccctgcctagcctttagccctgtccccactcacgtggcttctcagcgggctgcatggaatgtctggtagctcaccacacttctggcttccatttgtcttcactcaacgtcagggtgggggagtggtgctggccaatcacaggagagagcgtgagttcccagtatttattcctggctgcccttggctaaaggtcacagctcctgtcaccctgtcaggcagccctttccatgcccctgttcaggcctggggaggtaaaggctcaggctgttagtagccgcagagagccacactcaccttgtcaggagactcttctcaaactgtccttatgtgagtgcactgccatttcttgcagggaccctgactgacacaggggctactactgacactttacagggatggttctcccccgtgcagggccgctgtgcccactgcaggacatgcagcatccttcgccccactccactcactaaaggccagcgcaccccaggccccatagtattgctggttatggatttattgactttatgttccaaattcagctttttcagttggctgttttttgaaaggggataagctttgtcagtagagggcaccgaacaggcattataggaggaaaggcgcctccttcgtggttcttgttggttgtgcttctgcctctggacgccgcagtgcatgtggcttccccagcacccagctcctgaagcaccaggcggtcagcagctgcccttggcaccctccagccctcagaagttgcgtaggagacacagcgcctccactgaggcacctctctgggaataacgttccccagcaccccaaatggatttccagtcaattcagaagcattttaccagtgaagccctcattattccagttcactgttaaagccagtaattctctatattaaactttccctgttc

SEQ ID NO: 433317 - DNA, 958 bp, Homo sapiens
  misc_feature (18)..(18): n is a, c, g, or t
  misc_feature (48)..(48): n is a, c, g, or t
tccgaagagaagacggangtacggctaggtacgaggctgggtttaaantcggccgaggctgggcgtccctgcgcctggtcgcccccatgtggaatgggcgtatcaggggcatccatcgcctgggtgcggcagtggccccagagggcaatcagaagaagaaaaggacaatactccagttcctgaccaactatttctacgatgtggaggctctgagggattacttgctccaaagggagatgtacaaggtgcatgagaaaaatcgatcttacacctggctggagaagcaacatggtccatacggcgcaggtgcctttttcatcctgaagcagggaggcgcagtcaagtttcgagacaaggagtggatcaggccagataagtatggccatttctctcaggagttctggaatttctgtgaagtgcctgtcgaagctgtggatgccggtgactgtgacatcaactacgagggcctggataacctcctccgcctgaaggagctccagtccttgtcgctgcagcgctgctgccacgtggacgactggtgtctcagccgcctctacccactggccgactcgttgcaggagctctcgctggccggttgcccccgcatctccgaacggggcctcgcctgcctccaccacctccagtgagacctcagctcaggctgggccacatgcccaggcacctctcccacctaacccagatgcaggagaggaagtggggaggggcaatgttaggcagttctcatatccccctgcatccatcacaaacctagagtatttatggtagatgagcagtcacagtgagtctctggaagaattaaatgactcctggttttcttcctttttgttttagtcaaaactgtgtgatatcgacgctgttgcagaacagcaggagctggagttgcatatttgcaattaacacagtgggcttcatgtgcctggacagctataaagatttt

SEQ ID NO: 433318 - DNA, 774 bp, Homo sapiens
aggctgtgtgagaccgtgcttcttgtacaggttaagggggctgggcaccatcttatgtgggctaagggcatccaggcggctacgtgcaactgtggtacctcttgcctgatctacaggcggttgggacagaccacagaagtcatcctggaaaccagagggaggcatggcctgatacaactatggttctatgaacacctgttcggtttatactccggagtataaaccgaacaggcattataggaggaaaggcgcctccttcgtggttcttgttggttgtgcttctgcctctggacgccgcagtgcatgtggcttccccagcacccagctcctgaagcaccaggcggtcagcagctgcccttggcaccctccagccctcagaagttgcgtaggagacacagcgcctccactgaggcacctctctgggaataacgttccccagcaccccaaatggatttccagtcaattcagaagcattttaccagtgaagccctcattattccagttcactgttaaagccagtaattctctatattaaactttccctgttcggtttatggagtataaaccgaacagggtcttgggaagggacagtgtctaagtgtctgggtgccatccagagcatttggcaggggcagctgcaggatgagtgtgttcccaggggagtgagagcagcagctatatggcacttgtttgctactgccctctttttttctttttgccaaacctgaggtgactagtgtcacaggtggagcccatctcacacgtcctgtactg

SEQ ID NO: 433319 - DNA, 869 bp, Homo sapiens
gataagaccggccccttccggttacgaaaccttagcaagatggcggctccctgggcgtccctgcgcctggtcgcccccatgtggaatgggcgtatcaggggcatccatcgcctgggtgcggcagtggccccagagggcaatcagaagaagaaaaggacaatactccagttcctgaccaactatttctacgatgtggaggctctgagggattacttgctccaaagggagatgtacaaggtgcatgagaaaaatcggtttcgagacaaggagtggatcaggccagataagtatggccatttctctcaggagttctggaatttctgtgaagtgcctgtcgaagctgtggatgccggtgactgtgacatcaactacgagggcctggataacctcctccgcctgaaggagctccagtccttgtcgctgcagcgctgctgccacgtggacgactggtgtctcagccgcctctacccactggccgactcgttgcaggagctctcgctggccggttgcccccgcatctccgaacggggcctcgcctgcctccaccacctccagtgagacctcagctcaggctgggccacatgcccaggcacctctcccacctaacccagatgcaggagaggaagtggggaggggcaatgttaggcagttctcatatccccctgcatccatcacaaacctagagtatttatggtagatgagcagtcacagtgagtctctggaagaattaaatgactcctggttttcttcctttttgttttagtcaaaactgtgtgatatcgacgctgttgcagaacagcaggagctggagttgcatatttgcaattaacacagtgggcttcatgtgcctggacagctataaagatttt

SEQ ID NO: 433320 - DNA, 242 bp, Homo sapiens
gaatgcctgatcggctatatactccgagggatactctaaatcgacttgcctggcatgccctctaggcattggacgtcgtgtaagaaagtcggcgcctccactgaggcacctctctgggaataacgttccccagcaccccaaatggatttccagtcaattcagaagcattttaccagtgaagccctcattattccagttcactgttaaagccagtaattctctatattaaactttccctgttc

SEQ ID NO: 433321 - DNA, 1722 bp, Homo sapiens
acaggctggtacgcccggaatgtatggataaccttagcaagatggcggctccctgggcgtccctgcgcctggtcgcccccatgtggaatgggcgtatcaggggcatccatcgcctgggtgcggcagtggccccagagggcaatcagaagaagaaaaggacaatactccagttcctgaccaactatttctacgatgtggaggctctgagggattacttgctccaaagggagatgtacaaggtgcatgagaaaaatcgatcttacacctggctggagaagcaacatggtccatacggcgcaggtgcctttttcatcctgaagcagggaggcgcagtcaagtttcgagacaaggagtggatcaggccagataagtatggccatttctctcaggagttctggaatttctgtgaagtgcctgtcgaagctgtggatgccggtgactgtgacatcaactacgagggcctggataacctcctccgcctgaaggagctccagtccttgtcgctgcagcgctgctgccacgtggacgactggtgtctcagccgcctctacccactggccgactcgttgcaggagctctcgctggccggttgcccccgcatctccgaacggggcctcgcctgcctccaccacctccagaacctccgcaggctggacatctcggacctccctgccgtgtccaaccctggcctcactcagatattggtggaggagatgctgcccaattgcgaggttgtgggagtcgactgggctgagggcctgaagtcagggccggaggagcagcctcgggacacagccagccctgtccctgcctagcctttagccctgtccccactcacgtggcttctcagcgggctgcatggaatgtctggtagctcaccacacttctggcttccatttgtcttcactcaacgtcagggtgggggagtggtgctggccaatcacaggagagagcgtgagttcccagtatttattcctggctgcccttggctaaaggtcacagctcctgtcaccctgtcaggcagccctttccatgcccctgttcaggcctggggaggtaaaggctcaggctgttagtagccgcagagagccacactcaccttgtcaggagactcttctcaaactgtccttatgtgagtgcactgccatttcttgcagggaccctgactgacacaggggctactactgacactttacagggatggttctcccccgtgcagggccgctgtgcccactgcaggacatgcagcatccttcgccccactccactcactaaaggccagcgcaccccaggccccatagtattgctggttatggatttattgactttatgttccaaattcagctttttcagttggctgttttttgaaaggggataagctttgtcagtagagggcaccgaacaggcattataggaggaaaggcgcctccttcgtggttcttgttggttgtgcttctgcctctggacgccgcagtgcatgtggcttccccagcacccagctcctgaagcaccaggcggtcagcagctgcccttggcaccctccagccctcagaagttgcgtaggagacacagcgcctccactgaggcacctctctgggaataacgttccccagcaccccaaatggatttccagtcaattcagaagcattttaccagtgaagccctcattattccagttcactgttaaagccagtaattctctatattaaactttccctgttc

SEQ ID NO: 433322 - DNA, 1746 bp, Homo sapiens
acaggctggtacgcccggaatgtatggataaccttagcaagatggcggctccctgggcgtccctgcgcctggtcgcccccatgtggaatgggcgtatcaggggcatccatcgcctgggtgcggcagtggccccagagggcaatcagaagaagaaaaggacaatactccagttcctgaccaactatttctacgatgtggaggctctgagggattacttgctccaaagggagatgtacaaggtgcatgagaaaaatcgatcttacacctggctggagaagcaacatggtccatacggcgcaggtgcctttttcatcctgaagcagggaggcgcagtcaagtttcgagacaaggagtggatcaggccagataagtatggccatttctctcaggagttctggaatttctgtgaagtgcctgtcgaagctgtggatgccggtgactgtgacatcaactacgagggcctggataacctcctccgcctgaaggagctccagtccttgtcgctgcagcgctgctgccacgtggacgactggtgtctcagccgcctctacccactggccgactcgttgcaggagctctcgctggccggttgcccccgcatctccgaacggggcctcgcctgcctccaccacctccagaacctccgcaggctggacatctcggacctccctgccgtgtccaaccctggcctcactcagatattggtggaggagatgctgcccaattgcgaggttgtgggagtcgactgggctgagggcctgaagtcagggccggaggagcagcctcgggacacagccagccctgtccctgcctagcctttagccctgtccccactcacgtggcttctcagcgggctgcatggaatgtctggtagctcaccacacttctggcttccatttgtcttcactcaacgtcagggtgggggagtggtgctggccaatcacaggagagagcgtgagttcccagtatttattcctggctgcccttggctaaaggtcacagctcctgtcaccctgtcaggcagccctttccatgcccctgttcaggcctggggaggtaaaggctcaggctgttagtagccgcagagagccacactcaccttgtcaggagactcttctcaaactgtccttatgtgagtgcactgccatttcttgcagggaccctgactgacacaggggctactactgacactttacagggatggttctcccccgtgcagggccgctgtgcccactgcaggacatgcagcatccttcgccccactccactcactaaaggccagcgcaccccaggccccatagtattgctggttatggatttattgactttatgttccaaattcagctttttcagttggctgttttttgaaaggggataagctttgtcagtagagggcaccgaacaggcattataggaggaaaggcgcctccttcgtggttcttgttggttgtgcttctgcctctggacgccgcagtgcatgtggcttccccagcacccagctcctgaagcaccaggcggtcagcagctgcccttggcaccctccagccctcagaagttgcgtaggagacacagcgcctccactgaggcacctctctgggaataacgttccccagcaccccaaatggatttccagtcaattcagaagcattttaccagtgaagccctcattattccagttcactgttaaagccagtaattctctatattaaactttccctgttcagtataagtccggtgccgagtttt

SEQ ID NO: 433323 - DNA, 1748 bp, Homo sapiens
acaggctggtacgcccggaatgtatggataaccttagcaagatggcggctccctgggcgtccctgcgcctggtcgcccccatgtggaatgggcgtatcaggggcatccatcgcctgggtgcggcagtggccccagagggcaatcagaagaagaaaaggacaatactccagttcctgaccaactatttctacgatgtggaggctctgagggattacttgctccaaagggagatgtacaaggtgcatgagaaaaatcgatcttacacctggctggagaagcaacatggtccatacggcgcaggtgcctttttcatcctgaagcagggaggcgcagtcaagtttcgagacaaggagtggatcaggccagataagtatggccatttctctcaggagttctggaatttctgtgaagtgcctgtcgaagctgtggatgccggtgactgtgacatcaactacgagggcctggataacctcctccgcctgaaggagctccagtccttgtcgctgcagcgctgctgccacgtggacgactggtgtctcagccgcctctacccactggccgactcgttgcaggagctctcgctggccggttgcccccgcatctccgaacggggcctcgcctgcctccaccacctccagaacctccgcaggctggacatctcggacctccctgccgtgtccaaccctggcctcactcagatattggtggaggagatgctgcccaattgcgaggttgtgggagtcgactgggctgagggcctgaagtcagggccggaggagcagcctcgggacacagccagccctgtccctgcctagcctttagccctgtccccactcacgtggcttctcagcgggctgcatggaatgtctggtagctcaccacacttctggcttccatttgtcttcactcaacgtcagggtgggggagtggtgctggccaatcacaggagagagcgtgagttcccagtatttattcctggctgcccttggctaaaggtcacagctcctgtcaccctgtcaggcagccctttccatgcccctgttcaggcctggggaggtaaaggctcaggctgttagtagccgcagagagccacactcaccttgtcaggagactcttctcaaactgtccttatgtgagtgcactgccatttcttgcagggaccctgactgacacaggggctactactgacactttacagggatggttctcccccgtgcagggccgctgtgcccactgcaggacatgcagcatccttcgccccactccactcactaaaggccagcgcaccccaggccccatagtattgctggttatggatttattgactttatgttccaaattcagctttttcagttggctgttttttgaaaggggataagctttgtcagtagagggcaccgaacaggcattataggaggaaaggcgcctccttcgtggttcttgttggttgtgcttctgcctctggacgccgcagtgcatgtggcttccccagcacccagctcctgaagcaccaggcggtcagcagctgcccttggcaccctccagccctcagaagttgcgtaggagacacagcgcctccactgaggcacctctctgggaataacgttccccagcaccccaaatggatttccagtcaattcagaagcattttaccagtgaagccctcattattccagttcactgttaaagccagtaattctctatattaaactttccctgttcggttataatccgggccgagctcgatg

SEQ ID NO: 433324 - DNA, 1702 bp, Homo sapiens
gaggatgtgggatttggtcttagaagaccgaagatgaattccctgcgcctggtcgcccccatgtggaatgggcgtatcaggggcatccatcgcctgggtgcggcagtggccccagagggcaatcagaagaagaaaaggacaatactccagttcctgaccaactatttctacgatgtggaggctctgagggattacttgctccaaagggagatgtacaaggtgcatgagaaaaatcgatcttacacctggctggagaagcaacatggtccatacggcgcaggtgcctttttcatcctgaagcagggaggcgcagtcaagtttcgagacaaggagtggatcaggccagataagtatggccatttctctcaggagttctggaatttctgtgaagtgcctgtcgaagctgtggatgccggtgactgtgacatcaactacgagggcctggataacctcctccgcctgaaggagctccagtccttgtcgctgcagcgctgctgccacgtggacgactggtgtctcagccgcctctacccactggccgactcgttgcaggagctctcgctggccggttgcccccgcatctccgaacggggcctcgcctgcctccaccacctccagaacctccgcaggctggacatctcggacctccctgccgtgtccaaccctggcctcactcagatattggtggaggagatgctgcccaattgcgaggttgtgggagtcgactgggctgagggcctgaagtcagggccggaggagcagcctcgggacacagccagccctgtccctgcctagcctttagccctgtccccactcacgtggcttctcagcgggctgcatggaatgtctggtagctcaccacacttctggcttccatttgtcttcactcaacgtcagggtgggggagtggtgctggccaatcacaggagagagcgtgagttcccagtatttattcctggctgcccttggctaaaggtcacagctcctgtcaccctgtcaggcagccctttccatgcccctgttcaggcctggggaggtaaaggctcaggctgttagtagccgcagagagccacactcaccttgtcaggagactcttctcaaactgtccttatgtgagtgcactgccatttcttgcagggaccctgactgacacaggggctactactgacactttacagggatggttctcccccgtgcagggccgctgtgcccactgcaggacatgcagcatccttcgccccactccactcactaaaggccagcgcaccccaggccccatagtattgctggttatggatttattgactttatgttccaaattcagctttttcagttggctgttttttgaaaggggataagctttgtcagtagagggcaccgaacaggcattataggaggaaaggcgcctccttcgtggttcttgttggttgtgcttctgcctctggacgccgcagtgcatgtggcttccccagcacccagctcctgaagcaccaggcggtcagcagctgcccttggcaccctccagccctcagaagttgcgtaggagacacagcgcctccactgaggcacctctctgggaataacgttccccagcaccccaaatggatttccagtcaattcagaagcattttaccagtgaagccctcattattccagttcactgttaaagccagtaattctctatattaaactttccctgttc

SEQ ID NO: 433325 - DNA, 1703 bp, Homo sapiens
  misc_feature (34)..(34): n is a, c, g, or t
  misc_feature (36)..(36): n is a, c, g, or t
  misc_feature (38)..(38): n is a, c, g, or t
acagaacgtactacggcttaggtacgaggctggngntntgtccctgcgcctggtcgcccccatgtggaatgggcgtatcaggggcatccatcgcctgggtgcggcagtggccccagagggcaatcagaagaagaaaaggacaatactccagttcctgaccaactatttctacgatgtggaggctctgagggattacttgctccaaagggagatgtacaaggtgcatgagaaaaatcgatcttacacctggctggagaagcaacatggtccatacggcgcaggtgcctttttcatcctgaagcagggaggcgcagtcaagtttcgagacaaggagtggatcaggccagataagtatggccatttctctcaggagttctggaatttctgtgaagtgcctgtcgaagctgtggatgccggtgactgtgacatcaactacgagggcctggataacctcctccgcctgaaggagctccagtccttgtcgctgcagcgctgctgccacgtggacgactggtgtctcagccgcctctacccactggccgactcgttgcaggagctctcgctggccggttgcccccgcatctccgaacggggcctcgcctgcctccaccacctccagaacctccgcaggctggacatctcggacctccctgccgtgtccaaccctggcctcactcagatattggtggaggagatgctgcccaattgcgaggttgtgggagtcgactgggctgagggcctgaagtcagggccggaggagcagcctcgggacacagccagccctgtccctgcctagcctttagccctgtccccactcacgtggcttctcagcgggctgcatggaatgtctggtagctcaccacacttctggcttccatttgtcttcactcaacgtcagggtgggggagtggtgctggccaatcacaggagagagcgtgagttcccagtatttattcctggctgcccttggctaaaggtcacagctcctgtcaccctgtcaggcagccctttccatgcccctgttcaggcctggggaggtaaaggctcaggctgttagtagccgcagagagccacactcaccttgtcaggagactcttctcaaactgtccttatgtgagtgcactgccatttcttgcagggaccctgactgacacaggggctactactgacactttacagggatggttctcccccgtgcagggccgctgtgcccactgcaggacatgcagcatccttcgccccactccactcactaaaggccagcgcaccccaggccccatagtattgctggttatggatttattgactttatgttccaaattcagctttttcagttggctgttttttgaaaggggataagctttgtcagtagagggcaccgaacaggcattataggaggaaaggcgcctccttcgtggttcttgttggttgtgcttctgcctctggacgccgcagtgcatgtggcttccccagcacccagctcctgaagcaccaggcggtcagcagctgcccttggcaccctccagccctcagaagttgcgtaggagacacagcgcctccactgaggcacctctctgggaataacgttccccagcaccccaaatggatttccagtcaattcagaagcattttaccagtgaagccctcattattccagttcactgttaaagccagtaattctctatattaaactttccctgttc

SEQ ID NO: 433326 - DNA, 1641 bp, Homo sapiens
  misc_feature (18)..(18): n is a, c, g, or t
tccgaagagaagacggangtacggctaggtacgaggctgggttggcggctccctgggcgtccctgcgcctggtcgcccccatgtggaatgggcgtatcaggggcatccatcgcctgggtgcggcagtggccccagagggcaatcagaagaagaaaaggacaatactccagttcctgaccaactatttctacgatgtggaggctctgagggattacttgctccaaagggagatgtacaaggtgcatgagaaaaatcggtttcgagacaaggagtggatcaggccagataagtatggccatttctctcaggagttctggaatttctgtgaagtgcctgtcgaagctgtggatgccggtgactgtgacatcaactacgagggcctggataacctcctccgcctgaaggagctccagtccttgtcgctgcagcgctgctgccacgtggacgactggtgtctcagccgcctctacccactggccgactcgttgcaggagctctcgctggccggttgcccccgcatctccgaacggggcctcgcctgcctccaccacctccagaacctccgcaggctggacatctcggacctccctgccgtgtccaaccctggcctcactcagatattggtggaggagatgctgcccaattgcgaggttgtgggagtcgactgggctgagggcctgaagtcagggccggaggagcagcctcgggacacagccagccctgtccctgcctagcctttagccctgtccccactcacgtggcttctcagcgggctgcatggaatgtctggtagctcaccacacttctggcttccatttgtcttcactcaacgtcagggtgggggagtggtgctggccaatcacaggagagagcgtgagttcccagtatttattcctggctgcccttggctaaaggtcacagctcctgtcaccctgtcaggcagccctttccatgcccctgttcaggcctggggaggtaaaggctcaggctgttagtagccgcagagagccacactcaccttgtcaggagactcttctcaaactgtccttatgtgagtgcactgccatttcttgcagggaccctgactgacacaggggctactactgacactttacagggatggttctcccccgtgcagggccgctgtgcccactgcaggacatgcagcatccttcgccccactccactcactaaaggccagcgcaccccaggccccatagtattgctggttatggatttattgactttatgttccaaattcagctttttcagttggctgttttttgaaaggggataagctttgtcagtagagggcaccgaacaggcattataggaggaaaggcgcctccttcgtggttcttgttggttgtgcttctgcctctggacgccgcagtgcatgtggcttccccagcacccagctcctgaagcaccaggcggtcagcagctgcccttggcaccctccagccctcagaagttgcgtaggagacacagcgcctccactgaggcacctctctgggaataacgttccccagcaccccaaatggatttccagtcaattcagaagcattttaccagtgaagccctcattattccagttcactgttaaagccagtaattctctatattaaactttccctgttc

SEQ ID NO: 433327 - DNA, 1557 bp, Homo sapiens
gataagaccggccccttccggttacgaaaccttagcaagatggcggctccctgggcgtccctgcgcctggtcgcccccatgtggaatgggcgtatcaggggcatccatcgcctgggtgcggcagtggccccagagggcaatcagaagaagaaaaggacaatactccagttcctgaccaactatttctacgatgtggaggctctgagggattacttgctccaaagggagatgtacaaggtgcatgagaaaaatcgatcttacacctggctggagaagcaacatggtccatacggcgcaggtgcctttttcatcctgaagcagggaggcgcagtcaagtttcgagacaaggagtggatcaggccagataagtatggccatttctctcaggagttctggaatttctgtgaagtgcctgtcgaagctgtggatgccggtgactgtgacatcaactacgagggcctggataacctccgaacctccgcaggctggacatctcggacctccctgccgtgtccaaccctggcctcactcagatattggtggaggagatgctgcccaattgcgaggttgtgggagtcgactgggctgagggcctgaagtcagggccggaggagcagcctcgggacacagccagccctgtccctgcctagcctttagccctgtccccactcacgtggcttctcagcgggctgcatggaatgtctggtagctcaccacacttctggcttccatttgtcttcactcaacgtcagggtgggggagtggtgctggccaatcacaggagagagcgtgagttcccagtatttattcctggctgcccttggctaaaggtcacagctcctgtcaccctgtcaggcagccctttccatgcccctgttcaggcctggggaggtaaaggctcaggctgttagtagccgcagagagccacactcaccttgtcaggagactcttctcaaactgtccttatgtgagtgcactgccatttcttgcagggaccctgactgacacaggggctactactgacactttacagggatggttctcccccgtgcagggccgctgtgcccactgcaggacatgcagcatccttcgccccactccactcactaaaggccagcgcaccccaggccccatagtattgctggttatggatttattgactttatgttccaaattcagctttttcagttggctgttttttgaaaggggataagctttgtcagtagagggcaccgaacaggcattataggaggaaaggcgcctccttcgtggttcttgttggttgtgcttctgcctctggacgccgcagtgcatgtggcttccccagcacccagctcctgaagcaccaggcggtcagcagctgcccttggcaccctccagccctcagaagttgcgtaggagacacagcgcctccactgaggcacctctctgggaataacgttccccagcaccccaaatggatttccagtcaattcagaagcattttaccagtgaagccctcattattccagttcactgttaaagccagtaattctctatattaaactttccctgttc

SEQ ID NO: 433328 - DNA, 1643 bp, Homo sapiens
gagacgaggtctcactatgttgcccaggctggtctcaaactcctgaactcaagtgattctcctgcctcagcctcccaaagtgctgggattacaggcgtgagccactgcgcacagccagatggagtctttttctaagatggaattagttatgtcaagggtgacctatacatattatatagggctggggaaggttctgaagaggctggaggcctggggcaggttcaggtgccctgctgacactccctttcccgtttccaggtttcgagacaaggagtggatcaggccagataagtatggccatttctctcaggagttctggaatttctgtgaagtgcctgtcgaagctgtggatgccggtgactgtgacatcaactacgagggcctggataacctcctccgcctgaaggagctccagtccttgtcgctgcagcgctgctgccacgtggacgactggtgtctcagccgcctctacccactggccgactcgttgcaggagctctcgctggccggttgcccccgcatctccgaacggggcctcgcctgcctccaccacctccagaacctccgcaggctggacatctcggacctccctgccgtgtccaaccctggcctcactcagatattggtggaggagatgctgcccaattgcgaggttgtgggagtcgactgggctgagggcctgaagtcagggccggaggagcagcctcgggacacagccagccctgtccctgcctagcctttagccctgtccccactcacgtggcttctcagcgggctgcatggaatgtctggtagctcaccacacttctggcttccatttgtcttcactcaacgtcagggtgggggagtggtgctggccaatcacaggagagagcgtgagttcccagtatttattcctggctgcccttggctaaaggtcacagctcctgtcaccctgtcaggcagccctttccatgcccctgttcaggcctggggaggtaaaggctcaggctgttagtagccgcagagagccacactcaccttgtcaggagactcttctcaaactgtccttatgtgagtgcactgccatttcttgcagggaccctgactgacacaggggctactactgacactttacagggatggttctcccccgtgcagggccgctgtgcccactgcaggacatgcagcatccttcgccccactccactcactaaaggccagcgcaccccaggccccatagtattgctggttatggatttattgactttatgttccaaattcagctttttcagttggctgttttttgaaaggggataagctttgtcagtagagggcaccgaacaggcattataggaggaaaggcgcctccttcgtggttcttgttggttgtgcttctgcctctggacgccgcagtgcatgtggcttccccagcacccagctcctgaagcaccaggcggtcagcagctgcccttggcaccctccagccctcagaagttgcgtaggagacacagcgcctccactgaggcacctctctgggaataacgttccccagcaccccaaatggatttccagtcaattcagaagcattttaccagtgaagccctcattattccagttcactgttaaagccagtaattctctatattaaactttccctgttc

SEQ ID NO: 433329 - DNA, 1464 bp, Homo sapiens
tctgtctccacgctacttggaggctgaggtgccaggatcatttgagcctcaggagttcgatgaccaacctgggcagacatagtgagattctgtgaacaaaaccataaaataaaaatagagaaccatattccaaataaccatgaaacaaaataataactacaatatgaaaagacatacatagaagaggataacattgaatcacaaaagggagaatgatacaaaggatgcatgagaaaaatcaggtttcgagacaaggagtggatcaggccagataagtatggccatttctctcaggagttctggaatttctgtgaagtgcctgtcgaagctgtggatgccggtgactgtgacatcaactacgagggcctggataacctccgaacctccgcaggctggacatctcggacctccctgccgtgtccaaccctggcctcactcagatattggtggaggagatgctgcccaattgcgaggttgtgggagtcgactgggctgagggcctgaagtcagggccggaggagcagcctcgggacacagccagccctgtccctgcctagcctttagccctgtccccactcacgtggcttctcagcgggctgcatggaatgtctggtagctcaccacacttctggcttccatttgtcttcactcaacgtcagggtgggggagtggtgctggccaatcacaggagagagcgtgagttcccagtatttattcctggctgcccttggctaaaggtcacagctcctgtcaccctgtcaggcagccctttccatgcccctgttcaggcctggggaggtaaaggctcaggctgttagtagccgcagagagccacactcaccttgtcaggagactcttctcaaactgtccttatgtgagtgcactgccatttcttgcagggaccctgactgacacaggggctactactgacactttacagggatggttctcccccgtgcagggccgctgtgcccactgcaggacatgcagcatccttcgccccactccactcactaaaggccagcgcaccccaggccccatagtattgctggttatggatttattgactttatgttccaaattcagctttttcagttggctgttttttgaaaggggataagctttgtcagtagagggcaccgaacaggcattataggaggaaaggcgcctccttcgtggttcttgttggttgtgcttctgcctctggacgccgcagtgcatgtggcttccccagcacccagctcctgaagcaccaggcggtcagcagctgcccttggcaccctccagccctcagaagttgcgtaggagacacagcgcctccactgaggcacctctctgggaataacgttccccagcaccccaaatggatttccagtcaattcagaagcattttaccagtgaagccctcattattccagttcactgttaaagccagtaattctctatattaaactttccctgttc

SEQ ID NO: 433330 - DNA, 1343 bp, Homo sapiens
cacacacacacacgctgtcctgtacctccctacacacacacacacacatgctgtccttacactggcttacctccctatacacacacacacacacacacgcacacactgtcctgtacctccctatacacacacacgctgtccttacactggcttacctgcctatacacacacacacacgcacacgctgtcctgtacctccctacacacacacacatgctgtccttacactggcttcctgtccttctcaccccttttcaggaacctccgcaggctggacatctcggacctccctgccgtgtccaaccctggcctcactcagatattggtggaggagatgctgcccaattgcgaggttgtgggagtcgactgggctgagggcctgaagtcagggccggaggagcagcctcgggacacagccagccctgtccctgcctagcctttagccctgtccccactcacgtggcttctcagcgggctgcatggaatgtctggtagctcaccacacttctggcttccatttgtcttcactcaacgtcagggtgggggagtggtgctggccaatcacaggagagagcgtgagttcccagtatttattcctggctgcccttggctaaaggtcacagctcctgtcaccctgtcaggcagccctttccatgcccctgttcaggcctggggaggtaaaggctcaggctgttagtagccgcagagagccacactcaccttgtcaggagactcttctcaaactgtccttatgtgagtgcactgccatttcttgcagggaccctgactgacacaggggctactactgacactttacagggatggttctcccccgtgcagggccgctgtgcccactgcaggacatgcagcatccttcgccccactccactcactaaaggccagcgcaccccaggccccatagtattgctggttatggatttattgactttatgttccaaattcagctttttcagttggctgttttttgaaaggggataagctttgtcagtagagggcaccgaacaggcattataggaggaaaggcgcctccttcgtggttcttgttggttgtgcttctgcctctggacgccgcagtgcatgtggcttccccagcacccagctcctgaagcaccaggcggtcagcagctgcccttggcaccctccagccctcagaagttgcgtaggagacacagcgcctccactgaggcacctctctgggaataacgttccccagcaccccaaatggatttccagtcaattcagaagcattttaccagtgaagccctcattattccagttcactgttaaagccagtaattctctatattaaactttccctgttc

SEQ ID NO: 433331 - DNA, 1912 bp, Homo sapiens
acaggctggtacgcccggaatgtatggataaccttagcaagatggcggctccctgggcgtccctgcgcctggtcgcccccatgtggaatgggcgtatcaggggcatccatcgcctgggtgcggcagtggccccagagggcaatcagaagaagaaaaggacaatactccagttcctgaccaactatttctacgatgtggaggctctgagggattacttgctccaaagggagatgtacaaggtgcatgagaaaaatcgatcttacacctggctggagaagcaacatggtccatacggcgcaggtgcctttttcatcctgaagcagggaggcgcagtcaagtttcgagacaaggagtggatcaggccagataagtatggccatttctctcaggagttctggaatttctgtgaagtgcctgtcgaagctgtggatgccggtgactgtgacatcaactacgagggcctggataacctcctccgcctgaaggagctccagtccttgtcgctgcagcgctgctgccacgtggacgactggtgtctcagccgcctctacccactggccgactcgttgcaggagctctcgctggccggttgcccccgcatctccgaacggggcctcgcctgcctccaccacctccagaacctccgcaggctggacatctcggacctccctgccgtgtccaaccctggcctcactcagatattggtggaggagatgctgcccaattgcgaggttgtgggagtcgactgggctgagggcctgaagtcagggccggaggagcagcctcgggacacagccagccctgtccctgcctagcctttagccctgtccccactcacgtggcttctcagcgggctgcatggaatgtctggtagctcaccacacttctggcttccatttgtcttcactcaacgtcagggtgggggagtggtgctggccaatcacaggagagagcgtgagttcccagtatttattcctggctgcccttggctaaaggtcacagctcctgtcaccctgtcaggcagccctttccatgcccctgttcaggcctggggaggtaaaggctcaggctgttagtagccgcagagagccacactcaccttgtcaggagactcttctcaaactgtccttatgtgagtgcactgccatttcttgcagggaccctgactgacacaggggctactactgacactttacagggatggttctcccccgtgcagggccgctgtgcccactgcaggacatgcagcatccttcgccccactccactcactaaaggccagcgcaccccaggccccatagtattgctggttatggatttattgactttatgttccaaattcagctttttcagttggctgttttttgaaaggggataagctttgtcagtagagggcaccgaacaggcattataggaggaaaggcgcctccttcgtggttcttgttggttgtgcttctgcctctggacgccgcagtgcatgtggcttccccagcacccagctcctgaagcaccaggcggtcagcagctgcccttggcaccctccagccctcagaagttgcgtaggagacacagcgcctccactgaggcacctctctgggaataacgttccccagcaccccaaatggatttccagtcaattcagaagcattttaccagtgaagccctcattattccagttcactgttaaagccagtaattctctatattaaactttccctgttcggtttatactccggagtataaaccgaacaggctatcagcacccctactagttctaaccacatgactcctcccccttatactaatagctagccaatcccacctatcaaaagaaaccacaacccgaaaaaaactatatattaccatactaatcctactacaactattcctaattataaccttcaccgccacc

SEQ ID NO: 433332 - DNA, 1955 bp, Homo sapiens
acaggctggtacgcccggaatgtatggataaccttagcaagatggcggctccctgggcgtccctgcgcctggtcgcccccatgtggaatgggcgtatcaggggcatccatcgcctgggtgcggcagtggccccagagggcaatcagaagaagaaaaggacaatactccagttcctgaccaactatttctacgatgtggaggctctgagggattacttgctccaaagggagatgtacaaggtgcatgagaaaaatcgatcttacacctggctggagaagcaacatggtccatacggcgcaggtgcctttttcatcctgaagcagggaggcgcagtcaagtttcgagacaaggagtggatcaggccagataagtatggccatttctctcaggagttctggaatttctgtgaagtgcctgtcgaagctgtggatgccggtgactgtgacatcaactacgagggcctggataacctcctccgcctgaaggagctccagtccttgtcgctgcagcgctgctgccacgtggacgactggtgtctcagccgcctctacccactggccgactcgttgcaggagctctcgctggccggttgcccccgcatctccgaacggggcctcgcctgcctccaccacctccagaacctccgcaggctggacatctcggacctccctgccgtgtccaaccctggcctcactcagatattggtggaggagatgctgcccaattgcgaggttgtgggagtcgactgggctgagggcctgaagtcagggccggaggagcagcctcgggacacagccagccctgtccctgcctagcctttagccctgtccccactcacgtggcttctcagcgggctgcatggaatgtctggtagctcaccacacttctggcttccatttgtcttcactcaacgtcagggtgggggagtggtgctggccaatcacaggagagagcgtgagttcccagtatttattcctggctgcccttggctaaaggtcacagctcctgtcaccctgtcaggcagccctttccatgcccctgttcaggcctggggaggtaaaggctcaggctgttagtagccgcagagagccacactcaccttgtcaggagactcttctcaaactgtccttatgtgagtgcactgccatttcttgcagggaccctgactgacacaggggctactactgacactttacagggatggttctcccccgtgcagggccgctgtgcccactgcaggacatgcagcatccttcgccccactccactcactaaaggccagcgcaccccaggccccatagtattgctggttatggatttattgactttatgttccaaattcagctttttcagttggctgttttttgaaaggggataagctttgtcagtagagggcaccgaacaggcattataggaggaaaggcgcctccttcgtggttcttgttggttgtgcttctgcctctggacgccgcagtgcatgtggcttccccagcacccagctcctgaagcaccaggcggtcagcagctgcccttggcaccctccagccctcagaagttgcgtaggagacacagcgcctccactgaggcacctctctgggaataacgttccccagcaccccaaatggatttccagtcaattcagaagcattttaccagtgaagccctcattattccagttcactgttaaagccagtaattctctatattaaactttccctgttcggtttatactccggagtataaaccgaacaggggtggccaagctgctgtgggccgccgccgtgcagaaccgctggaactcacgcttggggcgacggctacagttggattttgcccctgcaggcaggttcggtgtcgatactggcgttgatagcgctgctgccgtttgacgtggcgaatatgggcttgtttctcggcctgatcgccgtgttgtcgtagttcgcagccacccagga

SEQ ID NO: 433333 - DNA, 1834 bp, Homo sapiens
acaggctggtacgcccggaatgtatggataaccttagcaagatggcggctccctgggcgtccctgcgcctggtcgcccccatgtggaatgggcgtatcaggggcatccatcgcctgggtgcggcagtggccccagagggcaatcagaagaagaaaaggacaatactccagttcctgaccaactatttctacgatgtggaggctctgagggattacttgctccaaagggagatgtacaaggtgcatgagaaaaatcgatcttacacctggctggagaagcaacatggtccatacggcgcaggtgcctttttcatcctgaagcagggaggcgcagtcaagtttcgagacaaggagtggatcaggccagataagtatggccatttctctcaggagttctggaatttctgtgaagtgcctgtcgaagctgtggatgccggtgactgtgacatcaactacgagggcctggataacctcctccgcctgaaggagctccagtccttgtcgctgcagcgctgctgccacgtggacgactggtgtctcagccgcctctacccactggccgactcgttgcaggagctctcgctggccggttgcccccgcatctccgaacggggcctcgcctgcctccaccacctccagaacctccgcaggctggacatctcggacctccctgccgtgtccaaccctggcctcactcagatattggtggaggagatgctgcccaattgcgaggttgtgggagtcgactgggctgagggcctgaagtcagggccggaggagcagcctcgggacacagccagccctgtccctgcctagcctttagccctgtccccactcacgtggcttctcagcgggctgcatggaatgtctggtagctcaccacacttctggcttccatttgtcttcactcaacgtcagggtgggggagtggtgctggccaatcacaggagagagcgtgagttcccagtatttattcctggctgcccttggctaaaggtcacagctcctgtcaccctgtcaggcagccctttccatgcccctgttcaggcctggggaggtaaaggctcaggctgttagtagccgcagagagccacactcaccttgtcaggagactcttctcaaactgtccttatgtgagtgcactgccatttcttgcagggaccctgactgacacaggggctactactgacactttacagggatggttctcccccgtgcagggccgctgtgcccactgcaggacatgcagcatccttcgccccactccactcactaaaggccagcgcaccccaggccccatagtattgctggttatggatttattgactttatgttccaaattcagctttttcagttggctgttttttgaaaggggataagctttgtcagtagagggcaccgaacaggcattataggaggaaaggcgcctccttcgtggttcttgttggttgtgcttctgcctctggacgccgcagtgcatgtggcttccccagcacccagctcctgaagcaccaggcggtcagcagctgcccttggcaccctccagccctcagaagttgcgtaggagacacagcgcctccactgaggcacctctctgggaataacgttccccagcaccccaaatggatttccagtcaattcagaagcattttaccagtgaagccctcattattccagttcactgttaaagccagtaattctctatattaaactttccctgttcggtttatactccggagtataaaccgaacaggcctgccatagaaaatgcaaccacagaaataaaatggattgctttttttccctgtagtgaaaatacatttaaatctatctca

SEQ ID NO: 433334 - DNA, 789 bp, Homo sapiens
tgcgcggtgctctagaggatctcccgggagccttacctccgggagccttaacctccgggagccttaacctccggagccttaacctccgggaccctttccatgcccctgttcaggcctggggaggtaaaggctcaggctgttagtagccgcagagagccacactcaccttgtcaggagactcttctcaaactgtccttatgtgagtgcactgccatttcttgcagggaccctgactgacacaggggctactactgacactttacagggatggttctcccccgtgcagggccgctgtgcccactgcaggacatgcagcatccttcgccccactccactcactaaaggccagcgcaccccaggccccatagtattgctggttatggatttattgactttatgttccaaattcagctttttcagttggctgttttttgaaaggggataagctttgtcagtagagggcaccgaacaggcattataggaggaaaggcgcctccttcgtggttcttgttggttgtgcttctgcctctggacgccgcagtgcatgtggcttccccagcacccagctcctgaagcaccaggcggtcagcagctgcccttggcaccctccagccctcagaagttgcgtaggagacacagcgcctccactgaggcacctctctgggaataacgttccccagcaccccaaatggatttccagtcaattcagaagcattttaccagtgaagccctcattattccagttcactgttaaagccagtaattctctatattaaactttccctgttc

SEQ ID NO: 433335 - DNA, 560 bp, Homo sapiens
caggatgcatggtcatccctggccactgcagtagggttaaggatcagtgttgtcgcatgggttgcagctgaaacttggattcaatccctggcccagagatttccataggccaggtatgcagacattaaaaggaaaagaaaagaaatctgcacagagagagaaaccagaggaacgcaggagcctgttcggtttatactccggagtataaaccgaacaggcattataggaggaaaggcgcctccttcgtggttcttgttggttgtgcttctgcctctggacgccgcagtgcatgtggcttccccagcacccagctcctgaagcaccaggcggtcagcagctgcccttggcaccctccagccctcagaagttgcgtaggagacacagcgcctccactgaggcacctctctgggaataacgttccccagcaccccaaatggatttccagtcaattcagaagcattttaccagtgaagccctcattattccagttcactgttaaagccagtaattctctatattaaactttccctgttcggttataatccgggccgagctcgatg

SEQ ID NO: 433336 - DNA, 1596 bp, Homo sapiens
acaggctggtacgcccggaatgtatggataaccttagcaagatggcggctccctgggcgtccctgcgcctggtcgcccccatgtggaatgggcgtatcaggggcatccatcgcctgggtgcggcagtggccccagagggcaatcagaagaagaaaaggacaatactccagttcctgaccaactatttctacgatgtggaggctctgagggattacttgctccaaagggagatgtacaaggtgcatgagaaaaatcgatcttacacctggctggagaagcaacatggtccatacggcgcaggtgcctttttcatcctgaagcagggaggcgcagtcaagtttcgagacaaggagtggatcaggccagataagtatggccatttctctcaggagttctggaatttctgtgaagtgcctgtcgaagctgtggatgccggtgactgtgacatcaactacgagggcctggataacctcctccgcctgaaggagctccagtccttgtcgctgcagcgctgctgccacgtggacgactggtgtctcagccgcctctacccactggccgactcgttgcaggagctctcgctggccggttgcccccgcatctccgaacggggcctcgcctgcctccaccacctccagaacctccgcaggctggacatctcggacctccctgccgtgtccaaccctggcctcactcagatattggtggaggagatgctgcccaattgcgaggttgtgggagtcgactgggctgagggcctgaagtcagggccggaggagcagcctcgggacacagccagccctgtccctgcctagcctttagccctgtccccactcacgtggcttctcagcgggctgcatggaatgtctggtagctcaccacacttctggcttccatttgtcttcactcaacgtcagggtgggggagtggtgctggccaatcacaggagagagcgtgagttcccagtatttattcctggctgcccttggctaaaggtcacagctcctgtcaccctgtcaggcagccctttccatgcccctgttcaggcctggggaggtaaaggctcaggctgttagtagccgcagagagccacactcaccttgtcaggagactcttctcaaactgtccttatgtgagtgcactgccatttcttgcagggaccctgactgacacaggggctactactgacactttacagggatggttctcccccgtgcagggccgctgtgcccactgcaggacatgcagcatccttcgccccactccactcactaaaggccagcgcaccccaggccccatagtattgctggttatggatttattgactttatgttccaaattcagctttttcagttggctgttttttgaaaggggataagctttgtcagtagagggcaccgaacaggcattataggaggaaaggcgcctccttcgtggttcttgttgcgcctccactgaggcacctctctgggaataacgttccccagcaccccaaatggatttccagtcaattcagaagcattttaccagtgaagccctcattattccagttcactgttaaagccagtaattctctatattaaactttccctgttc

SEQ ID NO: 433337 - DNA, 1330 bp, Homo sapiens
acaggctggtacgcccggaatgtatggataaccttagcaagatggcggctccctgggcgtccctgcgcctggtcgcccccatgtggaatgggcgtatcaggggcatccatcgcctgggtgcggcagtggccccagagggcaatcagaagaagaaaaggacaatactccagttcctgaccaactatttctacgatgtggaggctctgagggattacttgctccaaagggagatgtacaaggtgcatgagaaaaatcgatcttacacctggctggagaagcaacatggtccatacggcgcaggtgcctttttcatcctgaagcagggaggcgcagtcaagtttcgagacaaggagtggatcaggccagataagtatggccatttctctcaggagttctggaatttctgtgaagtgcctgtcgaagctgtggatgccggtgactgtgacatcaactacgagggcctggataacctcctccgcctgaaggagctccagtccttgtcgctgcagcgctgctgccacgtggacgactggtgtctcagccgcctctacccactggccgactcgttgcaggagctctcgctggccggttgcccccgcatctccgaacggggcctcgcctgcctccaccacctccagaacctccgcaggctggacatctcggacctccctgccgtgtccaaccctggcctcactcagatattggtggaggagatgctgcccaattgcgaggttgtgggagtcgactgggctgagggcctgaagtcagggccggaggagcagcctcgggacacagccagccctgtccctgcctagcctttagccctgtccccactcacgtggcttctcagcgggctgcatggaatgtctggtagctcaccacacttctggcttccatttgtcttcactcaacgtcagggtgggggagtggtgctggccaatcacaggagagagcgtgagttcccagtatttattcctggctgcccttggctaaaggtcacagctcctgtcaccctgtcaggcagccctttccatgcccctgttcaggcctggggaggtaaaggctcaggctgttagtagccgcagagagccacactcaccttgtcaggagactcttctcaaactgtccttatgtgagtgcactgccatttcttgcagggaccctgactgacacaggggctactactgacactttacagggatggttctcccccgtgcagggccgctgtgcccactgcaggacatgcagcatccttcgccccactccactcactaaatccataaccagcaatactatggggcctgctagttctagatcgcgagcggccgct

SEQ ID NO: 433338 - DNA, 1257 bp, Homo sapiens
acaggctggtacgcccggaatgtatggataaccttagcaagatggcggctccctgggcgtccctgcgcctggtcgcccccatgtggaatgggcgtatcaggggcatccatcgcctgggtgcggcagtggccccagagggcaatcagaagaagaaaaggacaatactccagttcctgaccaactatttctacgatgtggaggctctgagggattacttgctccaaagggagatgtacaaggtgcatgagaaaaatcgatcttacacctggctggagaagcaacatggtccatacggcgcaggtgcctttttcatcctgaagcagggaggcgcagtcaagtttcgagacaaggagtggatcaggccagataagtatggccatttctctcaggagttctggaatttctgtgaagtgcctgtcgaagctgtggatgccggtgactgtgacatcaactacgagggcctggataacctcctccgcctgaaggagctccagtccttgtcgctgcagcgctgctgccacgtggacgactggtgtctcagccgcctctacccactggccgactcgttgcaggagctctcgctggccggttgcccccgcatctccgaacggggcctcgcctgcctccaccacctccagaacctccgcaggctggacatctcggacctccctgccgtgtccaaccctggcctcactcagatattggtggaggagatgctgcccaattgcgaggttgtgggagtcgactgggctgagggcctgaagtcagggccggaggagcagcctcgggacacagccagccctgtccctgcctagcctttagccctgtccccactcacgtggcttctcagcgggctgcatggaatgtctggtagctcaccacacttctggcttccatttgtcttcactcaacgtcagggtgggggagtggtgctggccaatcacaggagagagcgtgagttcccagtatttattcctggctgcccttggctaaaggtcacagctcctgtcaccctgtcaggcagccctttccatgcccctgttcaggcctggggaggtaaaggctcaggctgttagtagccgcagagagccacactcaccttgtcaggagactcttctcaaactgtccttatgtgagtgcactgccatttcttgcagggaccctgactgacacaggggctactactgacactttacagggatagtccccactacccacatgcatgcacccataagcatcctgctagatcacccactt

SEQ ID NO: 433339 - DNA, 833 bp, Homo sapiens
acaggctggtacgcccggaatgtatggataaccttagcaagatggcggctccctgggcgtccctgcgcctggtcgcccccatgtggaatgggcgtatcaggggcatccatcgcctgggtgcggcagtggccccagagggcaatcagaagaagaaaaggacaatactccagttcctgaccaactatttctacgatgtggaggctctgagggattacttgctccaaagggagatgtacaaggtgcatgagaaaaatcgatcttacacctggctggagaagcaacatggtccatacggcgcaggtgcctttttcatcctgaagcagggaggcgcagtcaagtttcgagacaaggagtggatcaggccagataagtatggccatttctctcaggagttctggaatttctgtgaagtgcctgtcgaagctgtggatgccggtgactgtgacatcaactacgagggcctggataacctcctccgcctgaaggagctccagtccttgtcgctgcagcgctgctgccacgtggacgactggtgtctcagccgcctctacccactggccgactcgttgcaggagctctcgctggccggttgcccccgcatctccgaacggggcctcgcctgcctccaccacctccagtgagacctcagctcaggctgggccacatgcccaggcacctctcccacctaacccagatgcaggagaggaagtggggaggggcaatgttaggcagttctcatatccccctgcatccatcacaaacctagagtatttatggtagatgagcagtcacagtgagtctctggaagaattaaatgactcctggttttcttc

SEQ ID NO: 433340 - DNA, 814 bp, Homo sapiens
  misc_feature (34)..(34): n is a, c, g, or t
  misc_feature (36)..(36): n is a, c, g, or t
  misc_feature (38)..(38): n is a, c, g, or t
acagaacgtactacggcttaggtacgaggctggngntntgtccctgcgcctggtcgcccccatgtggaatgggcgtatcaggggcatccatcgcctgggtgcggcagtggccccagagggcaatcagaagaagaaaaggacaatactccagttcctgaccaactatttctacgatgtggaggctctgagggattacttgctccaaagggagatgtacaaggtgcatgagaaaaatcgatcttacacctggctggagaagcaacatggtccatacggcgcaggtgcctttttcatcctgaagcagggaggcgcagtcaagtttcgagacaaggagtggatcaggccagataagtatggccatttctctcaggagttctggaatttctgtgaagtgcctgtcgaagctgtggatgccggtgactgtgacatcaactacgagggcctggataacctcctccgcctgaaggagctccagtccttgtcgctgcagcgctgctgccacgtggacgactggtgtctcagccgcctctacccactggccgactcgttgcaggagctctcgctggccggttgcccccgcatctccgaacggggcctcgcctgcctccaccacctccagtgagacctcagctcaggctgggccacatgcccaggcacctctcccacctaacccagatgcaggagaggaagtggggaggggcaatgttaggcagttctcatatccccctgcatccatcacaaacctagagtatttatggtagatgagcagtcacagtgagtctctggaagaattaaatgactcctggttttcttc

SEQ ID NO: 433341 - DNA, 839 bp, Homo sapiens
  misc_feature (18)..(18): n is a, c, g, or t
  misc_feature (48)..(48): n is a, c, g, or t
tccgaagagaagacggangtacggctaggtacgaggctgggtttaaantcggccgaggctgggcgtccctgcgcctggtcgcccccatgtggaatgggcgtatcaggggcatccatcgcctgggtgcggcagtggccccagagggcaatcagaagaagaaaaggacaatactccagttcctgaccaactatttctacgatgtggaggctctgagggattacttgctccaaagggagatgtacaaggtgcatgagaaaaatcgatcttacacctggctggagaagcaacatggtccatacggcgcaggtgcctttttcatcctgaagcagggaggcgcagtcaagtttcgagacaaggagtggatcaggccagataagtatggccatttctctcaggagttctggaatttctgtgaagtgcctgtcgaagctgtggatgccggtgactgtgacatcaactacgagggcctggataacctcctccgcctgaaggagctccagtccttgtcgctgcagcgctgctgccacgtggacgactggtgtctcagccgcctctacccactggccgactcgttgcaggagctctcgctggccggttgcccccgcatctccgaacggggcctcgcctgcctccaccacctccagtgagacctcagctcaggctgggccacatgcccaggcacctctcccacctaacccagatgcaggagaggaagtggggaggggcaatgttaggcagttctcatatccccctgcatccatcacaaacctagagtatttatggtagatgagcagtcacagtgagtctctggaagaattaaatgactcctggttttcttc

SEQ ID NO: 433342 - DNA, 739 bp, Homo sapiens
tgagatggagtctcgctctgtcacccaggctggagtgcagtggcacgatctcggctcactgcaagctccgcctcccaggttcaaacaattctcctgcctcagcctcccaagaagctgggagtacaggcgcctgccaccatgctcagctaatttttttgtatttttagtagagatggggtttcaccgtgtattagccaggatggtttcgatctcctgacctcgtagtccgcccacctcggctcccaaagtgctgggattacaggcgtgagccaccgcacctggccaatttttgtattttttcatagagacgaggtctcactatgttgcccaggctggtctcaaactcctgaactcaagtgattctcctgcctcagcctcccaaagtgctgggattacaggcgtgagccactgcgcacagccagatggagtctttttctaagatggaattagttatgtcaagggtgacctatacatattatatagggctggggaaggttctgaagaggctggaggcctggggcaggttcaggtgccctgctgacactccctttcccgtttccaggtttcgagacaaggagtggatcaggccagataagtatggccatttctctcaggagttctggaatttctgtgaagtgcctgtcgaagctgtggatgccggtgactgtgacatcaactacgagggcctggataacctccgtgagtgcggtggggtggagatgggacaggcctctatgtt

SEQ ID NO: 433343 - DNA, 1471 bp, Homo sapiens
attatttgaagagcaattttagggcatcaagtatgacaataatcatgtgccctcttgctcctcttatttcaggagtgtgtgctatccctctctccaccagcttaatctttctcaccccaagtctaacaaagtctttacagaaacctctgtaggtgattgttgcagtcttccttggtttttgagtctttttaaacaagctcctaccctgcttctatccttttagagtaggagattaaaaataaacccaccccagtcaacctttagataagcactcttaaaaacaaatttgaagagcactcttcagccaagttcatttttattttgttgttgatgttttgagcatacatttaattgtaaggccttttggaaaagccctaaaagaataagatacaaccagaaatatttgagttttgttaaatgtactgaaatcttgtaatgaaaatccctttggccagaaatgagatttatttccatttatttttacatttaagtaacactcaaaacaaacaagtagtcacttaacctgccagttattattttcttgaaaatatacaagaaagtaaaaatatctctaatatataagttaaaggaaagttaagagactaagctagttttttcagtgaaagcaaagttggaaatattttgcttctctcagattattggaagacctagagctactggatgttaacctgaatcaagatgttcttttcacatttttttaaagggctagtatgttccagagtaggcaagtagtcattcaagccaaatgaaagagttaactggtccttgaggagtgttagcaaaatttaaattttgaccctggccatttgtactacagaagtgattatgggattaaaagaatacataattacagtgttttgggattgggctcttttttttcttaatagaaaagcagaaacttcataaataatagctgtgctttagataccagataacaaatattgtttcccctgaagatatgacctactagaactactcacatatatagtccaataattactgacttaataggtatggtaaaatagctgataataagtcagactctcaagagtttctgtaccttgattattgacaaattcattgttttacatcctactaaagaacatgtgtgtggggagggggtggggaactggttcacaacataatctgaaggagatcaaacatctgtaaggacaggtacccagtgatgataatatatctgaaaacacaagccatttttattctttatcccaattaacttgaggtactctaatgatgaagcactcgattgcactatgacctccttgagtgatgtgcagcttggttcctctctcactttttgtttctttttaatatgcaaatgtgagtgtgcgatcttcagtgtgtctgcataagctaacttaagatgaatttaagtacagttttctgaaatatttctattgaaataaattacttaaaattaaaaaaaaaa

SEQ ID NO: 433344 - DNA, 1947 bp, Homo sapiens
cccatctccacccctcccctgaaccccactccccactgaggtccccaaaccccacccctcactccaccctgagggccccatcctctgaaccccaatcccccagccccactgagctcttaaccctccccacctgagggttccctttccctgcccgtcccccagcttcctagctccccaccccaagtgaccccccgcagctcctcgcccctcccactgcaaaccggcactgaagggctgccccgcccccgcccctccccgcccccgcgggacacgcccagattctttgcccccatagcctggtgacctctggccacccgctgtcccaggtgggcctggatccttccagctcattctttgcctgcgccgtccctcgttccatggcccagtcctccccggggaccctgagcctggaagccccggaccactggaaccttgaacccaccagctggctgtacccggagccgtggcagcagccctcatccccatggcggccatcccagccctggacccagaggccgagcccagcatggacgtgattttggtgggatccagtgagctctcaagctccgtttcacccgggacaggcagagatcttattgcatatgaagtcaaggctaaccagcgaaatatagaagacatctgcatctgctgcggaagtctccaggttcacacacagcaccctctgtttgagggagggatctgcgccccatgtaaggacaagttcctggatgccctcttcctgtacgacgatgacgggtaccaatcctactgctccatctgctgctccggagagacgctgctcatctgcggaaaccctgattgcacccgatgctactgcttcgagtgtgtggatagcctggtcggccccgggacctcggggaaggtgcacgccatgagcaactgggtgtgctacctgtgcctgccgtcctcccgaagcgggctgctgcagcgtcggaggaagtggcgcagccagctcaaggccttctacgaccgagagtcggagaatccccttgagatgttcgaaaccgtgcctgtgtggaggagacagccagtccgggtgctgtccctttttgaagacatcaagaaagagctgacgagtttgggctttttggaaagtggttctgacccgggacaactgaagcatgtggttgatgtcacagacacagtgaggaaggatgtggaggagtggggacccttcgatcttgtgtacggcgccacacctcccctgggccacacctgtgaccgtcctcccagctggtacctgttccagttccaccggctcctgcagtacgcacggcccaagccaggcagccccaggcccttcttctggatgttcgtggacaatctggtgctgaacaaggaagacctggacgtcgcatctcgcttcctggagatggagccagtcaccatcccagatgtccacggcggatccttgcagaatgctgtccgcgtgtggagcaacatcccagccataaggagcagcaggcactgggctctggtttcggaagaagaattgtccctgctggcccagaacaagcagagctcgaagctcgcggccaagtggcccaccaagctggtgaagaactgctttctccccctaagagaatatttcaagtatttttcaacagaactcacttcctctttataaatgagtcactatactgtgaagaaaaagacttttcctagaacaaaggcaactttcctcacgttgtctctttcctcttcggattcttgtttttttgcgtctccgtcgtcactgcagacccacgttccgttgggttctggagactcagggtctctcccccatcacgctggctcatgggacggggcgaggcccacgccgctgcacacaggaccacacgtggtggtgcgcgatgtacttcctgaaagcatttctgtgttctagttgagaagttcgagtatatttattataagatagttattggt

SEQ ID NO: 433345 - DNA, 1213 bp, Homo sapiens
cccatctccacccctcccctgaaccccactccccactgaggtccccaaaccccacccctcactccaccctgagggccccatcctctgaaccccaatcccccagccccactgagctcttaaccctccccacctgagggttccctttccctgcccgtcccccagcttcctagctccccaccccaagtgaccccccgcagctcctcgcccctcccactgcaaaccggcactgaagggctgccccgcccccgcccctccccgcccccgcgggacacgcccagattctttgcccccatagcctggtgacctctggccacccgctgtcccaggtgggcctggatccttccagctcattctttgcctgcgccgtccctcgttccatggcccagtcctccccggggaccctgagcctggaagccccggaccactggaaccttgaacccaccagctggctgtacccggagccgtggcagcagccctcatccccatggcggccatcccagccctggacccagaggccgagcccagcatggacgtgattttggtgggatccagtgagctctcaagctccgtttcacccgggacaggcagagatcttattgcatatgaagtcaaggctaaccagcgaaatatagaagacatctgcatctgctgcggaagtctccaggttcacacacagcaccctctgtttgagggagggatctgcgccccatgtaaggacaagttcctggatgccctcttcctgtacgacgatgacgggtaccaatcctactgctccatctgctgctccggagagacgctgctcatctgcggaaaccctgattgcacccgatgctactgcttcgagtgtgtggatagcctggtcggccccgggacctcggggaaggtgcacgccatgagcaactgggtgtgctacctgtgcctgccgtcctcccgaagcgggctgctgcagcgtcggaggaagtggcgcagccagctcaaggccttctacgaccgagagtcggagaatccccttgagatgttcgaaaccgtgcctgtgtggaggagacagccagtccgggtgctgtccctttttgaagacatcaagaaagcgctggcgagttgggtttggaagggtcctggccgggccacgagctgggggtggtgtccgccgtcggggtgtgggggggggcctctcttggggggcccctccggggcctggcccccgggccttcgc

SEQ ID NO: 433346 - DNA, 1064 bp, Homo sapiens
  misc_feature (1017)..(1017): n is a, c, g, or t
cccatctccacccctcccctgaaccccactccccactgaggtccccaaaccccacccctcactccaccctgagggccccatcctctgaaccccaatcccccagccccactgagctcttaaccctccccacctgagggttccctttccctgcccgtcccccagcttcctagctccccaccccaagtgaccccccgcagctcctcgcccctcccactgcaaaccggcactgaagggctgccccgcccccgcccctccccgcccccgcgggacacgcccagattctttgcccccatagcctggtgacctctggccacccgctgtcccaggtgggcctggatccttccagctcattctttgcctgcgccgtccctcgttccatggcccagtcctccccggggaccctgagcctggaagccccggaccactggaaccttgaacccaccagctggctgtacccggagccgtggcagcagccctcatccccatggcggccatcccagccctggacccagaggccgagcccagcatggacgtgattttggtgggatccagtgagctctcaagctccgtttcacccgggacaggcagagatcttattgcatatgaagtcaaggctaaccagcgaaatatagaagacatctgcatctgctgcggaagtctccaggttcacacacagcaccctctgtttgagggagggatctgcgccccatgtaaggacaagttcctggatgccctcttcctgtacgacgatgacgggtaccaatcctactgctccatctgctgctccggagagacgctgctcatctgcggaaaccctgattgcacccgatgctactgcttcgagtgtgtggatagcctggtcggccccgggacctcggggaaggtgcacgccatgagcaactgggtgtgctacctgtgcctgccgtcctcccgaagcgggctgctgcagcgtcggaggaagtggcgcagccagctcaaggccttctacgaccgagagtcggaatcccttagatttcnaaccggctgtgttgggggaacagcatccggtggcggcttttgaactt

SEQ ID NO: 433347 - DNA, 1902 bp, Homo sapiens
cccatctccacccctcccctgaaccccactccccactgaggtccccaaaccccacccctcactccaccctgagggccccatcctctgaaccccaatcccccagccccactgagctcttaaccctccccacctgagggttccctttccctgcccgtcccccagcttcctagctccccaccccaagtgaccccccgcagctcctcgcccctcccactgcaaaccggcactgaagggctgccccgcccccgcccctccccgcccccgcgggacacgcccagattctttgcccccatagcctggtgacctctggccacccgctgtcccaggtgggcctggatccttccagctcattctttgcctgcgccgtccctcgttccatggcccagtcctccccggggaccctgagcctggaagccccggaccactggaaccttgaacccaccagctggctgtacccggagccgtggcagcagccctcatccccatggcggccatcccagccctggacccagaggccgagcccagcatggacgtgattttggtgggatccagtgagctctcaagctccgtttcacccgggacaggcagagacatctgcatctgctgcggaagtctccaggttcacacacagcaccctctgtttgagggagggatctgcgccccatgtaaggacaagttcctggatgccctcttcctgtacgacgatgacgggtaccaatcctactgctccatctgctgctccggagagacgctgctcatctgcggaaaccctgattgcacccgatgctactgcttcgagtgtgtggatagcctggtcggccccgggacctcggggaaggtgcacgccatgagcaactgggtgtgctacctgtgcctgccgtcctcccgaagcgggctgctgcagcgtcggaggaagtggcgcagccagctcaaggccttctacgaccgagagtcggagaatccccttgagatgttcgaaaccgtgcctgtgtggaggagacagccagtccgggtgctgtccctttttgaagacatcaagaaagagctgacgagtttgggctttttggaaagtggttctgacccgggacaactgaagcatgtggttgatgtcacagacacagtgaggaaggatgtggaggagtggggacccttcgatcttgtgtacggcgccacacctcccctgggccacacctgtgaccgtcctcccagctggtacctgttccagttccaccggctcctgcagtacgcacggcccaagccaggcagccccaggcccttcttctggatgttcgtggacaatctggtgctgaacaaggaagacctggacgtcgcatctcgcttcctggagatggagccagtcaccatcccagatgtccacggcggatccttgcagaatgctgtccgcgtgtggagcaacatcccagccataaggagcagcaggcactgggctctggtttcggaagaagaattgtccctgctggcccagaacaagcagagctcgaagctcgcggccaagtggcccaccaagctggtgaagaactgctttctccccctaagagaatatttcaagtatttttcaacagaactcacttcctctttataaatgagtcactatactgtgaagaaaaagacttttcctagaacaaaggcaactttcctcacgttgtctctttcctcttcggattcttgtttttttgcgtctccgtcgtcactgcagacccacgttccgttgggttctggagactcagggtctctcccccatcacgctggctcatgggacggggcgaggcccacgccgctgcacacaggaccacacgtggtggtgcgcgatgtacttcctgaaagcatttctgtgttctagttgagaagttcgagtatatttattataagatagttattggt

SEQ ID NO: 433348 - DNA, 1099 bp, Homo sapiens
aattgtcagcatttttcaaaaacagctttatcgaggcaccactgacatacagtaagttgcacgcattcagtgtgtccgactggatgagttctgagctagctccacacccatgcacccctcatcagagtaagagagcaacagagtaagagtccccatcactgcaggcttccctgtgcccccaagcctcccgctgaccccatgcagcccccagcgtgcccacatcactgcagctcacgtgtcctctggagcttcctctaaaaggcggtatttgtgccgcggcacgcgctctgcgtcagctcctccctcggggttgcctgtctgtctcttccccactctaggcctgcctgggggaggaggggtccatgcacctctgtggccccagcactgggcagggcttcattgctggctggtacctgttccagttccaccggctcctgcagtacgcacggcccaagccaggcagccccaggcccttcttctggatgttcgtggacaatctggtgctgaacaaggaagacctggacgtcgcatctcgcttcctggagatggagccagtcaccatcccagatgtccacggcggatccttgcagaatgctgtccgcgtgtggagcaacatcccagccataaggagcagcaggcactgggctctggtttcggaagaagaattgtccctgctggcccagaacaagcagagctcgaagctcgcggccaagtggcccaccaagctggtgaagaactgctttctccccctaagagaatatttcaagtatttttcaacagaactcacttcctctttataaatgagtcactatactgtgaagaaaaagacttttcctagaacaaaggcaactttcctcacgttgtctctttcctcttcggattcttgtttttttgcgtctccgtcgtcactgcagacccacgttccgttgggttctggagactcagggtctctcccccatcacgctggctcatgggacggggcgaggcccacgccgctgcacacaggaccacacgtggtggtgcgcgatgtacttcctgaaagcatttctgtgttctagttgagaagttcgagtatatttattataagatagttattggt

SEQ ID NO: 433349 - DNA, 240 bp, Homo sapiens
gggacctcaggctcctgtgactttggaaaacgaattgtgatgctcacttcctggccgaatttaaattaagagatcagaggaagaagaaaggggctacttcttatcttcctttccagatcttattgcatatgaagtcaaggctaaccagcgaaatatagaaggtgagtgtttgcatactggcccacaccagacaaaagagacggggcacagtggctcacacctataatcccagcactttgg

SEQ ID NO: 433350 - DNA, 513 bp, Homo sapiens
gcagcagctgtggcgtgagggcagagtccgtcctctcagtgtagggcacgcggctcggctcgacccttgcctggcgcggcctgaggtcctgtttgtaatttgatatcttattgccacagagtctgttctgtcagtttaaaataattcatcagcatttttctccaaaggtgattcataagaaaaaaggacgtagggaacacagtcgggctagaaagtccattgaccactcagggccattggcggctgaggccagtgggcctgtggggggcgcttaccgtccaggtcccctgacccacggccgaccctcccgcccccagatggagccagtcaccatcccagatgtccacggcggatccttgcagaatgctgtccgcgtgtggagcaacatcccagccataaggaggtatttcctgggcagctgaaagcgttcagggtcaaggggaacatggacccagaagcggggttcactgaggaaatggggtctgtctagcagagccaagcccagagcagcct

SEQ ID NO: 433351 - DNA, 7593 bp, Homo sapiens
  misc_feature (101)..(101): n is a, c, g, or t
atctaccaccttaaaaccctgatctagaaaaaatatatattcatgataggaagttataactaagaaaatttatttgcctcttaatgctcctgaatgaaagnaattatccctttgttctttgggaggacttgtgtatctgagattgttgtaataatcagtcattttattaaaaccttgacatgatcaccagggaggaaaaatagagcaatagtcaaaacctgtgtgttagtccaagatgacttctgaagaaatgacagcttctgttctcatacctgtgactcagagaaaagtggtttctgcccagtcggctgcagatgaaagtagtgaaaaggtctcagacatcaatatttcaaaagcacatactgtcagacgaagtggggagacttctcataccatctcacaactgaacaaacttaaagaagaaccttctggaagcaacttgccaaagattctctcaatagcgagggagaaaatagtgagtgatgagaacagtaatgaaaaatgttgggagaaaatcatgccagattctgcgaaaaaccttaacattaactgcaacaacatattgagaaaccatcagcatggccttcctcagagacaattttatgaaatgtacaactctgttgctgaggaagacttgtgtttagaaactggaattccttctccactggaaagaaaggtgttccctggaattcaactggaactagacagaccttccatgggcattagtcctttaggaaatcagtcagtgatcatagagacaggcagagcacaccctgacagcagaagggcagtatttcattttcattatgaagttgacagaagaatgtcagacactttctgtaccctatcagaaaacttaattttagacgattgtggaaattgtgtaccactacctgggggtgaggagaagcaaaagaaaaactatgtggcatatacctgtaaactgatggaattggccaaaaattgtgataataagaatgagcagctgcagtgtgatcattgtgacaccttgaatgataaatacttttgctttgaaggctcttgtgagaaggttgacatggtatattcaggtgatagcttttgtaggaaagactttactgacagtcaagctgccaagacctttttgagccattttgaggacttccctgataattgtgatgatgtagaagaagacgcttttaaaagcaaaaaggagcgatccactttgttagtcaggagattctgtaaaaatgacagagaagttaagaaatctgtgtatactggaacaagagcaattgtgagaactctgccttctggccacattgggctgactgcatggagttacatagatcagaagagaaatggtcccttactgccttgtgggagagtaatggaacccccgtcaacagtggagataaggcaagatgggagccaacgtctgtcagaagcccagtggtatcctatctacaatgcagtgagaagagaagaaacagaaaatacagttggatctctactccatttcctcaccaagctcccagcctccgagacagcccatggaaggataagcgttggtccatgcttaaagcaatgtgtccgagacactgtatgtgagtatcgcgccaccctccaaaggacttcaatatcgcagtacatcaccggttctctcctagaagcaaccacgtctttgggagcaagaagtggccttctcagtacttttggaggatccactggacgaatgatgctgaaagaacgccagccaggcccctctgtggccaattccaatgccctcccttcaagttcagctgggatcagcaaggagctgatcgatctgcagcctctcatccagttcccagaggaagtcgccagcatcctgatggagcaagagcagactatttaccgcagggtcttgccagtcgactacctttgcttcttaacacgggacttgggcactcctgaatgccagagctccttgccctgcctcaaagcatccatctcagcgtcgattcttaccactcagaatggagagcacaatgcccttgaagatctggtgatgaggtttaatgaggtgagctcctgggtgacatggctgatcctcacggcaggctccatggaggagaagcgagaagtcttttcatatttggtgcatgtggccaaatgctgctggaacatgggcaactacaacgctgtcatggagttcttggctggcctcaggtcaagaaaagttttaaaaatgtggcagttcatggaccagtctgatattgagaccatgaggagcctgaaggatgctatggcccagcatgagtcctcttgtgagtacagaaaggtggtgacacgtgccctgcacatccctggctgtaaggtggttccattctgtggggtgtttctgaaggagctctgtgaagtgcttgacggcgcctccggtctcatgaagctttgcccgcggtacaattcccaagaagaaactttagagtttgtagcagattacagtggacaagataatttcttacaacgagtgggacaaaatggcttaaagaattcggagaaggagtccactgtcaacagcatctttcaggtcatccggagctgcaatcgaagtctggagacagacgaggaggacagccccagtgaaggaaacagctccaggaaaagctccttgaaggataaaagccgatggcagtttataattggagatttgttggattcagacaatgacatctttgagcaatccaaagaatacgactctcatggttcagaggactcacagaaggccttcgaccatgggacggagctcatcccttggtacgtgctgtccatccaagccgatgtgcaccagttcctgctgcagggggccacggtcatccactacgaccaggacacacacctctctgcccgctgcttcctccagcttcagcccgacaatagcaccttgacctgggtaaagcccacaactgcctccccagccagcagtaaagcaaaacttggtgtacttaataacacagctgagcctggaaaattcccactactgggtaatgctggattaagtagcctgacggaaggggtcttggatctttttgcagtgaaggctgtatacatgggccaccctggcattgatatacacactgtgtgtgttcagaacaaactgggtagcatgttcctgtcagagactggtgtgacattgctctatgggcttcagaccacagacaacagattattgcacttcgtggcaccaaagcacacagctaaaatgctcttcagcggattattggaactcactagagctgtgagaaagatgaggaaattccctgaccaaagacagcagtggctgcggaaacagtacgtcagcctttatcaggaggatggacggtatgaaggcccaactttggctcacgctgtggagttgtttggtggcagacggtggagtgctcgaaaccccagccccggaacatcagcaaagaatgctgagaagcccaatatgcagagaaacaataccctgggcataagcactaccaagaaaaagaagaaaatcctcatgaggggtgagagtggagaggtaactgacgatgagatggcaacccgaaaggccaagatgcacaaagagtgtcgaagccggagtggttctgatcctcaagacattaatgaacaagaagaatcagaggtgaatgccatcgctaaccctccaaaccccctcccttccagaagagcccactctttgaccacagctgggtcccccaacttggctgccgggacgtcatctcccatcaggccagtgtcctcccctgtgctgtcttcttcaaacaagagcccatccagtgcttggagcagtagtagctggcacgggcggatcaaaggcggcatgaagggatttcagagcttcatggtttcagatagcaacatgagttttgttgaatttgttgagctgttcaaatcattcagtgtcaggagccgcaaggacctgaaggatctgtttgatgtctatgcagtgccctgcaaccgatctggctccgagtcagccccactctacaccaacctgacaattgatgaaaacaccagcgatcttcagcctgacctagatctgttgaccagaaatgtctcggatttggggttgttcattaagagtaaacagcagctatcggacaaccagaggcagatatctgatgccattgctgctgcaagcattgtgacaaatggcactgggattgagagcacatctctgggcatttttggggtgggcatacttcagctcaacgatttcctcgtgaattgccaaggagaacactgcacttatgatgaaatcctcagcatcatccagaagttcgagcctagcatcagtatgtgtcatcagggactaatgtcatttgaagggtttgccaggtttctgatggataaagaaaattttgcctcaaaaaatgatgagtcacaggagaacattaaagaactgcagctacccctctcatactattacatcgaatcttcgcacaatacctacctcacgggccatcagctcaaaggagaatcctcggtagaactctacagccaggtccttttgcaaggctgtcgaagtgtagaattggactgctgggacggagacgatgggatgcccatcatttatcatggacatacgctgacaaccaagatccccttcaaggaagtggttgaagccattgatcgcagtgccttcatcaactctgacctgccaatcatcatatcgattgagaaccactgttcattgcctcagcaacgaaaaatggcagaaattttcaagactgtgtttggagaaaagctggtgactaaattcttatttgagactgatttctcagatgatccaatgcttccttcacctgaccaactcagaaagaaagttcttcttaaaaacaagaagctaaaagcccatcagacgccagtggatatcttaaagcaaaaggctcatcagttagcatctatgcaagtgcaggcttataatggtgggaatgccaacccccgacctgccaataatgaggaagaggaagatgaggaggacgaatatgattatgactatgaatccctttctgatgacaacattctggaagacagacctgaaaataaatcatgtaatgacaagcttcagtttgaatataatgaagaaatcccaaagaggataaagaaagcagataactctgcttgcaacaaaggaaaggtttatgatatggaactgggagaagaattttatcttgatcagaataaaaaggaaagcagacagattgcaccagagctttctgaccttgtaatctattgtcaagcagtaaaatttccaggactgtcaactctaaatgcatctggctctagcagaggaaaagaaaggaaaagcaggaagtccatttttggcaacaatccgggcagaatgagcccaggggagacagcatcatttaacaaaacatctggaaaaagttcctgtgaaggcattcgacagacctgggaggaatcttcttcccctctcaacccaaccacgtccctcagtgctatcattagaactcccaaatgttatcatatctcgtcgctgaatgaaaatgccgccaaacgtctgtgtcgcaggtattctcagaaactgacccagcacaccgcctgtcagctgctgagaacttaccctgctgccacccgcatcgactcttccaacccgaaccccctcatgttctggctccatgggatacagcttgtggcactcaactaccagactgatgatctccctttacatttaaatgctgcaatgtttgaggcaaatggtggttgtggttatgtattgaaacctccagttctgtgggacaagaactgccccatgtatcagaagttttctccactagaaagagatctggacagcatggatcctgcagtctattctttaactattgtctctggtcagaatgtgtgccccagtaatagcatgggaagcccgtgcattgaagtcgacgtcctgggcatgcctctggacagctgccatttccgcacaaagcccatccatcgaaacaccctgaaccccatgtggaacgagcagtttctgttccacgttcacttcgaagatcttgtatttcttcgttttgcagttgtggaaaacaatagttcagcggtaactgctcagagaatcattccactgaaagctttaaaacgaggatatcgacatcttcagctgcgaaaccttcacaatgaagtcttggagatttctagtttattcattaacagcagaaggatggaagaaaattcctctggcaataccatgtcagcctcttcgatgtttaatacagaagaaagaaaatgtttgcagactcacagagtcacggtgcatggggtcccagggccagagccctttaccgttttcactattaatggaggcaccaaggcaaagcagcttctgcagcaaattctgacaaatgaacaagacatcaaacctgttaccacagactattttttgatggaagaaaaatattttatatctaaagaaaagaatgaatgtaggaaacaaccattccagagagccattggtccagaagaggagatcatgcaaattttaagcagctggtttccagaagagggatacatgggcaggattgtcttaaaaacccagcaggaaaacctagaagagaaaaacattgttcaagatgacaaagaggtgatcttgagctcagaggaggagagtttctttgtccaagtgcatgatgtttctccagagcaacctcgaacagtcatcaaagcaccccgcgtcagcactgcacaggatgtcattcagcagaccttatgcaaagccaaatattcctacagcatcctgagcaaccccaatccaagcgactatgtgcttttggaagaggtggtgaaagacactaccaacaagaagactaccacaccaaagtcctctcagcgggtccttctggatcaggagtgtgtgtttcaagcccaaagcaagtggaaaggtgcaggaaaattcatccttaagctaaaggagcaggtgcaggcatctcgagaagataaaaagaaaggcatttctttcgcaagtgaactcaagaagctcaccaagtcaactaaacagccccgaggacttacatcaccttctcagctcttgacctcagaaagtatccaaaccaaggaggagaaacctgtgggtggcttgtcctccagtgacacaatggattaccgacagtgactaagggcagcatgtttaacccaggtgaagatctttaagcaagaagttaaagagtgaacatggtggaaaaaatataattattttcatcagacttaaactggaaattgatgatttctgaactgaagccttcacacatgtgagatccatgctgaggagaagcaaaatggcacagggctagttgccaccaaccaatttactgatgaatgaagcccaggggactgccattttataaatgtcagcagttggaaaaatcgtcacgaattgacttagagcaagggtcagcaagcttgtctgtaaagggccaaacagtaaatattttagggctgggggccataaaatatgttgcaaccacccaattctgccattgtagtgcaaaagcagccatagacaacacatacatgaacgaacgtggctgtattccaataaaactttatttatggacactgaaa

SEQ ID NO: 433352 - DNA, 2098 bp, Homo sapiens
  misc_feature (1)..(1): n is a, c, g, or t
  misc_feature (1250)..(1250): n is a, c, g, or t
ncccagagccaaattttacttaaaacagcccaaaagaaggcccaatacattgagatcatgtttccacatttaaagagcaactcctaaaataactgatgtcctatattacactctgcagtggtcaaaattttaaatattgttttccatatccagaagttagtatcaaataaatcataggtgtgatgttatacacacctctataacttctgtaatgaggtgaaattacactaaagctagtaaattggtcatatacttctctacatataaagagcccgatatgtgctacaagattacttcttaagtacagaagaatacaactccattagaaatttgacttaaaaataatatgcctactataatgaacattgctaattgcttatattttaggagactgggggagggtgattgatagtgatttagatgattgcctttagattctattgtcctgtagcaagtagatatttattttttctgaccaatggattcacatgactttttttttctttttctaagcaagcagatatttagaatcattctgttaacttcacagctttgcttaaagctggggaggcctggccaggcacagtggctcacgcctgtaatcccagcactttgggaggccaaggcgggcagatcacgaggtcaagagattgagaccatcctggccaacatggtgaaaccccgtctctactaaaaatacaacaacagttagctgggcgtggtggtgtgcgcaggtagtcccagctactcgggaggctgaggcaggagaatcgcttgaacccgggagacggaggttgcagtgagccgagattgcgccactgcactccagcctagcgacagagcgagactccgtctcaaaacaaaagctagggaggcttctcttatagtcattggtgcatctatgtgaattgacatcccatgttatgacctcctttacaatggtcttttcaagaaagagcacttgtaaaagaaaagaagagctcataagaaaagaagtttagagtttaggaccaggcacagtggctcatgcctgtaatcccagcactgtgggaggccgaggtgtgtggatcacttgaggtcaggagttcgagaccagcctggccaacatggtgaaaccccatctctaccaaaaaatataaaaattcctgtagtcccagctactcaggaggctgaggcaggagaattgcttgaactttggaggcagcagtccagccagacaagagggagagagagcaaaaagaaagttagtntagtattgtttccactttttaggtaacatatttcatatttgttctaaaatgatcccttttaaagtttcaataatctacagatttttaaagaacatattcatctatctgaagtagtagttagctgaaggaattccaccttttcttaaagttgaacagtttatttgatgtgatcttttttaaaaaaacaaactttctaaagaatgtgaaatatttatttccaaggcagaaataacctaatgttctacttcctagaaacatcatgttctaacattgtgagtacagaggaaacagtctcttccccaaacctagccactagagctgtggctggaaaactctgaacccttggtataccgcaagtgtttctgtttcttcattttcagtatactaataagcctctgtatacaacattacaggtgaagatctgtgaagatctttaagcaagaagttaaagagtgaacatggtggaaaaaatataattattttcatcagacttaaactggaaattgatgatttctgaactgaagccttcacacatgtgagatccatgctgaggagaagcaaaatggcacagggctagttgccaccaaccaatttactgatgaatgaagcccaggggactgccattttataaatgtcagcagttggaaaaatcgtcacgaattgacttagagcaagggtcagcaagcttgtctgtaaagggccaaacagtaaatattttagggctgggggccataaaatatgttgcaaccacccaattctgccattgtagtgcaaaagcagccatagacaacacatacatgaacgaacgtggctgtattccaataaaactttatttatggacactgaaa

SEQ ID NO: 433353 - DNA, 1997 bp, Homo sapiens
  misc_feature (406)..(406): n is a, c, g, or t
  misc_feature (504)..(504): n is a, c, g, or t
  misc_feature (1589)..(1589): n is a, c, g, or t
ttaatagatccctgctgttacttacaggatgctacacagagttgccttagaagcagtagctactgtgaacaattgcctgccccttgagtgtgttgttgctgctcagagcatcctaatatgtatggtgttctgagtcccatgggctccctatctttagatttcagccactcaaggggatggcagcccaactattttaggagctccctggggcccttcaaagggaatttcatgcatgtcacacacaccctgtatttcaagtccgactgtcccaagcatcaaactagttgaaaacctacctggcaataatggacaaatacaacttgattttacttagattgataccctgcccctctcccttccaggatgtccaaggccctaatttgcaaagtaagtctaaatgaatttncctacagtggtagttctgcaatttaacctctgtaaatgggatgggaagtttttgttccccagttgatgtattaaagcatgtcactggaactcagcagngatgtgaccaggacaacgggggacatgatgaaattcctgacagagaatcttgtgagttagaaaacagtcacttgggtggccagatcattattcttctgtggccgtctgtgctcttccacctcttggaattttctgggagacattaatatatttacttccccattgcttgatgcttcctattgtgttcaccatgtggctctttcacaggaggatggacggtatgaaggcccaactttggctcacgctgtggagttgtttggtggcagacggtggagtgctcgaaaccccagccccggaacatcagcaaagaatgctgagaagcccaatatgcagagaaacaataccctgggcataagcactaccaagaaaaagaagaaaatcctcatgagggtagagtgttatttgtttattaagcattaaacccatcttccaggaccgctgtatggtgaacatcaccataaaacacttaaggttgtttgggttgaggacaaagtcaggtataaaatagaagatacaagggcttaccacatacctccatggtgccatgctagtgccaggaacaccagggaaaagacaaggtccgcagaaggacatagacatgtaaacaaacacagtgcgagctaaaaagagacatcgttgagtcacccacaaagtgctgtgggggcagagagaaggaaaatagagagctgaggggcaggcacagagggctccacagagcaactgacacgcaggtcttgaagaacgtgtaggattttaccaagcaaagaacataggagaaagtatccccagcagaggagacagcatagaggcataaaagacagcttgttcaaggaagcacatgctgttctggatggctagagcatgagcactctgtgggcaaggaagggctagaagagaacagagatcacagaggccccaaatactgtgtgtagaacacaatgtaaagtatattagcactgtgtattataaactatataatatgaaatatcactatgaagtgataatatatttgcttcatggctatttgtttgtttgtgttgctataaagaaatacttgaggctgggtaatttataaagaaagaagnttaattgactcacagttctgcaggtgtacaggaagcatggtgccagcatctgcttctggtgacagcctccggaagcttacagtcatggcagaaggtgaagcgggagccagcgcatgacatggcaagagcaggagttcgagaccagcctggccaacatggcaaaatcccgcctctactaaaaatacaaaaaattagtcatgcacctataatcccagctactcatgaggctgaggcaggagaatcgcttgagcctgggagatggaggttgcagtgagccaagataatgccactgcactccagcctgggtgacagagcaagactgtctcaaaaaaacaaacaaacaaacaaaaaatacccgcctcctgtgtactccacagggcacagggagctttcagtgtactcagctgg

SEQ ID NO: 433354 - DNA, 490 bp, Homo sapiens
  misc_feature (51)..(51): n is a, c, g, or t
  misc_feature (62)..(62): n is a, c, g, or t
atagtcgaagtcgcatctttgagattataggttgtgaagcaggaaaacagnagcttgagtgnaacgtgaagatctttaagcaagaagttaaagagtgaacatggtggaaaaaatataattattttcatcagacttaaactggaaattgatgatttctgaactgaagccttcacacatgtgagatccatgctgaggagaagcaaaatggcacagggctagttgccaccaaccaatttactgatgaatgaagcccaggggactgccattttataaatgtcagcagttggaaaaatcgtcacgaattgacttagagcaagggtcagcaagcttgtctgtaaagggccaaacagtaaatattttagggctgggggccataaaatatgttgcaaccacccaattctgccattgtagtgcaaaagcagccatagacaacacatacatgaacgaacgtggctgtattccaataaaactttatttatggacactgaaa

SEQ ID NO: 433355 - DNA, 485 bp, Homo sapiens
agaaaaatgaaaagcgataacaaatagagaaaaaacgcgagtacgtgaacatttaacagagtgaagatctttaagcaagaagttaaagagtgaacatggtggaaaaaatataattattttcatcagacttaaactggaaattgatgatttctgaactgaagccttcacacatgtgagatccatgctgaggagaagcaaaatggcacagggctagttgccaccaaccaatttactgatgaatgaagcccaggggactgccattttataaatgtcagcagttggaaaaatcgtcacgaattgacttagagcaagggtcagcaagcttgtctgtaaagggccaaacagtaaatattttagggctgggggccataaaatatgttgcaaccacccaattctgccattgtagtgcaaaagcagccatagacaacacatacatgaacgaacgtggctgtattccaataaaactttatttatggacactgaaa

SEQ ID NO: 433356 - DNA, 557 bp, Homo sapiens
  misc_feature (56)..(56): n is a, c, g, or t
ttagtcagcaggccgaatatacaaataaaaccaccccggttgcgggcaacactttnagaaagtttgtgaagatctttaagcaagaagttaaagagtgaacatggtggaaaaaatataattattttcatcagacttaaactggaaattgatgatttctgaactgaagccttcacacatgtgagatccatgctgaggagaagcaaaatggcacagggctagttgccaccaaccaatttactgatgaatgaagcccaggggactgccattttataaatgtcagcagttggaaaaatcgtcacgaattgacttagagcaagggtcagcaagcttgtctgtaaagggccaaacagtaaatattttagggctgggggccataaaatatgttgcaaccacccaattctgccattgtagtgcaaaagcagccatagacaacacatacatgaacgaacgtggctgtattccaataaaactttatttatggacactgaaacaaaaaaaaaaaatgggcctcgttgacctaagagaagaagctttgccggccgattacctgttaagac

SEQ ID NO: 433357 - DNA, 6434 bp, Homo sapiens
  misc_feature (206)..(206): n is a, c, g, or t
atggtttcagaaggaagtgcagcaggaagagactttgcaggaatggaagaggtgaggcagctccacgtgagattctgcaaagggattaagatttggcaccaggcttggtttctgtgcagcctcttaggcagagagccccaggagagggaagcaggctgtcagctgtggctttgcacgctctcagctgtcttgaaggttggttggcncttcccgctctctgaggtacccaattttaccttgttaaaggatggatgtggatgctggaggcttaaagaagaccagatctacaatgcagtgagaagagaagaaacagaaaatacagttggatctctactccatttcctcaccaagctcccagcctccgagacagcccatggaaggataagcgttggtccatgcttaaagcaatgtgtccgagacactgtatgtgagtatcgcgccaccctccaaaggacttcaatatcgcagtacatcaccggttctctcctagaagcaaccacgtctttgggagcaagaagtggccttctcagtacttttggaggatccactggacgaatgatgctgaaagaacgccagccaggcccctctgtggccaattccaatgccctcccttcaagttcagctgggatcagcaaggagctgatcgatctgcagcctctcatccagttcccagaggaagtcgccagcatcctgatggagcaagagcagactatttaccgcagggtcttgccagtcgactacctttgcttcttaacacgggacttgggcactcctgaatgccagagctccttgccctgcctcaaagcatccatctcagcgtcgattcttaccactcagaatggagagcacaatgcccttgaagatctggtgatgaggtttaatgaggtgagctcctgggtgacatggctgatcctcacggcaggctccatggaggagaagcgagaagtcttttcatatttggtgcatgtggccaaatgctgctggaacatgggcaactacaacgctgtcatggagttcttggctggcctcaggtcaagaaaagttttaaaaatgtggcagttcatggaccagtctgatattgagaccatgaggagcctgaaggatgctatggcccagcatgagtcctcttgtgagtacagaaaggtggtgacacgtgccctgcacatccctggctgtaaggtggttccattctgtggggtgtttctgaaggagctctgtgaagtgcttgacggcgcctccggtctcatgaagctttgcccgcggtacaattcccaagaagaaactttagagtttgtagcagattacagtggacaagataatttcttacaacgagtgggacaaaatggcttaaagaattcggagaaggagtccactgtcaacagcatctttcaggtcatccggagctgcaatcgaagtctggagacagacgaggaggacagccccagtgaaggaaacagctccaggaaaagctccttgaaggataaaagccgatggcagtttataattggagatttgttggattcagacaatgacatctttgagcaatccaaagaatacgactctcatggttcagaggactcacagaaggccttcgaccatgggacggagctcatcccttggtacgtgctgtccatccaagccgatgtgcaccagttcctgctgcagggggccacggtcatccactacgaccaggacacacacctctctgcccgctgcttcctccagcttcagcccgacaatagcaccttgacctgggtaaagcccacaactgcctccccagccagcagtaaagcaaaacttggtgtacttaataacacagctgagcctggaaaattcccactactgggtaatgctggattaagtagcctgacggaaggggtcttggatctttttgcagtgaaggctgtatacatgggccaccctggcattgatatacacactgtgtgtgttcagaacaaactgggtagcatgttcctgtcagagactggtgtgacattgctctatgggcttcagaccacagacaacagattattgcacttcgtggcaccaaagcacacagctaaaatgctcttcagcggattattggaactcactagagctgtgagaaagatgaggaaattccctgaccaaagacagcagtggctgcggaaacagtacgtcagcctttatcaggaggatggacggtatgaaggcccaactttggctcacgctgtggagttgtttggtggcagacggtggagtgctcgaaaccccagccccggaacatcagcaaagaatgctgagaagcccaatatgcagagaaacaataccctgggcataagcactaccaagaaaaagaagaaaatcctcatgaggggtgagagtggagaggtaactgacgatgagatggcaacccgaaaggccaagatgcacaaagagtgtcgaagccggagtggttctgatcctcaagacattaatgaacaagaagaatcagaggtgaatgccatcgctaaccctccaaaccccctcccttccagaagagcccactctttgaccacagctgggtcccccaacttggctgccgggacgtcatctcccatcaggccagtgtcctcccctgtgctgtcttcttcaaacaagagcccatccagtgcttggagcagtagtagctggcacgggcggatcaaaggcggcatgaagggatttcagagcttcatggtttcagatagcaacatgagttttgttgaatttgttgagctgttcaaatcattcagtgtcaggagccgcaaggacctgaaggatctgtttgatgtctatgcagtgccctgcaaccgatctggctccgagtcagccccactctacaccaacctgacaattgatgaaaacaccagcgatcttcagcctgacctagatctgttgaccagaaatgtctcggatttggggttgttcattaagagtaaacagcagctatcggacaaccagaggcagatatctgatgccattgctgctgcaagcattgtgacaaatggcactgggattgagagcacatctctgggcatttttggggtgggcatacttcagctcaacgatttcctcgtgaattgccaaggagaacactgcacttatgatgaaatcctcagcatcatccagaagttcgagcctagcatcagtatgtgtcatcagggactaatgtcatttgaagggtttgccaggtttctgatggataaagaaaattttgcctcaaaaaatgatgagtcacaggagaacattaaagaactgcagctacccctctcatactattacatcgaatcttcgcacaatacctacctcacgggccatcagctcaaaggagaatcctcggtagaactctacagccaggtccttttgcaaggctgtcgaagtgtagaattggactgctgggacggagacgatgggatgcccatcatttatcatggacatacgctgacaaccaagatccccttcaaggaagtggttgaagccattgatcgcagtgccttcatcaactctgacctgccaatcatcatatcgattgagaaccactgttcattgcctcagcaacgaaaaatggcagaaattttcaagactgtgtttggagaaaagctggtgactaaattcttatttgagactgatttctcagatgatccaatgcttccttcacctgaccaactcagaaagaaagttcttcttaaaaacaagaagctaaaagcccatcagacgccagtggatatcttaaagcaaaaggctcatcagttagcatctatgcaagtgcaggcttataatggtgggaatgccaacccccgacctgccaataatgaggaagaggaagatgaggaggacgaatatgattatgactatgaatccctttctgatgacaacattctggaagacagacctgaaaataaatcatgtaatgacaagcttcagtttgaatataatgaagaaatcccaaagaggataaagaaagcagataactctgcttgcaacaaaggaaaggtttatgatatggaactgggagaagaattttatcttgatcagaataaaaaggaaagcagacagattgcaccagagctttctgaccttgtaatctattgtcaagcagtaaaatttccaggactgtcaactctaaatgcatctggctctagcagaggaaaagaaaggaaaagcaggaagtccatttttggcaacaatccgggcagaatgagcccaggggagacagcatcatttaacaaaacatctggaaaaagttcctgtgaaggcattcgacagacctgggaggaatcttcttcccctctcaacccaaccacgtccctcagtgctatcattagaactcccaaatgttatcatatctcgtcgctgaatgaaaatgccgccaaacgtctgtgtcgcaggtattctcagaaactgacccagcacaccgcctgtcagctgctgagaacttaccctgctgccacccgcatcgactcttccaacccgaaccccctcatgttctggctccatgggatacagcttgtggcactcaactaccagactgatgatctccctttacatttaaatgctgcaatgtttgaggcaaatggtggttgtggttatgtattgaaacctccagttctgtgggacaagaactgccccatgtatcagaagttttctccactagaaagagatctggacagcatggatcctgcagtctattctttaactattgtctctggtcagaatgtgtgccccagtaatagcatgggaagcccgtgcattgaagtcgacgtcctgggcatgcctctggacagctgccatttccgcacaaagcccatccatcgaaacaccctgaaccccatgtggaacgagcagtttctgttccacgttcacttcgaagatcttgtatttcttcgttttgcagttgtggaaaacaatagttcagcggtaactgctcagagaatcattccactgaaagctttaaaacgaggatatcgacatcttcagctgcgaaaccttcacaatgaagtcttggagatttctagtttattcattaacagcagaaggatggaagaaaattcctctggcaataccatgtcagcctcttcgatgtttaatacagaagaaagaaaatgtttgcagactcacagagtcacggtgcatggggtcccagggccagagccctttaccgttttcactattaatggaggcaccaaggcaaagcagcttctgcagcaaattctgacaaatgaacaagacatcaaacctgttaccacagactattttttgatggaagaaaaatattttatatctaaagaaaagaatgaatgtaggaaacaaccattccagagagccattggtccagaagaggagatcatgcaaattttaagcagctggtttccagaagagggatacatgggcaggattgtcttaaaaacccagcaggaaaacctagaagagaaaaacattgttcaagatgacaaagaggtgatcttgagctcagaggaggagagtttctttgtccaagtgcatgatgtttctccagagcaacctcgaacagtcatcaaagcaccccgcgtcagcactgcacaggatgtcattcagcagaccttatgcaaagccaaatattcctacagcatcctgagcaaccccaatccaagcgactatgtgcttttggaagaggtggtgaaagacactaccaacaagaagactaccacaccaaagtcctctcagcgggtccttctggatcaggagtgtgtgtttcaagcccaaagcaagtggaaaggtgcaggaaaattcatccttaagctaaaggagcaggtgcaggcatctcgagaagataaaaagaaaggcatttctttcgcaagtgaactcaagaagctcaccaagtcaactaaacagccccgaggacttacatcaccttctcagctcttgacctcagaaagtatccaaaccaaggaggagaaacctgtgggtggcttgtcctccagtgacacaatggattaccgacagtgactaagggcagcatgtttaacccaggtgaagatctttaagcaagaagttaaagagtgaacatggtggaaaaaatataattattttcatcagacttaaactggaaattgatgatttctgaactgaagccttcacacatgtgagatccatgctgaggagaagcaaaatggcacagggctagttgccaccaaccaatttactgatgaatgaagcccaggggactgccattttataaatgtcagcagttggaaaaatcgtcacgaattgacttagagcaagggtcagcaagcttgtctgtaaagggccaaacagtaaatattttagggctgggggccataaaatatgttgcaaccacccaattctgccattgtagtgcaaaagcagccatagacaacacatacatgaacgaacgtggctgtattccaataaaactttatttatggacactgaaa

SEQ ID NO: 433358 - DNA, 6877 bp, Homo sapiens
  misc_feature (206)..(206): n is a, c, g, or t
atggtttcagaaggaagtgcagcaggaagagactttgcaggaatggaagaggtgaggcagctccacgtgagattctgcaaagggattaagatttggcaccaggcttggtttctgtgcagcctcttaggcagagagccccaggagagggaagcaggctgtcagctgtggctttgcacgctctcagctgtcttgaaggttggttggcncttcccgctctctgaggtacccaattttaccttgttaaaggatggatgtggatgctggaggcttaaagaagaccagatctacaatgcagtgagaagagaagaaacagaaaatacagttggatctctactccatttcctcaccaagctcccagcctccgagacagcccatggaaggataagcgttggtccatgcttaaagcaatgtgtccgagacactgtatgtgagtatcgcgccaccctccaaaggacttcaatatcgcagtacatcaccggttctctcctagaagcaaccacgtctttgggagcaagaagtggccttctcagtacttttggaggatccactggacgaatgatgctgaaagaacgccagccaggcccctctgtggccaattccaatgccctcccttcaagttcagctgggatcagcaaggagctgatcgatctgcagcctctcatccagttcccagaggaagtcgccagcatcctgatggagcaagagcagactatttaccgcagggtcttgccagtcgactacctttgcttcttaacacgggacttgggcactcctgaatgccagagctccttgccctgcctcaaagcatccatctcagcgtcgattcttaccactcagaatggagagcacaatgcccttgaagatctggtgatgaggtttaatgaggtgagctcctgggtgacatggctgatcctcacggcaggctccatggaggagaagcgagaagtcttttcatatttggtgcatgtggccaaatgctgctggaacatgggcaactacaacgctgtcatggagttcttggctggcctcaggtcaagaaaagttttaaaaatgtggcagttcatggaccagtctgatattgagaccatgaggagcctgaaggatgctatggcccagcatgagtcctcttgtgagtacagaaaggtggtgacacgtgccctgcacatccctggctgtaaggtggttccattctgtggggtgtttctgaaggagctctgtgaagtgcttgacggcgcctccggtctcatgaagctttgcccgcggtacaattcccaagaagaaactttagagtttgtagcagattacagtggacaagataatttcttacaacgagtgggacaaaatggcttaaagaattcggagaaggagtccactgtcaacagcatctttcaggtcatccggagctgcaatcgaagtctggagacagacgaggaggacagccccagtgaaggaaacagctccaggaaaagctccttgaaggataaaagccgatggcagtttataattggagatttgttggattcagacaatgacatctttgagcaatccaaagaatacgactctcatggttcagaggactcacagaaggccttcgaccatgggacggagctcatcccttggtacgtgctgtccatccaagccgatgtgcaccagttcctgctgcagggggccacggtcatccactacgaccaggacacacacctctctgcccgctgcttcctccagcttcagcccgacaatagcaccttgacctgggtaaagcccacaactgcctccccagccagcagtaaagcaaaacttggtgtacttaataacacagctgagcctggaaaattcccactactgggtaatgctggattaagtagcctgacggaaggggtcttggatctttttgcagtgaaggctgtatacatgggccaccctggcattgatatacacactgtgtgtgttcagaacaaactgggtagcatgttcctgtcagagactggtgtgacattgctctatgggcttcagaccacagacaacagattattgcacttcgtggcaccaaagcacacagctaaaatgctcttcagcggattattggaactcactagagctgtgagaaagatgaggaaattccctgaccaaagacagcagtggctgcggaaacagtacgtcagcctttatcaggaggatggacggtatgaaggcccaactttggctcacgctgtggagttgtttggtggcagacggtggagtgctcgaaaccccagccccggaacatcagcaaagaatgctgagaagcccaatatgcagagaaacaataccctgggcataagcactaccaagaaaaagaagaaaatcctcatgaggggtgagagtggagaggtaactgacgatgagatggcaacccgaaaggccaagatgcacaaagagtgtcgaagccggagtggttctgatcctcaagacattaatgaacaagaagaatcagaggtgaatgccatcgctaaccctccaaaccccctcccttccagaagagcccactctttgaccacagctgggtcccccaacttggctgccgggacgtcatctcccatcaggccagtgtcctcccctgtgctgtcttcttcaaacaagagcccatccagtgcttggagcagtagtagctggcacgggcggatcaaaggcggcatgaagggatttcagagcttcatggtttcagatagcaacatgagttttgttgaatttgttgagctgttcaaatcattcagtgtcaggagccgcaaggacctgaaggatctgtttgatgtctatgcagtgccctgcaaccgatctggctccgagtcagccccactctacaccaacctgacaattgatgaaaacaccagcgatcttcagcctgacctagatctgttgaccagaaatgtctcggatttggggttgttcattaagagtaaacagcagctatcggacaaccagaggcagatatctgatgccattgctgctgcaagcattgtgacaaatggcactgggattgagagcacatctctgggcatttttggggtgggcatacttcagctcaacgatttcctcgtgaattgccaaggagaacactgcacttatgatgaaatcctcagcatcatccagaagttcgagcctagcatcagtatgtgtcatcagggactaatgtcatttgaagggtttgccaggtttctgatggataaagaaaattttgcctcaaaaaatgatgagtcacaggagaacattaaagaactgcagctacccctctcatactattacatcgaatcttcgcacaatacctacctcacgggccatcagctcaaaggagaatcctcggtagaactctacagccaggtccttttgcaaggctgtcgaagtgtagaattggactgctgggacggagacgatgggatgcccatcatttatcatggacatacgctgacaaccaagatccccttcaaggaagtggttgaagccattgatcgcagtgccttcatcaactctgacctgccaatcatcatatcgattgagaaccactgttcattgcctcagcaacgaaaaatggcagaaattttcaagactgtgtttggagaaaagctggtgactaaattcttatttgagactgatttctcagatgatccaatgcttccttcacctgaccaactcagaaagaaagttcttcttaaaaacaagaagctaaaagcccatcagacgccagtggatatcttaaagcaaaaggctcatcagttagcatctatgcaagtgcaggcttataatggtgggaatgccaacccccgacctgccaataatgaggaagaggaagatgaggaggacgaatatgattatgactatgaatccctttctgatgacaacattctggaagacagacctgaaaataaatcatgtaatgacaagcttcagtttgaatataatgaagaaatcccaaagaggataaagaaagcagataactctgcttgcaacaaaggaaaggtttatgatatggaactgggagaagaattttatcttgatcagaataaaaaggaaagcagacagattgcaccagagctttctgaccttgtaatctattgtcaagcagtaaaatttccaggactgtcaactctaaatgcatctggctctagcagaggaaaagaaaggaaaagcaggaagtccatttttggcaacaatccgggcagaatgagcccaggggagacagcatcatttaacaaaacatctggaaaaagttcctgtgaaggcattcgacagacctgggaggaatcttcttcccctctcaacccaaccacgtccctcagtgctatcattagaactcccaaatgttatcatatctcgtcgctgaatgaaaatgccgccaaacgtctgtgtcgcaggtattctcagaaactgacccagcacaccgcctgtcagctgctgagaacttaccctgctgccacccgcatcgactcttccaacccgaaccccctcatgttctggctccatgggatacagcttgtggcactcaactaccagactgatgatctccctttacatttaaatgctgcaatgtttgaggcaaatggtggttgtggttatgtattgaaacctccagttctgtgggacaagaactgccccatgtatcagaagttttctccactagaaagagatctggacagcatggatcctgcagtctattctttaactattgtctctggtcagaatgtgtgccccagtaatagcatgggaagcccgtgcattgaagtcgacgtcctgggcatgcctctggacagctgccatttccgcacaaagcccatccatcgaaacaccctgaaccccatgtggaacgagcagtttctgttccacgttcacttcgaagatcttgtatttcttcgttttgcagttgtggaaaacaatagttcagcggtaactgctcagagaatcattccactgaaagctttaaaacgaggatatcgacatcttcagctgcgaaaccttcacaatgaagtcttggagatttctagtttattcattaacagcagaaggatggaagaaaattcctctggcaataccatgtcagcctcttcgatgtttaatacagaagaaagaaaatgtttgcagactcacagagtcacggtgcatggggtcccagggccagagccctttaccgttttcactattaatggaggcaccaaggcaaagcagcttctgcagcaaattctgacaaatgaacaagacatcaaacctgttaccacagactattttttgatggaagaaaaatattttatatctaaagaaaagaatgaatgtaggaaacaaccattccagagagccattggtccagaagaggagatcatgcaaattttaagcagctggtttccagaagagggatacatgggcaggattgtcttaaaaacccagcaggaaaacctagaagagaaaaacattgttcaagatgacaaagaggtgatcttgagctcagaggaggagagtttctttgtccaagtgcatgatgtttctccagagcaacctcgaacagtcatcaaagcaccccgcgtcagcactgcacaggatgtcattcagcagaccttatgcaaagccaaatattcctacagcatcctgagcaaccccaatccaagcgactatgtgcttttggaagaggtggtgaaagacactaccaacaagaagactaccacaccaaagtcctctcagcgggtccttctggatcaggagtgtgtgtttcaagcccaaagcaagtggaaaggtgcaggaaaattcatccttaagctaaaggagcaggtgcaggcatctcgagaagataaaaagaaaggcatttctttcgcaagtgaactcaagaagctcaccaagtcaactaaacagccccgaggacttacatcaccttctcagctcttgacctcagaaagtatccaaaccaaggaggagaaacctgtgggtggcttgtcctccagtgacacaatggattaccgacagtgactaagggcagcatgtttaacccaggtgaagatctttaagcaagaagttaaagagtgaacatggtggaaaaaatataattattttcatcagacttaaactggaaattgatgatttctgaactgaagccttcacacatgtgagatccatgctgaggagaagcaaaatggcacagggctagttgccaccaaccaatttactgatgaatgaagcccaggggactgccattttataaatgtcagcagttggaaaaatcgtcacgaattgacttagagcaagggtcagcaagcttgtctgtaaagggccaaacagtaaatattttagggctgggggccataaaatatgttgcaaccacccaattctgccattgtagtgcaaaagcagccatagacaacacatacatgaacgaacgtggctgtattccaataaaactttatttatggacactgaaattggaatttcatatatttttcacatgtcacaaatactcttgttttgactttttttcaaccatttaaaaacttaaaaactattcttaattcaggggccatacaaaaacaggtggcaggctagatttggcccaaggaccttaatttgccaacacaactaagagaagagaactgggaacaaggagcacaaagatctgaaaacaggaaaggaagtttagccatacattttatggccgagaattagaagcttagaattagaagctttggggcatttcaagtgtaaatatgtcctataacataagagtcattaaaattcaatttagttcctgtattgtgtaccacagtgcactcctctttaggatttttttacatatagaaataatattgggttttttttaaggttattgcctattcagttaatagggttgctttaaaaaaggttattg

SEQ ID NO: 433359 - DNA, 4304 bp, Homo sapiens
cattaatatttaaaagctcttctctgttttcatctaaggactggttaagaaaggaatcagacaatacactcaaaggtttcttcttaaatgtaattctataacttagaatatagaaaagaacgtgcattatttcccatagattaagagtgagtaatttggggctctttttaatagacatcttcagaaacactgagttattttgcccattgatctgcaatttcaaagaactgatttgattaatagaggaatattaacctcagccctgggcccttattaaatagactagaaacatgttttctttttcacatagaacatgttttatttcctctgatacaatataggttaagagatgtgaaaagagagtactggaaaatagcttcaatcttaaataacttgcactcatccttttgctcatattgctaattgggagcaagtctggtgggacagaatcacaacagtggcctgcccttgtgcccatgaaggccttgtctttgttgcagtgcttggagcagtagtagctggcacgggcggatcaaaggcggcatgaagggatttcagagcttcatggtttcagatagcaacatgagttttgttgaatttgttgagctgttcaaatcattcagtgtcaggagccgcaaggacctgaaggatctgtttgatgtctatgcagtgccctgcaaccgatctggctccgagtcagccccactctacaccaacctgacaattgatgaaaacaccagcgatcttcagcctgacctagatctgttgaccagaaatgtctcggatttggggttgttcattaagagtaaacagcagctatcggacaaccagaggcagatatctgatgccattgctgctgcaagcattgtgacaaatggcactgggattgagagcacatctctgggcatttttggggtgggcatacttcagctcaacgatttcctcgtgaattgccaaggagaacactgcacttatgatgaaatcctcagcatcatccagaagttcgagcctagcatcagtatgtgtcatcagggactaatgtcatttgaagggtttgccaggtttctgatggataaagaaaattttgcctcaaaaaatgatgagtcacaggagaacattaaagaactgcagctacccctctcatactattacatcgaatcttcgcacaatacctacctcacgggccatcagctcaaaggagaatcctcggtagaactctacagccaggtccttttgcaaggctgtcgaagtgtagaattggactgctgggacggagacgatgggatgcccatcatttatcatggacatacgctgacaaccaagatccccttcaaggaagtggttgaagccattgatcgcagtgccttcatcaactctgacctgccaatcatcatatcgattgagaaccactgttcattgcctcagcaacgaaaaatggcagaaattttcaagactgtgtttggagaaaagctggtgactaaattcttatttgagactgatttctcagatgatccaatgcttccttcacctgaccaactcagaaagaaagttcttcttaaaaacaagaagctaaaagcccatcagacgccagtggatatcttaaagcaaaaggctcatcagttagcatctatgcaagtgcaggcttataatggtgggaatgccaacccccgacctgccaataatgaggaagaggaagatgaggaggacgaatatgattatgactatgaatccctttctgatgacaacattctggaagacagacctgaaaataaatcatgtaatgacaagcttcagtttgaatataatgaagaaatcccaaagaggataaagaaagcagataactctgcttgcaacaaaggaaaggtttatgatatggaactgggagaagaattttatcttgatcagaataaaaaggaaagcagacagattgcaccagagctttctgaccttgtaatctattgtcaagcagtaaaatttccaggactgtcaactctaaatgcatctggctctagcagaggaaaagaaaggaaaagcaggaagtccatttttggcaacaatccgggcagaatgagcccaggggagacagcatcatttaacaaaacatctggaaaaagttcctgtgaaggcattcgacagacctgggaggaatcttcttcccctctcaacccaaccacgtccctcagtgctatcattagaactcccaaatgttatcatatctcgtcgctgaatgaaaatgccgccaaacgtctgtgtcgcaggtattctcagaaactgacccagcacaccgcctgtcagctgctgagaacttaccctgctgccacccgcatcgactcttccaacccgaaccccctcatgttctggctccatgggatacagcttgtggcactcaactaccagactgatgatctccctttacatttaaatgctgcaatgtttgaggcaaatggtggttgtggttatgtattgaaacctccagttctgtgggacaagaactgccccatgtatcagaagttttctccactagaaagagatctggacagcatggatcctgcagtctattctttaactattgtctctggtcagaatgtgtgccccagtaatagcatgggaagcccgtgcattgaagtcgacgtcctgggcatgcctctggacagctgccatttccgcacaaagcccatccatcgaaacaccctgaaccccatgtggaacgagcagtttctgttccacgttcacttcgaagatcttgtatttcttcgttttgcagttgtggaaaacaatagttcagcggtaactgctcagagaatcattccactgaaagctttaaaacgaggatatcgacatcttcagctgcgaaaccttcacaatgaagtcttggagatttctagtttattcattaacagcagaaggatggaagaaaattcctctggcaataccatgtcagcctcttcgatgtttaatacagaagaaagaaaatgtttgcagactcacagagtcacggtgcatggggtcccagggccagagccctttaccgttttcactattaatggaggcaccaaggcaaagcagcttctgcagcaaattctgacaaatgaacaagacatcaaacctgttaccacagactattttttgatggaagaaaaatattttatatctaaagaaaagaatgaatgtaggaaacaaccattccagagagccattggtccagaagaggagatcatgcaaattttaagcagctggtttccagaagagggatacatgggcaggattgtcttaaaaacccagcaggaaaacctagaagagaaaaacattgttcaagatgacaaagaggtgatcttgagctcagaggaggagagtttctttgtccaagtgcatgatgtttctccagagcaacctcgaacagtcatcaaagcaccccgcgtcagcactgcacaggatgtcattcagcagaccttatgcaaagccaaatattcctacagcatcctgagcaaccccaatccaagcgactatgtgcttttggaagaggtggtgaaagacactaccaacaagaagactaccacaccaaagtcctctcagcgggtccttctggatcaggagtgtgtgtttcaagcccaaagcaagtggaaaggtgcaggaaaattcatccttaagctaaaggagcaggtgcaggcatctcgagaagataaaaagaaaggcatttctttcgcaagtgaactcaagaagctcaccaagtcaactaaacagccccgaggacttacatcaccttctcagctcttgacctcagaaagtatccaaaccaaggaggagaaacctgtgggtggcttgtcctccagtgacacaatggattaccgacagtgactaagggcagcatgtttaacccaggtgaagatctttaagcaagaagttaaagagtgaacatggtggaaaaaatataattattttcatcagacttaaactggaaattgatgatttctgaactgaagccttcacacatgtgagatccatgctgaggagaagcaaaatggcacagggctagttgccaccaaccaatttactgatgaatgaagcccaggggactgccattttataaatgtcagcagttggaaaaatcgtcacgaattgacttagagcaagggtcagcaagcttgtctgtaaagggccaaacagtaaatattttagggctgggggccataaaatatgttgcaaccacccaattctgccattgtagtgcaaaagcagccatagacaacacatacatgaacgaacgtggctgtattccaataaaactttatttatggacactgaaa

SEQ ID NO: 433360 - DNA, 1407 bp, Homo sapiens
tacaacacatcataaactcacgaccacacttacctacacgtcgagattcagtatgtttaatacagaagaaagaaaatgtttgcagactcacagagtcacggtgcatggggtcccagggccagagccctttaccgttttcactattaatggaggcaccaaggcaaagcagcttctgcagcaaattctgacaaatgaacaagacatcaaacctgttaccacagactattttttgatggaagaaaaatattttatatctaaagaaaagaatgaatgtaggaaacaaccattccagagagccattggtccagaagaggagatcatgcaaattttaagcagctggtttccagaagagggatacatgggcaggattgtcttaaaaacccagcaggaaaacctagaagagaaaaacattgttcaagatgacaaagaggtgatcttgagctcagaggaggagagtttctttgtccaagtgcatgatgtttctccagagcaacctcgaacagtcatcaaagcaccccgcgtcagcactgcacaggatgtcattcagcagaccttatgcaaagccaaatattcctacagcatcctgagcaaccccaatccaagcgactatgtgcttttggaagaggtggtgaaagacactaccaacaagaagactaccacaccaaagtcctctcagcgggtccttctggatcaggagtgtgtgtttcaagcccaaagcaagtggaaaggtgcaggaaaattcatccttaagctaaaggagcaggtgcaggcatctcgagaagataaaaagaaaggcatttctttcgcaagtgaactcaagaagctcaccaagtcaactaaacagccccgaggacttacatcaccttctcagctcttgacctcagaaagtatccaaaccaaggaggagaaacctgtgggtggcttgtcctccagtgacacaatggattaccgacagtgactaagggcagcatgtttaacccaggtgaagatctttaagcaagaagttaaagagtgaacatggtggaaaaaatataattattttcatcagacttaaactggaaattgatgatttctgaactgaagccttcacacatgtgagatccatgctgaggagaagcaaaatggcacagggctagttgccaccaaccaatttactgatgaatgaagcccaggggactgccattttataaatgtcagcagttggaaaaatcgtcacgaattgacttagagcaagggtcagcaagcttgtctgtaaagggccaaacagtaaatattttagggctgggggccataaaatatgttgcaaccacccaattctgccattgtagtgcaaaagcagccatagacaacacatacatgaacgaacgtggctgtattccaataaaactttatttatggacactgaaa

SEQ ID NO: 433361 - DNA, 1415 bp, Homo sapiens
acatgctgcgaaatcgacttaataagcatacgtgacaataaccctgcgcgcggttctactatgtttaatacagaagaaagaaaatgtttgcagactcacagagtcacggtgcatggggtcccagggccagagccctttaccgttttcactattaatggaggcaccaaggcaaagcagcttctgcagcaaattctgacaaatgaacaagacatcaaacctgttaccacagactattttttgatggaagaaaaatattttatatctaaagaaaagaatgaatgtaggaaacaaccattccagagagccattggtccagaagaggagatcatgcaaattttaagcagctggtttccagaagagggatacatgggcaggattgtcttaaaaacccagcaggaaaacctagaagagaaaaacattgttcaagatgacaaagaggtgatcttgagctcagaggaggagagtttctttgtccaagtgcatgatgtttctccagagcaacctcgaacagtcatcaaagcaccccgcgtcagcactgcacaggatgtcattcagcagaccttatgcaaagccaaatattcctacagcatcctgagcaaccccaatccaagcgactatgtgcttttggaagaggtggtgaaagacactaccaacaagaagactaccacaccaaagtcctctcagcgggtccttctggatcaggagtgtgtgtttcaagcccaaagcaagtggaaaggtgcaggaaaattcatccttaagctaaaggagcaggtgcaggcatctcgagaagataaaaagaaaggcatttctttcgcaagtgaactcaagaagctcaccaagtcaactaaacagccccgaggacttacatcaccttctcagctcttgacctcagaaagtatccaaaccaaggaggagaaacctgtgggtggcttgtcctccagtgacacaatggattaccgacagtgactaagggcagcatgtttaacccaggtgaagatctttaagcaagaagttaaagagtgaacatggtggaaaaaatataattattttcatcagacttaaactggaaattgatgatttctgaactgaagccttcacacatgtgagatccatgctgaggagaagcaaaatggcacagggctagttgccaccaaccaatttactgatgaatgaagcccaggggactgccattttataaatgtcagcagttggaaaaatcgtcacgaattgacttagagcaagggtcagcaagcttgtctgtaaagggccaaacagtaaatattttagggctgggggccataaaatatgttgcaaccacccaattctgccattgtagtgcaaaagcagccatagacaacacatacatgaacgaacgtggctgtattccaataaaactttatttatggacactgaaa

SEQ ID NO: 433362 - DNA, 1412 bp, Homo sapiens
aaaaccacgatccaatagtattctataccgtcacctcccaccccactagttatacacatgtttaatacagaagaaagaaaatgtttgcagactcacagagtcacggtgcatggggtcccagggccagagccctttaccgttttcactattaatggaggcaccaaggcaaagcagcttctgcagcaaattctgacaaatgaacaagacatcaaacctgttaccacagactattttttgatggaagaaaaatattttatatctaaagaaaagaatgaatgtaggaaacaaccattccagagagccattggtccagaagaggagatcatgcaaattttaagcagctggtttccagaagagggatacatgggcaggattgtcttaaaaacccagcaggaaaacctagaagagaaaaacattgttcaagatgacaaagaggtgatcttgagctcagaggaggagagtttctttgtccaagtgcatgatgtttctccagagcaacctcgaacagtcatcaaagcaccccgcgtcagcactgcacaggatgtcattcagcagaccttatgcaaagccaaatattcctacagcatcctgagcaaccccaatccaagcgactatgtgcttttggaagaggtggtgaaagacactaccaacaagaagactaccacaccaaagtcctctcagcgggtccttctggatcaggagtgtgtgtttcaagcccaaagcaagtggaaaggtgcaggaaaattcatccttaagctaaaggagcaggtgcaggcatctcgagaagataaaaagaaaggcatttctttcgcaagtgaactcaagaagctcaccaagtcaactaaacagccccgaggacttacatcaccttctcagctcttgacctcagaaagtatccaaaccaaggaggagaaacctgtgggtggcttgtcctccagtgacacaatggattaccgacagtgactaagggcagcatgtttaacccaggtgaagatctttaagcaagaagttaaagagtgaacatggtggaaaaaatataattattttcatcagacttaaactggaaattgatgatttctgaactgaagccttcacacatgtgagatccatgctgaggagaagcaaaatggcacagggctagttgccaccaaccaatttactgatgaatgaagcccaggggactgccattttataaatgtcagcagttggaaaaatcgtcacgaattgacttagagcaagggtcagcaagcttgtctgtaaagggccaaacagtaaatattttagggctgggggccataaaatatgttgcaaccacccaattctgccattgtagtgcaaaagcagccatagacaacacatacatgaacgaacgtggctgtattccaataaaactttatttatggacactgaaa

SEQ ID NO: 433363 - DNA, 1411 bp, Homo sapiens
ccccagcacataagaatgtccgtgaacaaaacatcaaaaacgcctgtagttatacaatgtttaatacagaagaaagaaaatgtttgcagactcacagagtcacggtgcatggggtcccagggccagagccctttaccgttttcactattaatggaggcaccaaggcaaagcagcttctgcagcaaattctgacaaatgaacaagacatcaaacctgttaccacagactattttttgatggaagaaaaatattttatatctaaagaaaagaatgaatgtaggaaacaaccattccagagagccattggtccagaagaggagatcatgcaaattttaagcagctggtttccagaagagggatacatgggcaggattgtcttaaaaacccagcaggaaaacctagaagagaaaaacattgttcaagatgacaaagaggtgatcttgagctcagaggaggagagtttctttgtccaagtgcatgatgtttctccagagcaacctcgaacagtcatcaaagcaccccgcgtcagcactgcacaggatgtcattcagcagaccttatgcaaagccaaatattcctacagcatcctgagcaaccccaatccaagcgactatgtgcttttggaagaggtggtgaaagacactaccaacaagaagactaccacaccaaagtcctctcagcgggtccttctggatcaggagtgtgtgtttcaagcccaaagcaagtggaaaggtgcaggaaaattcatccttaagctaaaggagcaggtgcaggcatctcgagaagataaaaagaaaggcatttctttcgcaagtgaactcaagaagctcaccaagtcaactaaacagccccgaggacttacatcaccttctcagctcttgacctcagaaagtatccaaaccaaggaggagaaacctgtgggtggcttgtcctccagtgacacaatggattaccgacagtgactaagggcagcatgtttaacccaggtgaagatctttaagcaagaagttaaagagtgaacatggtggaaaaaatataattattttcatcagacttaaactggaaattgatgatttctgaactgaagccttcacacatgtgagatccatgctgaggagaagcaaaatggcacagggctagttgccaccaaccaatttactgatgaatgaagcccaggggactgccattttataaatgtcagcagttggaaaaatcgtcacgaattgacttagagcaagggtcagcaagcttgtctgtaaagggccaaacagtaaatattttagggctgggggccataaaatatgttgcaaccacccaattctgccattgtagtgcaaaagcagccatagacaacacatacatgaacgaacgtggctgtattccaataaaactttatttatggacactgaaa

SEQ ID NO: 433364 - DNA, 2684 bp, Homo sapiens
  misc_feature (101)..(101): n is a, c, g, or t
atctaccaccttaaaaccctgatctagaaaaaatatatattcatgataggaagttataactaagaaaatttatttgcctcttaatgctcctgaatgaaagnaattatccctttgttctttgggaggacttgtgtatctgagattgttgtaataatcagtcattttattaaaaccttgacatgatcaccagggaggaaaaatagagcaatagtcaaaacctgtgtgttagtccaagatgacttctgaagaaatgacagcttctgttctcatacctgtgactcagagaaaagtggtttctgcccagtcggctgcagatgaaagtagtgaaaaggtctcagacatcaatatttcaaaagcacatactgtcagacgaagtggggagacttctcataccatctcacaactgaacaaacttaaagaagaaccttctggaagcaacttgccaaagattctctcaatagcgagggagaaaatagtgagtgatgagaacagtaatgaaaaatgttgggagaaaatcatgccagattctgcgaaaaaccttaacattaactgcaacaacatattgagaaaccatcagcatggccttcctcagagacaattttatgaaatgtacaactctgttgctgaggaagacttgtgtttagaaactggaattccttctccactggaaagaaaggtgttccctggaattcaactggaactagacagaccttccatgggcattagtcctttaggaaatcagtcagtgatcatagagacaggcagagcacaccctgacagcagaagggcagtatttcattttcattatgaagttgacagaagaatgtcagacactttctgtaccctatcagaaaacttaattttagacgattgtggaaattgtgtaccactacctgggggtgaggagaagcaaaagaaaaactatgtggcatatacctgtaaactgatggaattggccaaaaattgtgataataagaatgagcagctgcagtgtgatcattgtgacaccttgaatgataaatacttttgctttgaaggctcttgtgagaaggttgacatggtatattcaggtgatagcttttgtaggaaagactttactgacagtcaagctgccaagacctttttgagccattttgaggacttccctgataattgtgatgatgtagaagaagacgcttttaaaagcaaaaaggagcgatccactttgttagtcaggagattctgtaaaaatgacagagaagttaagaaatctgtgtatactggaacaagagcaattgtgagaactctgccttctggccacattgggctgactgcatggagttacatagatcagaagagaaatggtcccttactgccttgtgggagagtaatggaacccccgtcaacagtggagataaggcaagatgggagccaacgtctgtcagaagcccagtggtatcctatctacaatgcagtgagaagagaagaaacagaaaatacagttggatctctactccatttcctcaccaagctcccagcctccgagacagcccatggaaggataagcgttggtccatgcttaaagcaatgtgtccgagacactgtatgtgagtatcgcgccaccctccaaaggacttcaatatcgcagtacatcaccggttctctcctagaagcaaccacgtctttgggagcaagaagtggccttctcagtacttttggaggatccactggacgaatgatgctgaaagaacgccagccaggcccctctgtggccaattccaatgccctcccttcaagttcagctgggatcagcaaggagctgatcgatctgcagcctctcatccagttcccagaggaagtcgccagcatcctgatggagcaagagcagactatttaccgcagggtcttgccagtcgactacctttgcttcttaacacgggacttgggcactcctgaatgccagagctccttgccctgcctcaaagcatccatctcagcgtcgattcttaccactcagaatggagagcacaatgcccttgaagatctggtgatgaggtttaatgaggtgagctcctgggtgacatggctgatcctcacggcaggctccatggaggagaagcgagaagtcttttcatatttggtgcatgtggccaaatgctgctggaacatgggcaactacaacgctgtcatggagttcttggctggcctcaggtcaagaaaagttttaaaaatgtggcagttcatggaccagtctgatattgagaccatgaggagcctgaaggatgctatggcccagcatgagtcctcttgtgagtacagaaaggtggtgacacgtgccctgcacatccctggctgtaaggtggttccattctgtggggtgtttctgaaggagctctgtgaagtgcttgacggcgcctccggtctcatgaagctttgcccgcggtacaattcccaagaagaaactttagagtttgtagcagattacagtggacaagataatttcttacaacgagtgggacaaaatggcttaaagaattcggagaaggagtccactgtcaacagcatctttcaggtcatccggagctgcaatcgaagtctggagacagacgaggaggacagccccagtgaaggaaacagctccaggaaaagctccttgaaggataaaagccgatggcagtaagttttacacgttaaaagtgaggaat

SEQ ID NO: 433365 - DNA, 443 bp, Homo sapiens
cattaatatttaaaagctcttctctgttttcatctaaggactggttaagaaaggaatcagacaatacactcaaaggtttcttcttaaatgtaattctataacttagaatatagaaaagaacgtgcattatttcccatagattaagagtgagtaatttggggctctttttaatagacatcttcagaaacactgagttattttgcccattgatctgcaatttcaaagaactgatttgattaatagaggaatattaacctcagccctgggcccttattaaatagactagaaacatgttttctttttcacatagaacatgttttatttcctctgatacaatataggttaagagatgtgaaaagagagtactggaaaatagcttcaatcttaaataacttgcactcatccttttgctcatattgctaattgggagcaagtctggtggg

SEQ ID NO: 433366 - DNA, 463 bp, Homo sapiens
tcagatttttgctagatttgtctttctttattctgcataaacctattatttactcacattttttctttttaaacatagaacctagaagagaaaaacattgttcaagatgacaaagaggtgatcttgagctcagaggaggagagtttctttgtccaagtgcatgatgtttctccagagcaacctcgaacagtcatcaaagcaccccgcgtcagcactgcacaggatgtcattcagcaggtaaaagcctctcccttcctcacctgagtcctttcctcagcataaattattggaacaaatgtctgtgcactgatggctcattttatgagtgaagttcctcaacaacagggacctcaaaggggagtgtgtgcctcttaaggctgggaaattgcctcacatggtggctcatgcctgtaatcccagttttaggaagctgaggcaggaggattacttgagcacaggagtt

SEQ ID NO: 433367 - DNA, 440 bp, Homo sapiens
gcggcatgaagggatttcagagcttcatggtttcagatagcaacatgagttttgttgaatttgttgagctgttcaaatcattcaggtacagtcttatgtttccttcttattctttctcaggcccccccatttctataaagatactcaatgagaggtgttttccattcctcattcagtgtcaggagccgcaaggacctgaaggatctgtttgatgtctatgcagtgccctgcaaccgatctggctccgagtcagccccactctacaccaacctgacaattgatgaaaacaccagcgatcttcagcctgacctaggtttgttgaacattttaggatttccctttgggatcaatctgtctaaaacttaaggtcagaggtccagtcacacaaactctgagcctgtcccacatagtgtgctattactgctgtgtagggaaagact

SEQ ID NO: 433368 - DNA, 6955 bp, Homo sapiens
  misc_feature (6898)..(6898): n is a, c, g, or t
  misc_feature (6950)..(6951): n is a, c, g, or t
ccagccggcgcttgcgcggtggcacgggcgagtgggggggcgaggaggtggaggaggaggaggaggaggaggaggtggcggcgagaagatggcgacttcgaacaatccgcggaaattcagcgagaagatcgcgctgcacaatcagaagcaggcggaggagacggcggccttcgaggaggtcatgaaggacctgagcctgacgcgggccgcgcggctccagctccagaaatcccagtacctgcaactgggccccagccgaggccagtactatggcgggtccctgcccaacgtgaaccagatcgggagtggcaccatggacctgcccttccagcccagcggatttctgggggaggccctggcagcggctcctgtctctctgacccccttccaatcctcgggcctggacaccagccggaccacccggcaccatgggctggtggacagggtgtaccgggagcgtggccggctcggctccccacaccgccggcccctgtcagtggacaaacacggacggcaggccgacagctgcccctatggcaccatgtacctctcaccacccgcggacaccagctggagaaggaccaattctgactccgccctgcaccagagcacaatgacgcccacgcagccagaatcctttagcagtgggtcccaggacgtgcaccagaaaagagtcttactgttaacagtcccaggaatggaagagaccacatcagaggcagacaaaaacctttccaagcaagcatgggacaccaagaagacggggtccaggcccaagtcctgtgaggtccccggaatcaacatcttcccgtctgccgaccaggaaaacactacagccctgatccccgccacccacaacacaggggggtccctgcccgacctgaccaacatccacttcccctccccgctcccgaccccgctggaccccgaggagcccaccttccctgcactgagcagctccagcagcaccggcaacctcgcggccaacctgacgcacctgggcatcggtggcgccggccagggaatgagcacacctggctcctctccacagcaccgcccagctggcgtcagccccctgtccctgagcacagaggcaaggcgtcagcaggcatcgcccaccctgtccccgctgtcacccatcactcaggctgtagccatggacgccctgtctctggagcagcagctgccctacgccttcttcacccaggcgggctcccagcagccaccgccgcagccccagcccccgccgcctcctccacccgcgtcccagcagccaccacccccgccacccccacaggcgcccgtccgcctgccccctggtggccccctgttgcccagcgccagcctgactcgtgggccacagccgcccccgcttgcagtcacggtaccgtcctctctcccccagtcccccccagagaaccctggccagccatcgatggggatcgacatcgcctcggcgccggctctgcagcagtaccgcactagcgccggctccccggccaaccagtctcccacctcgccagtctccaatcaaggcttctccccagggagctccccgcaacacacttccaccctgggcagcgtgtttggggacgcgtactatgagcagcagatggcggccaggcaggccaatgctctgtcccaccagctggagcagttcaacatgatggagaacgccatcagctccagcagcctgtacagcccgggctccacactcaactactcgcaggcggccatgatgggcctcacgggcagccacgggagcctgccggactcgcagcaactgggatacgccagccacagtggcatccccaacatcatcctcacagtgacaggagagtccccccccagcctctctaaagaactgaccagctctctggccggggtcggcgacgtcagcttcgactccgacagccagtttcccctggacgaactcaagatcgaccccctgaccctcgacggactgcacatgctcaacgaccccgacatggttctggccgacccagccaccgaggacaccttccggatggaccgcctgtgagcgggcacgccggcaccctgccgctcagccgtcccgacggcgcctccccagcccggggacggccgtgctccgtccctcgccaacggccgagcttgtgattctgagcttgcaatgccgccaagcgccccccgccagcccgcccccggttgtccacctcccgcgaagcccaatcgcgaggccgcgagccgggccgtccacccacccgcccgcccagggctgggctgggatcggaggccgtgagcctcccgcccctgcagaccctccctgcactggctccctcgcccccagccccggggcctgagccgtcccctgtaagatgcgggaagtgtcagctcccggcgtggcgggcaggctcaggggaggggcgcgcatggtccgccagggctgtgggccgtggcgcattttccgactgtttgtccagctctcactgccttccttggttcccggtcccccagcccatccgccatccccagcccgtggtcaggtagagagtgagccccacgccgccccagggaggaggcgccagagcgcggggcagacgcaaagtgaaataaacactattttgacggctgtcttttatatttctgagcacacacagagccctggcgtccaccggggcaggcgcaaagtggacagagcatgcagggcggcggacccccccacgaccctcctcgccctgtctccatcccctcgaagccctgcctcaccgcaggcaggcccatcggtggccacctttgccgggaagtgaccggaaggccccgtgaggggtcgaacgcggaggcaggggttacctcttggggctttacaatccgtggcccctcctgtcctgcactgtggtcaccggtcctgtcatagatgctgttaatttaaggtacaggcagaggtggccaggggagtttcattgtggtttttttttccttttagtttctagttacattttggttgtagatgactcgcttaatcttttaagccaacacttgcctgagagcatgtttttatttcagaaatccaactttacctattttttaagctaactggaaatggaggccatgcgccccaaagcagcccgccacccacctgagtgtaagaagtgagtccggcttttgggtttcaccccaagttatctcaaaacaaaagggctggtcaggctgggcagggccttgtcaggagctcacggtaggcagaggtgcctctgccagggccacagaacagacttccgggaaggggccttggcttttattgagggtctctcaaagacccagcctgccagcctctcccagaggtgcctgctagtccttagagtgtgtgtgtgaagatgccatgaccagtggcagctgagacctctctgccccaagagtgtgggggactggcagggagcgagggtccccgagacgaggaccacggtcctccctgagaacctgggtggaactggcatttcatcccctctccaccctaccctctggctcctagcccacaccccctctcttgggcagcgtggtctgctggctgccccttcttggcagctcagggtcgtggcaggtggacttggagacacacagcagtgtgtgttttagtggcaggtttcaggagcacctctaagaccagggtgacagggtacttgggagctgtcctggaccctccccataccacgggccctgcaagggaggcatcagggctggctttgttttctgctgttcttggaataggaactgctgttctgatccccccaaaactgcattgcggctctcgctcgctcctgcctgccgggacagcgccttctgctgagtccgtttatttgtagtgtcatggctgctgctttcactggggtcctgggcaccctggcttctgtcctcagagctgggtttgatcctagcaaccatcccttcctctctttgcccggcaatgcctttggcatgtgtctgagcagccaagtggccactcataggagaaggctccctggtcacgttgctcctgctgccgtcttgttccaaggtgcgggggggacactgttggtctgtccaggtcaaggtccctttctcttaccatgacagaggctgggggcagacagcggggacttttttttttttttaagaaaaactacatgtacataggagagtttcattaccattagacttgtatgtaggacttaaaaaaaaatggccttaataaaattacaagcaacccgcctggatgcggttttcaaaagaaggcattgaggaccatgctaggaaacctcataccccatccgtccaacctccggcgggcgccactgcttgtcctctggtcttcggtgtggacagataggagaggagggatgcccacctcggagcatcccaggcccgtggcccattttcagcatcctgaagccagattcacagtgacattgtgttaacgtgacgaccttggtccattatggagttctttttccaataagaacctggtggaccgaggtccgagcttgccagggacagtggggcccacgcgagtacccggggcccagccaggagccagcagccaggcgtccctgtgttccagaaggattcacgcccctcctggacctgggcgggcctcccagggggtctgtatcacggccttttgtgtgtgcgtacgtgtggtttttttaaatatcactactacatattcttgaattgccaagactttctgaaacaagacagcttaagggaatcagccttttgctttgtgatgtgaaaatactgtgatttgacgagccgcttcctgaggggcaggcccacgtggggaggttgcgccgtgtacatagacccgccgtctgtgtccttggtcaggcccggatgcttggtctacactgggttagaggctgctctccccacgcacccatgtgctcatggcttctgcagaccctctgctgggtacatcggtcccctacggcgaagttcagccagggctctccctcctgagagcatggcgtccccaccttcctgtttcgccgacgtcactacccagggtggcaagtcttgcaggcagagggtgtagcccaagttcagcctctctctgtgtcctccagagaagagggttctttgccctcatcagggccctgcttgtgggttttcggctctggggaggagagtgttggcatcagtgtgtttggcctgatttcttcagggggccaagctcccgggaggacccctagccaggagggccccccatgtccatccatccctcctgctggggcttggatgtcaggcttgggggctgtgagctgggacctcgcctgagcccggtcaggtgggacaggagcctgccagaagcccatggggggccaggccgggtggcttctattttatttttttagagatggggtcttgctgtgttgcccaggctggtctcggactcctgggctcaagcagtcctccctcctcggcctcccaaagttctggggctacaggtgtgagccacttctgcccagcatcccaggcctgaacagccttggcaggacccgtccctagagggggctctggtgcctcccttaggtgggccttgagctggtttttaaccaaacatccttccaaactcgggctgcgacctgcttcctgagttttctgtatttccaaggagccctccgaccagggagaggctggtggagtaaggtccagcggtattcgggggtcctctgtcacctcgccctgaaaacagcagctcccatcaccttcactgggtcccgatggagccgtctcagaggccgaggggccctctgtgtgggggtgggacgcaggggctctcagagcaagggccacaaagccgatggcacagatgtgcccctgggcctggcccgtcacccacatgtggtgccctgggccagggcgtgcgggcgccagagccttccctacacagcctaagagcaggggcaagactcggcccctcactcaccctgggaggcctgcctgggctacatggacacctgggtctctttctacccccattcaccatggaccaggggcctccatttcctgggggctcttgcggcatgtgatttgggggtccctgggacattctcccgtcagctccacctgagccaagtgtcctgttccctgcggcccttggccttccagggtcctggccaggcaggggtcaggcaccccatactcttccgtgtggcacaggtgtccacccacccccactggccacagacaccattctccccctgggagcaggaggtggagtaagttgtacccccaggcctgggtgctggggagttcctgagggcatgggtggggcaggagtgagtgcctcgtgatcccagcctcagtttctctcttgtcactttctcaaacctgcaggtctcagggccccgggctcctcctgggcaggatggggggcaggggctgggccttggggtggtgctggctctgatgattccagagcctgtatccaccttctgggctcctggccagcaccccacccccaggagccagggacaggtggcatgtgttggggtcgggggatggcccccatctcgaagtgttctggaatttgggggcaacccttgcccagcccagccatcaagaacttctgatctcctgcccaccaggaggggacttagccatggacttggccagtaggcctggggagggagggctttggcagccaaagtccactggccctgccgtgcccctgagtaggaaactgtcccctaggggctgggtggccccactgatatatgcaaacccgccggtccgagccctgttcctgcctgtgctcctctgtgcccaggctggctctcccccaaccctagcatgtatactctgccacggacgtcccgtgggccatgattgtgggcggccgcaggcctaatccccttagtaagggtaaatttagctnggcatgtccatggtaatcatcccaacctcccacgcctcccttccttgatttnnatat

SEQ ID NO: 433369 - DNA, 6685 bp, Homo sapiens
  misc_feature (6628)..(6628): n is a, c, g, or t
  misc_feature (6680)..(6681): n is a, c, g, or t
ccagccggcgcttgcgcggtggcacgggcgagtgggggggcgaggaggtggaggaggaggaggaggaggaggaggtggcggcgagaagatggcgacttcgaacaatccgcggaaattcagcgagaagatcgcgctgcacaatcagaagcaggcggaggagacggcggccttcgaggaggtcatgaaggacctgagcctgacgcgggccgcgcggctccagctccagaaatcccagtacctgcaactgggccccagccgaggccagtactatggcgggtccctgcccaacgtgaaccagatcgggagtggcaccatggacctgcccttccagacccccttccaatcctcgggcctggacaccagccggaccacccggcaccatgggctggtggacagggtgtaccgggagcgtggccggctcggctccccacaccgccggcccctgtcagtggacaaacacggacggcaggccgacagctgcccctatggcaccatgtacctctcaccacccgcggacaccagctggagaaggaccaattctgactccgccctgcaccagagcacaatgacgcccacgcagccagaatcctttagcagtgggtcccaggacgtgcaccagaaaagagtcttactgttaacagtcccaggaatggaagagaccacatcagaggcagacaaaaacctttccaagcaagcatgggacaccaagaagacggggtccaggcccaagtcctgtgaggtccccggaatcaacatcttcccgtctgccgaccaggaaaacactacagccctgatccccgccacccacaacacaggggggtccctgcccgacctgaccaacatccacttcccctccccgctcccgaccccgctggaccccgaggagcccaccttccctgcactgagcagctccagcagcaccggcaacctcgcggccaacctgacgcacctgggcatcggtggcgccggccagggaatgagcacacctggctcctctccacagcaccgcccagctggcgtcagccccctgtccctgagcacagaggcaaggcgtcagcaggcatcgcccaccctgtccccgctgtcacccatcactcaggctgtagccatggacgccctgtctctggagcagcagctgccctacgccttcttcacccaggcgggctcccagcagccaccgccgcagccccagcccccgccgcctcctccacccgcgtcccagcagccaccacccccgccacccccacaggcgcccgtccgcctgccccctggtggccccctgttgcccagcgccagcctgactcgtgggccacagccgcccccgcttgcagtcacggtaccgtcctctctcccccagtcccccccagagaaccctggccagccatcgatggggatcgacatcgcctcggcgccggctctgcagcagtaccgcactagcgccggctccccggccaaccagtctcccacctcgccagtctccaatcaaggcttctccccagggagctccccgcaactggagcagttcaacatgatggagaacgccatcagctccagcagcctgtacagcccgggctccacactcaactactcgcaggcggccatgatgggcctcacgggcagccacgggagcctgccggactcgcagcaactgggatacgccagccacagtggcatccccaacatcatcctcacagtgacaggagagtccccccccagcctctctaaagaactgaccaccaccgaggacaccttccggatggaccgcctgtgagcgggcacgccggcaccctgccgctcagccgtcccgacggcgcctccccagcccggggacggccgtgctccgtccctcgccaacggccgagcttgtgattctgagcttgcaatgccgccaagcgccccccgccagcccgcccccggttgtccacctcccgcgaagcccaatcgcgaggccgcgagccgggccgtccacccacccgcccgcccagggctgggctgggatcggaggccgtgagcctcccgcccctgcagaccctccctgcactggctccctcgcccccagccccggggcctgagccgtcccctgtaagatgcgggaagtgtcagctcccggcgtggcgggcaggctcaggggaggggcgcgcatggtccgccagggctgtgggccgtggcgcattttccgactgtttgtccagctctcactgccttccttggttcccggtcccccagcccatccgccatccccagcccgtggtcaggtagagagtgagccccacgccgccccagggaggaggcgccagagcgcggggcagacgcaaagtgaaataaacactattttgacggctgtcttttatatttctgagcacacacagagccctggcgtccaccggggcaggcgcaaagtggacagagcatgcagggcggcggacccccccacgaccctcctcgccctgtctccatcccctcgaagccctgcctcaccgcaggcaggcccatcggtggccacctttgccgggaagtgaccggaaggccccgtgaggggtcgaacgcggaggcaggggttacctcttggggctttacaatccgtggcccctcctgtcctgcactgtggtcaccggtcctgtcatagatgctgttaatttaaggtacaggcagaggtggccaggggagtttcattgtggtttttttttccttttagtttctagttacattttggttgtagatgactcgcttaatcttttaagccaacacttgcctgagagcatgtttttatttcagaaatccaactttacctattttttaagctaactggaaatggaggccatgcgccccaaagcagcccgccacccacctgagtgtaagaagtgagtccggcttttgggtttcaccccaagttatctcaaaacaaaagggctggtcaggctgggcagggccttgtcaggagctcacggtaggcagaggtgcctctgccagggccacagaacagacttccgggaaggggccttggcttttattgagggtctctcaaagacccagcctgccagcctctcccagaggtgcctgctagtccttagagtgtgtgtgtgaagatgccatgaccagtggcagctgagacctctctgccccaagagtgtgggggactggcagggagcgagggtccccgagacgaggaccacggtcctccctgagaacctgggtggaactggcatttcatcccctctccaccctaccctctggctcctagcccacaccccctctcttgggcagcgtggtctgctggctgccccttcttggcagctcagggtcgtggcaggtggacttggagacacacagcagtgtgtgttttagtggcaggtttcaggagcacctctaagaccagggtgacagggtacttgggagctgtcctggaccctccccataccacgggccctgcaagggaggcatcagggctggctttgttttctgctgttcttggaataggaactgctgttctgatccccccaaaactgcattgcggctctcgctcgctcctgcctgccgggacagcgccttctgctgagtccgtttatttgtagtgtcatggctgctgctttcactggggtcctgggcaccctggcttctgtcctcagagctgggtttgatcctagcaaccatcccttcctctctttgcccggcaatgcctttggcatgtgtctgagcagccaagtggccactcataggagaaggctccctggtcacgttgctcctgctgccgtcttgttccaaggtgcgggggggacactgttggtctgtccaggtcaaggtccctttctcttaccatgacagaggctgggggcagacagcggggacttttttttttttttaagaaaaactacatgtacataggagagtttcattaccattagacttgtatgtaggacttaaaaaaaaatggccttaataaaattacaagcaacccgcctggatgcggttttcaaaagaaggcattgaggaccatgctaggaaacctcataccccatccgtccaacctccggcgggcgccactgcttgtcctctggtcttcggtgtggacagataggagaggagggatgcccacctcggagcatcccaggcccgtggcccattttcagcatcctgaagccagattcacagtgacattgtgttaacgtgacgaccttggtccattatggagttctttttccaataagaacctggtggaccgaggtccgagcttgccagggacagtggggcccacgcgagtacccggggcccagccaggagccagcagccaggcgtccctgtgttccagaaggattcacgcccctcctggacctgggcgggcctcccagggggtctgtatcacggccttttgtgtgtgcgtacgtgtggtttttttaaatatcactactacatattcttgaattgccaagactttctgaaacaagacagcttaagggaatcagccttttgctttgtgatgtgaaaatactgtgatttgacgagccgcttcctgaggggcaggcccacgtggggaggttgcgccgtgtacatagacccgccgtctgtgtccttggtcaggcccggatgcttggtctacactgggttagaggctgctctccccacgcacccatgtgctcatggcttctgcagaccctctgctgggtacatcggtcccctacggcgaagttcagccagggctctccctcctgagagcatggcgtccccaccttcctgtttcgccgacgtcactacccagggtggcaagtcttgcaggcagagggtgtagcccaagttcagcctctctctgtgtcctccagagaagagggttctttgccctcatcagggccctgcttgtgggttttcggctctggggaggagagtgttggcatcagtgtgtttggcctgatttcttcagggggccaagctcccgggaggacccctagccaggagggccccccatgtccatccatccctcctgctggggcttggatgtcaggcttgggggctgtgagctgggacctcgcctgagcccggtcaggtgggacaggagcctgccagaagcccatggggggccaggccgggtggcttctattttatttttttagagatggggtcttgctgtgttgcccaggctggtctcggactcctgggctcaagcagtcctccctcctcggcctcccaaagttctggggctacaggtgtgagccacttctgcccagcatcccaggcctgaacagccttggcaggacccgtccctagagggggctctggtgcctcccttaggtgggccttgagctggtttttaaccaaacatccttccaaactcgggctgcgacctgcttcctgagttttctgtatttccaaggagccctccgaccagggagaggctggtggagtaaggtccagcggtattcgggggtcctctgtcacctcgccctgaaaacagcagctcccatcaccttcactgggtcccgatggagccgtctcagaggccgaggggccctctgtgtgggggtgggacgcaggggctctcagagcaagggccacaaagccgatggcacagatgtgcccctgggcctggcccgtcacccacatgtggtgccctgggccagggcgtgcgggcgccagagccttccctacacagcctaagagcaggggcaagactcggcccctcactcaccctgggaggcctgcctgggctacatggacacctgggtctctttctacccccattcaccatggaccaggggcctccatttcctgggggctcttgcggcatgtgatttgggggtccctgggacattctcccgtcagctccacctgagccaagtgtcctgttccctgcggcccttggccttccagggtcctggccaggcaggggtcaggcaccccatactcttccgtgtggcacaggtgtccacccacccccactggccacagacaccattctccccctgggagcaggaggtggagtaagttgtacccccaggcctgggtgctggggagttcctgagggcatgggtggggcaggagtgagtgcctcgtgatcccagcctcagtttctctcttgtcactttctcaaacctgcaggtctcagggccccgggctcctcctgggcaggatggggggcaggggctgggccttggggtggtgctggctctgatgattccagagcctgtatccaccttctgggctcctggccagcaccccacccccaggagccagggacaggtggcatgtgttggggtcgggggatggcccccatctcgaagtgttctggaatttgggggcaacccttgcccagcccagccatcaagaacttctgatctcctgcccaccaggaggggacttagccatggacttggccagtaggcctggggagggagggctttggcagccaaagtccactggccctgccgtgcccctgagtaggaaactgtcccctaggggctgggtggccccactgatatatgcaaacccgccggtccgagccctgttcctgcctgtgctcctctgtgcccaggctggctctcccccaaccctagcatgtatactctgccacggacgtcccgtgggccatgattgtgggcggccgcaggcctaatccccttagtaagggtaaatttagctnggcatgtccatggtaatcatcccaacctcccacgcctcccttccttgatttnnatat

SEQ ID NO: 433370 - DNA, 6610 bp, Homo sapiens
  misc_feature (6553)..(6553): n is a, c, g, or t
  misc_feature (6605)..(6606): n is a, c, g, or t
gggacccagccagtagcttctgctatgtgtgtctgagtaaccattgctggtgcaggggtatatggactcccaatcagaacacttcctgaactggttagtctctgtggtgtgcttataatcatttggggtccaacattcacatttattggtcctaaggtttttggtaaaatctttgtaggtgagttggtattggaaactggaaatgcaacaaatgaaatgttgccttttgttggactgagattctgatctataaatcctcttacttctgcatttgtggaagtcaaaccaacattttttgccgtcatgtcaaactgtattctatttaagattctgtaaagccattaaaaaaataaaaagaaaaaaaccttcgtcttcaataattctttaaaagaacaaccgccttcggctgcagaagacggggtccaggcccaagtcctgtgaggtccccggaatcaacatcttcccgtctgccgaccaggaaaacactacagccctgatccccgccacccacaacacaggggggtccctgcccgacctgaccaacatccacttcccctccccgctcccgaccccgctggaccccgaggagcccaccttccctgcactgagcagctccagcagcaccggcaacctcgcggccaacctgacgcacctgggcatcggtggcgccggccagggaatgagcacacctggctcctctccacagcaccgcccagctggcgtcagccccctgtccctgagcacagaggcaaggcgtcagcaggcatcgcccaccctgtccccgctgtcacccatcactcaggctgtagccatggacgccctgtctctggagcagcagctgccctacgccttcttcacccaggcgggctcccagcagccaccgccgcagccccagcccccgccgcctcctccacccgcgtcccagcagccaccacccccgccacccccacaggcgcccgtccgcctgccccctggtggccccctgttgcccagcgccagcctgactcgtgggccacagccgcccccgcttgcagtcacggtaccgtcctctctcccccagtcccccccagagaaccctggccagccatcgatggggatcgacatcgcctcggcgccggctctgcagcagtaccgcactagcgccggctccccggccaaccagtctcccacctcgccagtctccaatcaaggcttctccccagggagctccccgcaacacacttccaccctgggcagcgtgtttggggacgcgtactatgagcagcagatggcggccaggcaggccaatgctctgtcccaccagctggagcagttcaacatgatggagaacgccatcagctccagcagcctgtacagcccgggctccacactcaactactcgcaggcggccatgatgggcctcacgggcagccacgggagcctgccggactcgcagcaactgggatacgccagccacagtggcatccccaacatcatcctcacagtgacaggagagtccccccccagcctctctaaagaactgaccagctctctggccggggtcggcgacgtcagcttcgactccgacagccagtttcccctggacgaactcaagatcgaccccctgaccctcgacggactgcacatgctcaacgaccccgacatggttctggccgacccagccaccgaggacaccttccggatggaccgcctgtgagcgggcacgccggcaccctgccgctcagccgtcccgacggcgcctccccagcccggggacggccgtgctccgtccctcgccaacggccgagcttgtgattctgagcttgcaatgccgccaagcgccccccgccagcccgcccccggttgtccacctcccgcgaagcccaatcgcgaggccgcgagccgggccgtccacccacccgcccgcccagggctgggctgggatcggaggccgtgagcctcccgcccctgcagaccctccctgcactggctccctcgcccccagccccggggcctgagccgtcccctgtaagatgcgggaagtgtcagctcccggcgtggcgggcaggctcaggggaggggcgcgcatggtccgccagggctgtgggccgtggcgcattttccgactgtttgtccagctctcactgccttccttggttcccggtcccccagcccatccgccatccccagcccgtggtcaggtagagagtgagccccacgccgccccagggaggaggcgccagagcgcggggcagacgcaaagtgaaataaacactattttgacggctgtcttttatatttctgagcacacacagagccctggcgtccaccggggcaggcgcaaagtggacagagcatgcagggcggcggacccccccacgaccctcctcgccctgtctccatcccctcgaagccctgcctcaccgcaggcaggcccatcggtggccacctttgccgggaagtgaccggaaggccccgtgaggggtcgaacgcggaggcaggggttacctcttggggctttacaatccgtggcccctcctgtcctgcactgtggtcaccggtcctgtcatagatgctgttaatttaaggtacaggcagaggtggccaggggagtttcattgtggtttttttttccttttagtttctagttacattttggttgtagatgactcgcttaatcttttaagccaacacttgcctgagagcatgtttttatttcagaaatccaactttacctattttttaagctaactggaaatggaggccatgcgccccaaagcagcccgccacccacctgagtgtaagaagtgagtccggcttttgggtttcaccccaagttatctcaaaacaaaagggctggtcaggctgggcagggccttgtcaggagctcacggtaggcagaggtgcctctgccagggccacagaacagacttccgggaaggggccttggcttttattgagggtctctcaaagacccagcctgccagcctctcccagaggtgcctgctagtccttagagtgtgtgtgtgaagatgccatgaccagtggcagctgagacctctctgccccaagagtgtgggggactggcagggagcgagggtccccgagacgaggaccacggtcctccctgagaacctgggtggaactggcatttcatcccctctccaccctaccctctggctcctagcccacaccccctctcttgggcagcgtggtctgctggctgccccttcttggcagctcagggtcgtggcaggtggacttggagacacacagcagtgtgtgttttagtggcaggtttcaggagcacctctaagaccagggtgacagggtacttgggagctgtcctggaccctccccataccacgggccctgcaagggaggcatcagggctggctttgttttctgctgttcttggaataggaactgctgttctgatccccccaaaactgcattgcggctctcgctcgctcctgcctgccgggacagcgccttctgctgagtccgtttatttgtagtgtcatggctgctgctttcactggggtcctgggcaccctggcttctgtcctcagagctgggtttgatcctagcaaccatcccttcctctctttgcccggcaatgcctttggcatgtgtctgagcagccaagtggccactcataggagaaggctccctggtcacgttgctcctgctgccgtcttgttccaaggtgcgggggggacactgttggtctgtccaggtcaaggtccctttctcttaccatgacagaggctgggggcagacagcggggacttttttttttttttaagaaaaactacatgtacataggagagtttcattaccattagacttgtatgtaggacttaaaaaaaaatggccttaataaaattacaagcaacccgcctggatgcggttttcaaaagaaggcattgaggaccatgctaggaaacctcataccccatccgtccaacctccggcgggcgccactgcttgtcctctggtcttcggtgtggacagataggagaggagggatgcccacctcggagcatcccaggcccgtggcccattttcagcatcctgaagccagattcacagtgacattgtgttaacgtgacgaccttggtccattatggagttctttttccaataagaacctggtggaccgaggtccgagcttgccagggacagtggggcccacgcgagtacccggggcccagccaggagccagcagccaggcgtccctgtgttccagaaggattcacgcccctcctggacctgggcgggcctcccagggggtctgtatcacggccttttgtgtgtgcgtacgtgtggtttttttaaatatcactactacatattcttgaattgccaagactttctgaaacaagacagcttaagggaatcagccttttgctttgtgatgtgaaaatactgtgatttgacgagccgcttcctgaggggcaggcccacgtggggaggttgcgccgtgtacatagacccgccgtctgtgtccttggtcaggcccggatgcttggtctacactgggttagaggctgctctccccacgcacccatgtgctcatggcttctgcagaccctctgctgggtacatcggtcccctacggcgaagttcagccagggctctccctcctgagagcatggcgtccccaccttcctgtttcgccgacgtcactacccagggtggcaagtcttgcaggcagagggtgtagcccaagttcagcctctctctgtgtcctccagagaagagggttctttgccctcatcagggccctgcttgtgggttttcggctctggggaggagagtgttggcatcagtgtgtttggcctgatttcttcagggggccaagctcccgggaggacccctagccaggagggccccccatgtccatccatccctcctgctggggcttggatgtcaggcttgggggctgtgagctgggacctcgcctgagcccggtcaggtgggacaggagcctgccagaagcccatggggggccaggccgggtggcttctattttatttttttagagatggggtcttgctgtgttgcccaggctggtctcggactcctgggctcaagcagtcctccctcctcggcctcccaaagttctggggctacaggtgtgagccacttctgcccagcatcccaggcctgaacagccttggcaggacccgtccctagagggggctctggtgcctcccttaggtgggccttgagctggtttttaaccaaacatccttccaaactcgggctgcgacctgcttcctgagttttctgtatttccaaggagccctccgaccagggagaggctggtggagtaaggtccagcggtattcgggggtcctctgtcacctcgccctgaaaacagcagctcccatcaccttcactgggtcccgatggagccgtctcagaggccgaggggccctctgtgtgggggtgggacgcaggggctctcagagcaagggccacaaagccgatggcacagatgtgcccctgggcctggcccgtcacccacatgtggtgccctgggccagggcgtgcgggcgccagagccttccctacacagcctaagagcaggggcaagactcggcccctcactcaccctgggaggcctgcctgggctacatggacacctgggtctctttctacccccattcaccatggaccaggggcctccatttcctgggggctcttgcggcatgtgatttgggggtccctgggacattctcccgtcagctccacctgagccaagtgtcctgttccctgcggcccttggccttccagggtcctggccaggcaggggtcaggcaccccatactcttccgtgtggcacaggtgtccacccacccccactggccacagacaccattctccccctgggagcaggaggtggagtaagttgtacccccaggcctgggtgctggggagttcctgagggcatgggtggggcaggagtgagtgcctcgtgatcccagcctcagtttctctcttgtcactttctcaaacctgcaggtctcagggccccgggctcctcctgggcaggatggggggcaggggctgggccttggggtggtgctggctctgatgattccagagcctgtatccaccttctgggctcctggccagcaccccacccccaggagccagggacaggtggcatgtgttggggtcgggggatggcccccatctcgaagtgttctggaatttgggggcaacccttgcccagcccagccatcaagaacttctgatctcctgcccaccaggaggggacttagccatggacttggccagtaggcctggggagggagggctttggcagccaaagtccactggccctgccgtgcccctgagtaggaaactgtcccctaggggctgggtggccccactgatatatgcaaacccgccggtccgagccctgttcctgcctgtgctcctctgtgcccaggctggctctcccccaaccctagcatgtatactctgccacggacgtcccgtgggccatgattgtgggcggccgcaggcctaatccccttagtaagggtaaatttagctnggcatgtccatggtaatcatcccaacctcccacgcctcccttccttgatttnnatat

SEQ ID NO: 433371 - DNA, 6281 bp, Homo sapiens
  misc_feature (6224)..(6224): n is a, c, g, or t
  misc_feature (6276)..(6277): n is a, c, g, or t
ccagccggcgcttgcgcggtggcacgggcgagtgggggggcgaggaggtggaggaggaggaggaggaggaggaggtggcggcgagaagatggcgacttcgaacaatccgcggaaattcagcgagaagatcgcgctgcacaatcagaagcaggcggaggagacggcggccttcgaggaggtcatgaaggacctgagcctgacgcgggccgcgcggctccagctccagaaatcccagtacctgcaactgggccccagccgaggccagtactatggcgggtccctgcccaacgtgaaccagatcgggagtggcaccatggacctgcccttccagacccccttccaatcctcgggcctggacaccagccggaccacccggcaccatgggctggtggacagggtgtaccgggagcgtggccggctcggctccccacaccgccggcccctgtcagtggacaaacacggacggcaggccgacagctgcccctatggcaccatgtacctctcaccacccgcggacaccagctggagaaggaccaattctgactccgccctgcaccagagcacaatgacgcccacgcagccagaatcctttagcagtgggtcccaggacgtgcaccagaaaagagtcttactgttaacagtcccaggaatggaagagaccacatcagaggcagacaaaaacctttccaagcaagcatgggacaccaagaagacggggtccaggcccaagtcctgtgaggtccccggaatcaacatcttcccgtctgccgaccaggaaaacactacagccctgatccccgccacccacaacacaggggggtccctgcccgacctgaccaacatccacttcccctccccgctcccgaccccgctggaccccgaggagcccaccttccctgcactgagcagctccagcagcaccggcaacctcgcggccaacctgacgcacctgggcatcggtggcgccggccaggctggagcagttcaacatgatggagaacgccatcagctccagcagcctgtacagcccgggctccacactcaactactcgcaggcggccatgatgggcctcacgggcagccacgggagcctgccggactcgcagcaactgggatacgccagccacagtggcatccccaacatcatcctcacagtgacaggagagtccccccccagcctctctaaagaactgaccagctctctggccggggtcggcgacgtcagcttcgactccgacagccagtttcccctggacgaactcaagatcgaccccctgaccctcgacggactgcacatgctcaacgaccccgacatggttctggccgacccagccaccgaggacaccttccggatggaccgcctgtgagcgggcacgccggcaccctgccgctcagccgtcccgacggcgcctccccagcccggggacggccgtgctccgtccctcgccaacggccgagcttgtgattctgagcttgcaatgccgccaagcgccccccgccagcccgcccccggttgtccacctcccgcgaagcccaatcgcgaggccgcgagccgggccgtccacccacccgcccgcccagggctgggctgggatcggaggccgtgagcctcccgcccctgcagaccctccctgcactggctccctcgcccccagccccggggcctgagccgtcccctgtaagatgcgggaagtgtcagctcccggcgtggcgggcaggctcaggggaggggcgcgcatggtccgccagggctgtgggccgtggcgcattttccgactgtttgtccagctctcactgccttccttggttcccggtcccccagcccatccgccatccccagcccgtggtcaggtagagagtgagccccacgccgccccagggaggaggcgccagagcgcggggcagacgcaaagtgaaataaacactattttgacggctgtcttttatatttctgagcacacacagagccctggcgtccaccggggcaggcgcaaagtggacagagcatgcagggcggcggacccccccacgaccctcctcgccctgtctccatcccctcgaagccctgcctcaccgcaggcaggcccatcggtggccacctttgccgggaagtgaccggaaggccccgtgaggggtcgaacgcggaggcaggggttacctcttggggctttacaatccgtggcccctcctgtcctgcactgtggtcaccggtcctgtcatagatgctgttaatttaaggtacaggcagaggtggccaggggagtttcattgtggtttttttttccttttagtttctagttacattttggttgtagatgactcgcttaatcttttaagccaacacttgcctgagagcatgtttttatttcagaaatccaactttacctattttttaagctaactggaaatggaggccatgcgccccaaagcagcccgccacccacctgagtgtaagaagtgagtccggcttttgggtttcaccccaagttatctcaaaacaaaagggctggtcaggctgggcagggccttgtcaggagctcacggtaggcagaggtgcctctgccagggccacagaacagacttccgggaaggggccttggcttttattgagggtctctcaaagacccagcctgccagcctctcccagaggtgcctgctagtccttagagtgtgtgtgtgaagatgccatgaccagtggcagctgagacctctctgccccaagagtgtgggggactggcagggagcgagggtccccgagacgaggaccacggtcctccctgagaacctgggtggaactggcatttcatcccctctccaccctaccctctggctcctagcccacaccccctctcttgggcagcgtggtctgctggctgccccttcttggcagctcagggtcgtggcaggtggacttggagacacacagcagtgtgtgttttagtggcaggtttcaggagcacctctaagaccagggtgacagggtacttgggagctgtcctggaccctccccataccacgggccctgcaagggaggcatcagggctggctttgttttctgctgttcttggaataggaactgctgttctgatccccccaaaactgcattgcggctctcgctcgctcctgcctgccgggacagcgccttctgctgagtccgtttatttgtagtgtcatggctgctgctttcactggggtcctgggcaccctggcttctgtcctcagagctgggtttgatcctagcaaccatcccttcctctctttgcccggcaatgcctttggcatgtgtctgagcagccaagtggccactcataggagaaggctccctggtcacgttgctcctgctgccgtcttgttccaaggtgcgggggggacactgttggtctgtccaggtcaaggtccctttctcttaccatgacagaggctgggggcagacagcggggacttttttttttttttaagaaaaactacatgtacataggagagtttcattaccattagacttgtatgtaggacttaaaaaaaaatggccttaataaaattacaagcaacccgcctggatgcggttttcaaaagaaggcattgaggaccatgctaggaaacctcataccccatccgtccaacctccggcgggcgccactgcttgtcctctggtcttcggtgtggacagataggagaggagggatgcccacctcggagcatcccaggcccgtggcccattttcagcatcctgaagccagattcacagtgacattgtgttaacgtgacgaccttggtccattatggagttctttttccaataagaacctggtggaccgaggtccgagcttgccagggacagtggggcccacgcgagtacccggggcccagccaggagccagcagccaggcgtccctgtgttccagaaggattcacgcccctcctggacctgggcgggcctcccagggggtctgtatcacggccttttgtgtgtgcgtacgtgtggtttttttaaatatcactactacatattcttgaattgccaagactttctgaaacaagacagcttaagggaatcagccttttgctttgtgatgtgaaaatactgtgatttgacgagccgcttcctgaggggcaggcccacgtggggaggttgcgccgtgtacatagacccgccgtctgtgtccttggtcaggcccggatgcttggtctacactgggttagaggctgctctccccacgcacccatgtgctcatggcttctgcagaccctctgctgggtacatcggtcccctacggcgaagttcagccagggctctccctcctgagagcatggcgtccccaccttcctgtttcgccgacgtcactacccagggtggcaagtcttgcaggcagagggtgtagcccaagttcagcctctctctgtgtcctccagagaagagggttctttgccctcatcagggccctgcttgtgggttttcggctctggggaggagagtgttggcatcagtgtgtttggcctgatttcttcagggggccaagctcccgggaggacccctagccaggagggccccccatgtccatccatccctcctgctggggcttggatgtcaggcttgggggctgtgagctgggacctcgcctgagcccggtcaggtgggacaggagcctgccagaagcccatggggggccaggccgggtggcttctattttatttttttagagatggggtcttgctgtgttgcccaggctggtctcggactcctgggctcaagcagtcctccctcctcggcctcccaaagttctggggctacaggtgtgagccacttctgcccagcatcccaggcctgaacagccttggcaggacccgtccctagagggggctctggtgcctcccttaggtgggccttgagctggtttttaaccaaacatccttccaaactcgggctgcgacctgcttcctgagttttctgtatttccaaggagccctccgaccagggagaggctggtggagtaaggtccagcggtattcgggggtcctctgtcacctcgccctgaaaacagcagctcccatcaccttcactgggtcccgatggagccgtctcagaggccgaggggccctctgtgtgggggtgggacgcaggggctctcagagcaagggccacaaagccgatggcacagatgtgcccctgggcctggcccgtcacccacatgtggtgccctgggccagggcgtgcgggcgccagagccttccctacacagcctaagagcaggggcaagactcggcccctcactcaccctgggaggcctgcctgggctacatggacacctgggtctctttctacccccattcaccatggaccaggggcctccatttcctgggggctcttgcggcatgtgatttgggggtccctgggacattctcccgtcagctccacctgagccaagtgtcctgttccctgcggcccttggccttccagggtcctggccaggcaggggtcaggcaccccatactcttccgtgtggcacaggtgtccacccacccccactggccacagacaccattctccccctgggagcaggaggtggagtaagttgtacccccaggcctgggtgctggggagttcctgagggcatgggtggggcaggagtgagtgcctcgtgatcccagcctcagtttctctcttgtcactttctcaaacctgcaggtctcagggccccgggctcctcctgggcaggatggggggcaggggctgggccttggggtggtgctggctctgatgattccagagcctgtatccaccttctgggctcctggccagcaccccacccccaggagccagggacaggtggcatgtgttggggtcgggggatggcccccatctcgaagtgttctggaatttgggggcaacccttgcccagcccagccatcaagaacttctgatctcctgcccaccaggaggggacttagccatggacttggccagtaggcctggggagggagggctttggcagccaaagtccactggccctgccgtgcccctgagtaggaaactgtcccctaggggctgggtggccccactgatatatgcaaacccgccggtccgagccctgttcctgcctgtgctcctctgtgcccaggctggctctcccccaaccctagcatgtatactctgccacggacgtcccgtgggccatgattgtgggcggccgcaggcctaatccccttagtaagggtaaatttagctnggcatgtccatggtaatcatcccaacctcccacgcctcccttccttgatttnnatat

SEQ ID NO: 433372 - DNA, 420 bp, Homo sapiens
ctggcccctcccccagtcatgacagctggaatgtccccagacattgccagcatacccaggggacagagtcgcccggcgggcatgcctggtccgacacatggatgcgagcgatggagccagggctaagcagtgccttttgtccccaccccatcccccagtgacaggagagtccccccccagcctctctaaagaactgaccagctctctggccggggtcggcgacgtcagcttcgactccgacagccagtttcccctggacgaactcaagatcgaccccctgaccctcgacggactgcacatgctcaacgaccccgacatggttctggccgacccagccaccgaggacaccttccggatggaccgcctgtgagcgggcacgccggcaccctgccgctcagccgtcccgacggcgcctcccca

SEQ ID NO: 433373 - DNA, 615 bp, Homo sapiens
ggatggggggcaggggctgggccttggggtggtgctggctctgatgattccagagcctgtatccaccttctgggctcctggccagcaccccacccccaggagccagggacaggtggcatgtgttggggtcgggggatggcccccatctcgaagtgttctggaatttgggggcaacccttgcccagcccagccatcaagaacttctgatctcctgcccaccaggaggggacttagccatggacttggccagtaggcctggggagggagggctttggcagccaaagtccactggccctgccgtgcccctgagtaggaaactgtcccctaggggctgggtggccccactgatatatgcaaacccgccggtccgagccctgttcctgcctgtgctcctctgtgcccaggctggctctcccccaaccctagcatgtatactctgccacggacgtcccgtgggccatgattgtgggcggccgcagcgggcgggggcaggcggctcagggcacactcggccgtccctgccccatcctctggcagggctgcttttgtctttgtacctttgcatcctttgtaatgaaacgtaataaaaatccaacgttttcgtcactggctctt

SEQ ID NO: 433374 - DNA, 439 bp, Homo sapiens
caggaaaggccggcaggaaacgccccccgccctactggtcccagctgtttgcaggcctcaggccgaccccagccagccagccggggcttcctgccctgggctgagagtgtgttgttggaggcggggtctcagccagtggcactgcccccttaactcacctcacgccgacagctgcccctatggcaccatgtacctctcaccacccgcggacaccagctggagaaggtcagtggctggacaccccccccccgcccccttcttgttggaaacaaaaccaaactctcatcatggttacatgtggaaaagcaggacacagtcgcttaaacaatgaccaaactaagatgcatccagaagtttctagaaattagccttcaccctgaaacacaggagttccagctttgggaggtcttctaacatttcccttccccccacttatgac

SEQ ID NO: 433375 - DNA, 412 bp, Homo sapiens
  misc_feature (1)..(1): n is a, c, g, or t
  misc_feature (5)..(5): n is a, c, g, or t
ntagngaatctcttgtactacctgaaaaggtgactgccgagaaaggacaaatgtcttccctcctccagcgttctgagaggactgccttgccttccttcgttactggaacatgacaacctggctcatgggtgtactcccagtgctttgggaggccaagatgagaggattgaggacaggagttcaagactagcctggacaacatagtgagaccccatcaaaaaataaaaaaaaaataaaaaaataaaaaaataaaaaacaagtaaaataaataaaaaataaaaataattatataaaaaatattagctgggcgtggtggtgcatgcccatagtctcagcctcccgagtagttggaactataggcacacgctaccctgaccagctaatttttgtatttttagtggagaccccatca

SEQ ID NO: 433376 - DNA, 1009 bp, Homo sapiens
cctgggataaataagtgttcacatttttcagttttgctcctcttttaaaatatactaaacaatcataacagacctaaggttatttttttctcatccccagtctcatttccctttcctaagaagcagcttcaatcatgattttggtgtgtatcttgtccttccatgattttataatttcctcttgtatatgtttgcatccatatacaaaatgtagtattttatgtgttttagaatttttattcaatgctgtgttttggagatctattcatattgctacacaaggacctagtttattcattttaacagttgaaaagtatttcatcataggatttataccacagttcagttacctattccccccagtaatggatatatagtatatttccaggtttttgttataccaaatcgtgctgccaagaatttacgtgcaagtgtttcctggtgctcatggttagagcttttccagggtagatcattaggaagtggaattgttggtttgaattgttacatagcttcaacttttccagattctgacgaattagtataaaggtggctgtgccaatttatacttatatgtctgagtgtcccagtttcctcattttctggccaattaatgcttggtgttatcagacttttttggcttatgccagtcggaaggctttgaaatagtcattatttgaattcaaaaaaaatttttttcctgggctgggtgcagtggctcatgggtgtactcccagtgctttgggaggccaagatgagaggattgaggacaggagttcaagactagcctggacaacatagtgagaccccatcaaaaaataaaaaaaaaataaaaaaataaaaaaataaaaaacaagtaaaataaataaaaaataaaaataattatataaaaaatattagctgggcgtggtggtgcatgcccatagtctcagcctcccgagtagttggaactataggcacacgctaccctgaccagctaatttttgtatttttagtggagaccccatca

SEQ ID NO: 433377 - DNA, 1249 bp, Homo sapiens
ggacacgcatttccggcgacgcctcggtactgacctctgcagagccgggtggagcccattgacgtccagcgaagcgaggagcagcgatggacggtcgggtgcagctgataaaggccctcctggccttgccgatccggcctgcgacgcgtcgctggaggaacccgattccctttcccgagacgtttgacggcgataccgaccgactcccggagttcatcgtgcagacgggctcctacatgttcgtggacgagaacacgttctccagcgacgccctgaaggtgacgttcctcatcacccgcctcacagggcccgccctgcagtgggtgatcccctacatcaagaaggagagccccctcctcaatgattaccggggctttctggccgagatgaagcgagtctttggatgggaggaggacgaggacttctaggccgggagaccctcgggcctgggggcgggtgctctggggagggtccgctgtgttactggccgccgccagggtcgccaccggcgccctccctccgcgcctccctccccctcgagccgccgcgatgtcccctgcgctcctgttccctcccgcgtagtgcttgcctttgttccaggaatagcgctccaggctcctgctgccgcccctgggcctcactctggagcgagccgccgccctctccttccagccagccagcccctcccatgtacatttggacgctgtcctgcgctccagctgcaagctgggctcctgttacacactggacagaccacccactgccgccgctgccaagccctctcctccccaccagactgccagacgactacatcattctgcccacagacctgcgctgccacagccatcgccatccatcgcatcccaccgacagactgctgctcctagtgatctggactcacctcggaggtatctgggctggccacagtccctggacagtgatccagacagctggccgccccccaagggatctgtcaccttcagcgagacctatttcctccccacccccagaaacctcttgtgttcttgcctaggcccaggtgttcctggcagccaaatcgagtctctcattttctcttgtggaccagttagttttgcccataacgcagtattctgagtttgcaactgtctctctgatgtgtgccttttgttcaacacagtaacccctgcattctgctctgctctaatacactacctggagaaagtcttttccttattttcaataaatgtcagacattattgaaaagaaa

SEQ ID NO: 433378 - DNA, 466 bp, Homo sapiens
cttgctcatcagactctcctcccaggccctcttcttgtttacttatacccagccctgtaaataacagtgaaagtttgcttgtagacacttgacgttttctcatacaccatgaaaatcgaacctccccctctatgcagttaccccatcagtccccattacaacctctgctggccgccccccaagggatctgtcaccttcagcgagacctatttcctccccacccccagaaacctcttgtgttcttgcctaggcccaggtgttcctggcagccaaatcgagtctctcattttctcttgtggaccagttagttttgcccataacgcagtattctgagtttgcaactgtctctctgatgtgtgccttttgttcaacacagtaacccctgcattctgctctgctctaatacactacctggagaaagtcttttccttattttcaataaatgtcagacattattgaaaagaaa

SEQ ID NO: 433379 - DNA, 1811 bp, Homo sapiens
ggacacgcatttccggcgacgcctcggtactgacctctgcagagccgggtggagcccattgacgtccagcgaagcgaggagcagcgatggacggtcgggtgcagctgataaaggccctcctggccttgccgatccggcctgcgacgcgtcgctggaggaacccgattccctttcccgagacgtttgacggcgataccgaccgactcccggagttcatcgtgcagacgggctcctacatgttcgtggacgagaacacgttctccagcgacgccctgaaggtgacgttcctcatcacccgcctcacagggcccgccctgcagtgggtgatcccctacatcaagaaggagagccccctcctcaatgattaccggggctttctggccgagatgaagcgagtctttggatgggaggaggacgaggacttctaggccgggagaccctcgggcctgggggcgggtgctctggggagggtccgctgtgttactggccgccgccagggtcgccaccggcgccctccctccgcgcctccctccccctcgagccgccgcgatgtcccctgcgctcctgttccctcccgcgtagtgcttgcctttgttccaggaatagcgctccaggctcctgctgccgcccctgggcctcactctggagcgagccgccgccctctccttccagccagccagcccctcccatgtacatttggacgctgtcctgcgctccagctgcaagctgggctcctgttacacactggacagaccacccactgccgccgctgccaagccctctcctccccaccagactgccagacgactacatcattctgcccacagacctgcgctgccacagccatcgccatccatcgcatcccaccgacagactgctgctcctagtgatctggactcacctcggaggtatctgggctggccacagtccctggacagtgatccagacagctggccgccccccaagggatctgtcaccttcagcgagacctatttcctccccacccccagaaacctcttgtgttcttgcctaggcccaggtgttcctggcagccaaatcgagtctctcattttctcttgtggaccagttagttttgcccataacgcagtattctgagtttgcaactgtctctctgatgtgtgccttttgttcaacacagtaacccctgcattctgctctgctctaatacactacctggagaaagtcttttccttattttcaataaatgtcagacattattgaaaagaaaaaaaaaaaaaaaaaaaaaaaaaaaaaaaaaaaaaaaaggggggggccccaaaaatttcccccggggggcccccaagctttccaccgcgccaccgccgagcttttctttggtaccaaaggggggcgcccccaataataggaggagggggcggactatataataaccagcagaggcacaagggcgcccggaggtttacacacacgctgctcgaggaccgggcgcaaaacccggtgctacacctgggggagtcacttgcggagaaagacgactccttattccgcgctgggggggggggagcggcaccaatattatgtgggcggccaaaaaaatgttatctctctataccaggagcatgttttaaagagcgggctcgttaaagaggaggagacactatttctaaatatagttttaagaagggtgggttaaataggggtggtggtgttaaacaataagggtgggtgaataatggtctgtgctagggtgtgtagaagaatagtttgtgcgaataccgagaggaatttatgattttatacgagaaactttttttattactcaggggaga

SEQ ID NO: 433380 - DNA, 1296 bp, Homo sapiens
ggacacgcatttccggcgacgcctcggtactgacctctgcagagccgggtggagcccattgacgtccagcgaagcgaggagcagcgatggacggtcgggtgcagctgataaaggccctcctggccttgccgatccggcctgcgacgcgtcgctggaggaacccgattccctttcccgagacgtttgacggcgataccgaccgactcccggagttcatcgtgcagacgggctcctacatgttcgtggacgagaacacgttctccagcgacgccctgaaggtgacgttcctcatcacccgcctcacagggcccgccctgcagtgggtgatcccctacatcaagaaggagagccccctcctcaatgattaccggggctttctggccgagatgaagcgagtctttggatgggaggaggacgaggacttctaggccgggagaccctcgggcctgggggcgggtgctctggggagggtccgctgtgttactggccgccgccagggtcgccaccggcgccctccctccgcgcctccctccccctcgagccgccgcgatgtcccctgcgctcctgttccctcccgcgtagtgcttgcctttgttccaggaatagcgctccaggctcctgctgccgcccctgggcctcactctggagcgagccgccgccctctccttccagccagccagcccctcccatgtacatttggacgctgtcctgcgctccagctgcaagctgggctcctgttacacactggacagaccacccactgccgccgctgccaagccctctcctccccaccagactgccagacgactacatcattctgcccacagacctgcgctgccacagccatcgccatccatcgcatcccaccgacagactgctgctcctagtgatctggactcacctcggaggtatctgggctggccacagtccctggacagtgatccagacagctggccgccccccaagggatctgtcaccttcctcatacccagtgtggagagagtctccacactggctctctccacactttctccatactctctccacactggtctcaagtcagtgtacaggtaagccctggctgcctccacccactcccagggagacccaaagccttcatacatctcaagttgggggaccaaaaagggggaagggggggccgaaggctcatcattcaaaataaaacaaataaaaaagtattaaggcgaagattaaaaaaattttgcattacataatttacacgaagcatgctatcacctccccgtgtggagagacggggatcctctgaacgccacc

SEQ ID NO: 433381 - DNA, 930 bp, Homo sapiens
ggacacgcatttccggcgacgcctcggtactgacctctgcagagccgggtggagcccattgacgtccagcgaagcgaggagcagcgatggacggtcgggtgcagctgataaaggccctcctggccttgccgatccggcctgcgacgcgtcgctggaggaacccgattccctttcccgagacgtttgacggcgccctccctccgcgcctccctccccctcgagccgccgcgatgtcccctgcgctcctgttccctcccgcgtagtgcttgcctttgttccaggaatagcgctccaggctcctgctgccgcccctgggcctcactctggagcgagccgccgccctctccttccagccagccagcccctcccatgtacatttggacgctgtcctgcgctccagctgcaagctgggctcctgttacacactggacagaccacccactgccgccgctgccaagccctctcctccccaccagactgccagacgactacatcattctgcccacagacctgcgctgccacagccatcgccatccatcgcatcccaccgacagactgctgctcctagtgatctggactcacctcggaggtatctgggctggccacagtccctggacagtgatccagacagctggccgccccccaagggatctgtcaccttcagcgagacctatttcctccccacccccagaaacctcttgtgttcttgcctaggcccaggtgttcctggcagccaaatcgagtctctcattttctcttgtggaccagttagttttgcccataacgcagtattctgagtttgcaactgtctctctgatgtgtgccttttgttcaacacagtaacccctgcattctgctctgctctaatacactacctggagaaagtcttttccttattttcaataaatgtcagacattattgaaaagaaa

SEQ ID NO: 433382 - DNA, 1136 bp, Homo sapiens
ggacacgcatttccggcgacgcctcggtactgacctctgcagagccgggtggagcccattgacgtccagcgaagcgaggagcagcgatggacggtcgggtgcagctgataaaggccctcctggccttgccgatccggcctgcgacgcgtcgctggaggaacccgattccctttcccgagacgtttgacggcgataccgaccgactcccggagttcatcgtgcagacgggctcctacatgttcgtggacgagaacacgttctccagcgacgccctgaaggtgacgttcctcatcacccgcctcacagggcccgccctgcagtgggtgatcccctacatcaagaaggagagccccctcctcaatgattaccggggctttctggccgagatgaagcgagtctttggatgggaggaggacgaggacttctaggccgggagaccctcgggcctgggggcgggtgctctggggagggtccgctgtgttactggccgccgccagggtcgccaccggcgccctccctccgcgcctccctccccctcgagccgccgcgatgtcccctgcgctcctgttccctcccgcgtaatttggacgctgtcctgcgctccagctgcaagctgggctcctgttacacactggacagaccacccactgccgccgctgccaagccctctcctccccaccagactgccagacgactacatcattctgcccacagacctgcgctgccacagccatcgccatccatcgcatcccaccgacagactgctgctcctagtgatctggactcacctcggaggtatctgggctggccacagtccctggacagtgatccagacagctggccgccccccaagggatctgtcaccttcagcgagacctatttcctccccacccccagaaacctcttgtgttcttgcctaggcccaggtgttcctggcagccaaatcgagtctctcattttctcttgtggaccagttagttttgcccataacgcagtattctgagtttgcaactgtctctctgatgtgtgccttttgttcaacacagtaacccctgcattctgctctgctctaatacactacctggagaaagtcttttccttattttcaataaatgtcagacattattgaaaagaaa

SEQ ID NO: 433383 - DNA, 1197 bp, Homo sapiens
ggacacgcatttccggcgacgcctcggtactgacctctgcagagccgggtggagcccattgacgtccagcgaagcgaggagcagcgatggacggtcgggtgcagctgataaaggccctcctggccttgccgatccggcctgcgacgcgtcgctggaggaacccgattccctttcccgagacgtttgacggcgataccgaccgactcccggagttcatcgtgcagacgggctcctacatgttcgtggacgagaacacgttctccagcgacgccctgaaggtgacgttcctcatcacccgcctcacagggcccgccctgcagtgggtgatcccctacatcaagaaggagagccccctcctcaatgattaccggggctttctggccgagatgaagcgagtctttggatgggaggaggacgaggacttctaggccgggagaccctcgggcctgggggcgggtgctctggggagggtccgctgtgttactggccgccgccagggtcgccaccggcgccctccctccgcgcctccctccccctcgagccgccgcgatgtcccctgcgctcctgttccctcccgcgtagtgcttgcctttgttccaggaatagcgctccaggctcctgctgccgcccctgggcctcactctggagcgagcgccctcaatacatttggacgctgtctgcgctcagctgcagctcagagaccacccactgccgccgctgccaagccctctcctccccaccagactgccagacgactacatcattctgcccacagacctgcgctgccacagccatcgccatccatcgcatcccaccgacagactgctgctcctagtgatctggactcacctcggaggtatctgggctggccacagtccctggacagtgatccagacagctggccgccccccaagggatctgtcaccttcagcgagacctatttcctccccacccccagaaacctcttgtgttcttgcctaggcccaggtgttcctggcagccaaatcgagtctctcattttctcttgtggaccagttagttttgcccataacgcagtattctgagtttgcaactgtctctctgatgtgtgccttttgttcaacacagtaacccctgcattctgctctgctctaatacactacctggagaaagtcttttccttattttcaataaatgtcagacattattgaaaagaaa

SEQ ID NO: 433384 - DNA, 810 bp, Homo sapiens
ggacacgcatttccggcgacgcctcggtactgacctctgcagagccgggtggagcccattgacgtccagcgaagcgaggagcagcgatggacggtcgggtgcagctgataaaggccctcctggccttgccgatccggcctgcgacgcgtcgctggaggaacccgattccctttcccgagacgtttgacggcgataccgaccgactcccggagttcatcgtgcagacgggctcctacatgttcgtggacgagaacacgttctccagcgacgccctgaaggtgacgttcctcatcacccgcctcacagggcccgccctgcagtgggtgatcccctacatcaagaaggagagccccctcctcaatgattaccggggctttctggccgagatgaagcgagtctttggatgggaggaggacgaggacttctaggccgggagaccctcgggcctgggggcgggtgctctggggagggtccgctgtgttactggccgccgccagggtcgccaccggcgccctccctccgcgcctccctccccctcgagccgccgcgatgtcccctgcgctcctgttccctcccgcgtagtgcttgcctttgttccaggtgttcctggcagccaaatcgagtctctcattttctcttgtggaccagttagttttgcccataacgcagtattctgagtttgcaactgtctctctgatgtgtgccttttgttcaacacagtaacccctgcattctgctctgctctaatacactacctggagaaagtcttttccttattttcaataaatgtcagacattattgaaaagaaa

SEQ ID NO: 433385 - DNA, 316 bp, Homo sapiens
ataaatcactaatctattgcgacttccaacctgctgatctgtattaacagcgagacctatttcctccccacccccagaaacctcttgtgttcttgcctaggcccaggtgttcctggcagccaaatcgagtctctcattttctcttgtggaccagttagttttgcccataacgcagtattctgagtttgcaactgtctctctgatgtgtgccttttgttcaacacagtaacccctgcattctgctctgctctaatacactacctggagaaagtcttttccttattttcaataaatgtcagacattattgaaaagaaa

SEQ ID NO: 433386 - DNA, 828 bp, Homo sapiens
agcgggttggagcggaagcgcacgcctgctaggatcagcggtggtggttccgcgatggtaggcggcggcggggtcggcggcggcctcctggagaatgccaaccccctcatctaccagcgctctggggagcggcctgtgacggcaggcgaggaggacgagcaggttcccgacagcatcgacgcacgcgagatcttcgatctgattcgctccatcaatgacccggagcatccactgacgctagaggagttgaacgtagtagagcaggtgcgggttcaggttagcgaccccgagagtacagtggctgtggctttcacaccaaccattccgcactgcagcatggccacccttattggtctgtccatcaaggtcaagcttctgcgctcccttcctcagcgtttcaagatggacgtgcacattactccggggacccatgcctcagagcatgcagtgaacaagcaacttgcagataaggagcgggtggcagctgccctggagaacacccacctcttggaggttgtgaatcagtgcctgtcagcccgctcctgagcctggcctttgacccctcagcctgcatactggtatcctggtcccagctcctgccagggctgttaccgttgttttcttgaatcactcacaatgagaaactaacattttgctttttgtaataaagttaatttatattcagttaaaaaaaaaaaaaaaaaaaaaaaaatggggatttttgggggggggaaaagggatgatggactggttaggggtttcggaccagttttgtcaaggggaatgggggcccaaggggcgataatgaaagcgtactattgggggatg

SEQ ID NO: 433387 - DNA, 754 bp, Homo sapiens
agcgggttggagcggaagcgcacgcctgctaggatcagcggtggtggttccgcgatggtaggcggcggcggggtcggcggcggcctcctggagaatgccaaccccctcatctaccagcgctctggggagcggcctgtgacggcaggcgaggaggacgagcagtgatatcgagcagctggtggagccgcatcccagcagggcgttcctggcagagggttctaagtgggcaagggcgcagagtcccttttccttcacttcccacatctgattcgctccatcaatgacccggagcatccactgacgctagaggagttgaacgtagtagagcaggtgcgggttcaggttagcgaccccgagagtacagtggctgtggctttcacaccaaccattccgcactgcagcatggccacccttattggtctgtccatcaaggtcaagcttctgcgctcccttcctcagcgtttcaagatggacgtgcacattactccggggacccatgcctcagagcatgcagtgaacaagcaacttgcagataaggagcgggtggcagctgccctggagaacacccacctcttggaggttgtgaatcagtgcctgtcagcccgctcctgagcctggcctttgacccctcagcctgcatactggtatcctggtcccagctcctgccagggctgttaccgttgttttcttgaatcactcacaatgagaaactaacattttgctttttgtaataaagttaatttatattcagtta

SEQ ID NO: 433388 - DNA, 867 bp, Homo sapiens
agcgggttggagcggaagcgcacgcctgctaggatcagcggtggtggttccgcgatggtaggcggcggcggggtcggcggcggcctcctggagaatgccaaccccctcatctaccagcgctctggggagcggcctgtgacggcaggcgaggaggacgagcaggttcccgacagcatcgacgcacgcgagatcttcgatctgattcgctccatcaatgacccggagcatccactgacgctagaggagttgaacgtagtagagcaggtgcgggttcaggttagcgaccccgagagtacagtggctgtggctttcacaccaaccattccgcactgcagcatggccacccttattggtctgtccatcaaggtcaagcttctgcgctcccttcctcagcgtttcaagacggtcccggacgcgatgaccctgaacggcggcggcagcggagcgggcgggagccgcggtgggggccaggagcgcgagcgccgtcggggcagcacaccctggggccccgccccgccgctgcaccgccgcagcatgccggtggacgagcgcgacctgcaggcggcgctgaccccgggtgccctgacggcggccgcggccgggacggggacccagggtcccaggctggactggcccgaggactccgaggactcgctcagctcagggggcagcgactcagacgagagcgtttacaaggtgctgctgctgggggcgcccggcgtgggcaagagcgccctggcgcgcatcttcggcggtgtggaggacgggcctgaagcagaggcagcagggcacacctatgatcgctccattgtagtggacggagaagaggcatcactcatggtctacgacatttgggagcaggtaggg

SEQ ID NO: 433389 - DNA, 649 bp, Homo sapiens
gcggccgcccgcccatcccggcccgctggagccgcgcgcagagctccgcgcccgccgccgccgccgagcctctaccagcgctctggggagcggcctgtgacggcaggcgaggaggacgagcaggttcccgacagcatcgacgcacgcgagatcttcgatctgattcgctccatcaatgacccggagcatccactgacgctagaggagttgaacgtagtagagcaggtgcgggttcaggttagcgaccccgagagtacagtggctgtggctttcacaccaaccattccgcactgcagcatggccacccttattggtctgtccatcaaggtcaagcttctgcgctcccttcctcagcgtttcaagatggacgtgcacattactccggggacccatgcctcagagcatgcagtgaacaagcaacttgcagataaggagcgggtggcagctgccctggagaacacccacctcttggaggttgtgaatcagtgcctgtcagcccgctcctgagcctggcctttgacccctcagcctgcatactggtatcctggtcccagctcctgccagggctgttaccgttgttttcttgaatcactcacaatgagaaactaacattttgctttttgtaataaagttaatttatattcagtta

SEQ ID NO: 433390 - DNA, 1001 bp, Homo sapiens
agcgggttggagcggaagcgcacgcctgctaggatcagcggtggtggttccgcgatggtaggcggcggcggggtcggcggcggcctcctggagaatgccaaccccctcatctaccagcgctctggggagcggcctgtgacggcaggcgaggaggacgagcaggttcccgacagcatcgacgcacgcgagatcttcgatctgattcgctccatcaatgacccggagcatccactgacgctagaggagttgaacgtagtagagcaggtgcgggttcaggttagcgaccccgagagtacagtggctgtggctttcacaccaaccattccgcactgcagcatggccacccttattggtctgtccatcaaggtcaagcttctgcgctcccttcctcagcgtttcaagatggacgtgcacattactccggggacccatgcctcagagcatgcagtgaacaagcaacttgcagataaggagcgggtggcagctgccctggagaacacccacctcttggaggttgtgaatcagtgcctgtcagcccgctcctgagcctggcctttgacccctcagcctgcatactggtatcctggtcccagctcctgccagggctgttaccgttgttttcttgaatcactcacaatgagaaactaacattttgctttttgtaataaagttaatttatattcagttaaaaaaaaaaaaaaaaaaaaaaaaaaagggcgcgcgccgcgccccggcgccccggaaaagcgctccaaaaccatccggttggcgcgcgccggggccccaggcggcaaccggagacacagggcaaaacgcgtgtcccaagggaaacccgggaccaagaaccgaggcgcagggaatcccacccaaccaaaaaaccccggggggaaacccgaggggccggagaaaaaactccaagagggaagctccagaggcacaaaaggggaccacacaaaagggggcccaggggagccgaaaaccaaataagccgggccggggcc

SEQ ID NO: 433391 - DNA, 938 bp, Homo sapiens
agcgggttggagcggaagcgcacgcctgctaggatcagcggtggtggttccgcgatggtaggcggcggcggggtcggcggcggcctcctggagaatgccaaccccctcatctaccagcgctctggggagcggcctgtgacggcaggcgaggaggacgagcaggttcccgacagcatcgacgcacgcgagatcttcgatctgattcgctccatcaatgacccggagcatccactgacgctagaggagttgaacgtagtagagcaggtgcgggttcaggttagcgaccccgagagtacagtggctgtggctttcacaccaaccattccgcactgcagcatggccacccttattggtctgtccatcaaggtcaagcttctgcgctcccttcctcagcgtttcaagatggacgtgcacattactccggggacccatgcctcagagcatgcaggaccagagtgtgtcaggcttcagcagcgcaggaggcagccagggggagggatcctaagaaggcagattaggtgggctcaggtggttgaagtagcctgatcaatatgtggggtcctgggaaggaggtgacaggagggctctgttgctgcgggggacatatcctatatagaggttcagaggtagggctggctagcactctggccagagcctagctttgactctgccttccccacacccttcttcccacctagtgaacaagcaacttgcagataaggagcgggtggcagctgccctggagaacacccacctcttggaggttgtgaatcagtgcctgtcagcccgctcctgagcctggcctttgacccctcagcctgcatactggtatcctggtcccagctcctgccagggctgttaccgttgttttcttgaatcactcacaatgagaaactaacattttgctttttgtaataaagttaatttatattcagtta

SEQ ID NO: 433392 - DNA, 751 bp, Homo sapiens
gacccatgcctcagagcatgcagtgaacaagcaacttgcagataaggagcgggtggcagctgccctggagaacacccacctcttggaggttgtgaatcagtgcctgtcagcccgctcctgagcctggctttgacccctcagcctgcatactggtatcctggtcccagctcctgccagggctgtgaccggggtaccattgtgtcacgcagcaatgcagaagagtggacatcctggtgatttgcaaatacccgttaatctataatgcgctctgaggaaagacggcctgtgacggcaggcgaggaggacgagcaggttcccgacagcatcgacgcacgcgagatcttcgatctgattcgctccatcaatgacccggagcatccactgacgctagaggagttgaacgtagtagagcaggtgcgggttcaggttagcgaccccgagagtacagtggctgtggctttcacaccaaccattccgcactgcagcatggccacccttattggtctgtccatcaaggtcaagcttctgcgctcccttcctcagcgtttcaagatggacgtgcacattactccggggacccatgcctcagagcatgcagcccgctcctgagcctggcctttgacccctcagcctgcatactggtatcctggtcccagctcctgccagggctgttaccgttgttttcttgaatcactcacaatgagaaactaacattttgctttttgtaataaagttaatttatattcagtta

SEQ ID NO: 433393 - DNA, 876 bp, Homo sapiens
gttccgcgatggtaggcggcggcggggtcggcggcggcctcctggagaatgccaaccccctcatctaccagcgctctggggagcggcctgtgacggcaggcgaggaggacgagcaggttcccgacagcatcgacgcacgcgagatcttcgatatccgccgctgctgggcgcgggcgggttccgggggcttgcggtggggggagcagtgatatcgagcagctggtggagccgcatcccagcagggcgttcctggcagagggttctaagtgggcaagggcgcagagtcccttttccttcacttcccacatctgattcgctccatcaatgacccggagcatccactgacgctagaggagttgaacgtagtagagcaggtgcgggttcaggtgagtcacttccgaggggagcgagttgttccagagagtcagaaaggtttctgtgcagcaggagctggcgtgctctatgctcacgaacaccgaagggtatctttggggagggagattgttgtgcctattttatgggtgttgaaactgaggcccatagaagttggatgatttgcccaaaacaacaaactaagaagagggaccttgggctgagggtggttgactcttgacatctctcctccacaaccaggttagcgaccccgagagtacagtggctgtggctttcacaccaaccattccgcactgcagcatggccacccttattggtctgtccatcaaggtcaagcttctgcgctcccttcctcagcgtttcaaggtcagtcggagctgagccccgggagtgagaccaggcattgagggtctactgctgaggatggggactgggagagcatgaacatggataggacatcagagtggggcctggaaggatccc

SEQ ID NO: 433394 - DNA, 688 bp, Homo sapiens
agcgggttggagcggaagcgcacgcctgctaggatcagcggtggtggttccgcgatggtaggcggcggcggggtcggcggcggcctcctggagaatgccaaccccctcatctaccagcgctctggggagcggcctgtgacggcaggcgaggaggacgagcaggttcccgacagcatcgacgcacgcgagatcttcgatctgattcgctccatcaatgacccggagcatccactgacgctagaggagttgaacgtagtagagcaggtgcgggttcaggttagcgaccccgagagtacagtggctgtggctttcacaccaaccattccgcactgcagcatggccacccttattggtctgtccatcaaggtcaagcttctgcgctcccttcctcagcgtttcaagatggacgtgcacattactccggggacccatgcctcagagcatgcagtgaacaagcaacttgcagataaggagcgggtggcagctgccctggagaacacccacctcttggaggttgtgaatcagtgcctgtcagcccgctcctgagcctggcctttgacccctcagcctgcatactggtatcctggtcccagctcctgccagggctgttaccgttgttttcttgaatcactcacaatgagaaactaacattttgctttttgtaataaagttaatttatattcagtta

SEQ ID NO: 433395 - DNA, 758 bp, Homo sapiens
agcgggttggagcggaagcgcacgcctgctaggatcagcggtggtggttccgcgatggtaggcggcggcggggtcggcggcggcctcctggagaatgccaaccccctcatctaccagcgctctggggagcggcctgtgacggcaggcgaggaggacgagcaggttcccgacagcatcgacgcacgcgagatcttcgatctgattcgctccatcaatgacccggagcatccactgacgctagaggagttgaacgtagtagagcaggtgcgggttcaggttagcgaccccgagagtacagtggctgtggctttcacaccaaccattccgcactgcagcatggccacccttattggtctgtccatcaaggtcaagcttctgcgctcccttcctcagcgtttcaagatggacgtgcacattactccggggacccatgcctcagagcatgcaggaccagagtgtgtcaggcttcagcagcgcaggaggcagccagggggagggatcctaagaaggcagattagtgaacaagcaacttgcagataaggagcgggtggcagctgccctggagaacacccacctcttggaggttgtgaatcagtgcctgtcagcccgctcctgagcctggcctttgacccctcagcctgcatactggtatcctggtcccagctcctgccagggctgttaccgttgttttcttgaatcactcacaatgagaaactaacattttgctttttgtaataaagttaatttatattcagtta

SEQ ID NO: 433396 - DNA, 256 bp, Homo sapiens
gatgcttacgactagcccgacaggacgcacgcgagattttcgatctgattcgctccatcaatgacccggagcatccactgacgctagaggagttgaacgtagtagagcaggtgcgggttcaggttagcgaccccgagagtacagtggctgtggctttcacaccaaccattccgcactgcagcatggccacccttattggtctgtcgggctagtcggggactgtcgggctagtcggggactgtcgggctagtcgggg

SEQ ID NO: 433397 - DNA, 844 bp, Homo sapiens
agcgggttggagcggaagcgcacgcctgctaggatcagcggtggtggttccgcgatggtaggcggcggcggggtcggcggcggcctcctggagaatgccaaccccctcatctaccagcgctctggggagcggcctgtgacggcaggcgaggaggacgagcaggttcccgacagcatcgacgcacgcgagatcttcgatatccgccgctgctgggcgcgggcgggttccgggggcttgcggtggggggagcagtgatatcgagcagctggtggagccgcatcccagcagggcgttcctggcagagggttctaagtgggcaagggcgcagagtcccttttccttcacttcccacatctgattcgctccatcaatgacccggagcatccactgacgctagaggagttgaacgtagtagagcaggtgcgggttcaggttagcgaccccgagagtacagtggctgtggctttcacaccaaccattccgcactgcagcatggccacccttattggtctgtccatcaaggtcaagcttctgcgctcccttcctcagcgtttcaagatggacgtgcacattactccggggacccatgcctcagagcatgcagtgaacaagcaacttgcagataaggagcgggtggcagctgccctggagaacacccacctcttggaggttgtgaatcagtgcctgtcagcccgctcctgagcctggcctttgacccctcagcctgcatactggtatcctggtcccagctcctgccagggctgttaccgttgttttcttgaatcactcacaatgagaaactaacattttgctttttgtaataaagttaatttatattcagtta

SEQ ID NO: 433398 - DNA, 853 bp, Homo sapiens
cgataggtaatgcggcagtagtgagtcgagaggaaggcttcctggacgaatgccaaatgcccctcatctagcaagcgctctgtgtatcggcctgtgactgcccgtggagggaggcataacgcactttcccgatggcaatcgatgcactgcgagatcttctgatatcgcgctcagtcttgtctgggtctgactgggctgggtttcgctgtgggcgtctgtgctgtgtgtggtgtgggagcgacgtgatatcagagctagcctagagattgagcaagactgtaatccccatcacgggcgataccatggcaagaagggttctaagtgggcaagggcgcagagtcccttttccttcacttcccacatctgattcgctccatcaatgacccggagcatccactgacgctagaggagttgaacgtagtagagcaggtgcgggttcaggttagcgaccccgagagtacagtggctgtggctttcacaccaaccattccgcactgcagcatggccacccttattggtctgtccatcaaggtcaagcttctgcgctcccttcctcagcgtttcaagatggacgtgcacattactccggggacccatgcctcagagcatgcagtgaacaagcaacttgcagataaggagcgggtggcagctgccctggagaacacccacctcttggaggttgtgaatcagtgcctgtcagcccgctcctgagcctggcctttgacccctcagcctgcatactggtatcctggtcccagctcctgccagggctgttaccgttgttttcttgaatcactcacaatgagaaactaacattttgctttttgtaataaagttaatttatattcagtta

SEQ ID NO: 433399 - DNA, 601 bp, Homo sapiens
agcgggttggagcggaagcgcacgcctgctaggatcagcggtggtggttccgcgatggtaggcggcggcggggtcggcggcggcctcctggagaatgccaaccccctcatctaccagcgctctggggagcggcctgtgacggcaggcgaggaggacgagcaggttcccgacagcatcgacgcacgcgagatcttcgatctgattcgctccatcaatgacccggagcatccactgacgctagaggagttgaacgtagtagagcaggtgcgggttcaggttagcgaccccgagagtacagtggctgtggctttcacaccaaccattccgcactgcagcatggccacccttattggtctgtccatcaaggtcaagcttctgcgctcccttcctcagcgtttcaagatggacgtgcacattactccggggacccatgcctcagagcatgcagcccgctcctgagcctggcctttgacccctcagcctgcatactggtatcctggtcccagctcctgccagggctgttaccgttgttttcttgaatcactcacaatgagaaactaacattttgctttttgtaataaagttaatttatattcagtta

SEQ ID NO: 433400 - DNA, 709 bp, Homo sapiens
agcgggttggagcggaagcgcacgcctgctaggatcagcggtggtggttccgcgatggtaggcggcggcggggtcggcggcggcctcctggagaatgccaaccccctcatctaccagcgctctggggagcggcctgtgacggcaggcgaggaggacgagcaggttcccgacagcatcgacgcacgcgagatcttcgatatccgccgctgctgggcgcgggcgggttccgggggcttgcggtggggggagcagtgatatcgagcagctggtggagccgcatcccagcagggcgttcctggcagagggttctaagtgggcaagggcgcagagtcccttttccttcacttcccacatctgattcgctccatcaatgacccggagcatccactgacgctagaggagttgaacgtagtagagcaggtgcgggttcaggttagcgaccccgagagtacagtggctgtggctttcacaccaaccattccgcactgcagcatggccacccttattggtctgtccatcaaggtcaagcttctgcgctcccttcctcagcgtttcaaggtcagtcggagctgagccccgggagtgagaccaggcattgagggtctactgctgaggatggggactgggagagcatgaacatggataggacatcagagtggggcctggaaggatccccattagcagagaggaaactgggaggaagctttcc

SEQ ID NO: 433401 - DNA, 7000 bp, Homo sapiens
  misc_feature (258)..(258): n is a, c, g, or t
  misc_feature (260)..(260): n is a, c, g, or t
gcggggaccgcgacgagcccgggtcgccgttggcagcagcagcagcaacaccagcagcagcagcagccccggcggcggcgcggaccccgagcgcccgggcgcaccccggcttcccggagcgcgacgcggcggcagcagccccggtgcggccgcgcgcgccttaggctcggccccgcggctcggggaccccgactcccggcccagcgagcgcgtcccccggcgccgcccgagagcccgaggaggcagcggccgcaggcncnggggaggggggcggccaccgcccgcgccgggcatcctcaggagccccagagcgcggagggcgcggcgccgccgagcggtgctggcccccgcgggctccccggaccttccccaccgcctgggcccgagggacgcgtgatcgggcgggcggccgggcgcaagggtgggagggagccgcccccgcccgcgccccctccgcccctcgccccaacccctgggcgccgggcccgggccgcgcggcctgaagcgcccgcgatggcgagcccgccgcggcacgggccgcccgggccggcgagcggagacggccccaacctcaacaacaacaacaacaacaacaaccacagcgtgcgcaagtgcggctacctgcgcaagcagaagcatggccacaagcgcttcttcgtgctgcgcggacccggcgcgggcggcgacgaggcgacggcgggcggggggtcggcgccgcaaccgccgcggctcgagtactacgagagcgagaaaaagtggcggagcaaggcaggcgcgccgaaacgggtgatcgctctcgactgctgcctgaacatcaacaagcgcgccgacgccaagcacaagtacctgatcgccctctacaccaaggacgagtacttcgccgtggccgccgagaacgagcaggagcaggagggctggtaccgcgcgctcaccgacctggtcagcgagggccgcgcggccgccggagacgcgccccccgccgccgcgcccgccgcgtcctgcagcgcctccctgcccggcgccctgggcggctctgccggcgccgccggggccgaggacagctacgggctggtggctcccgccacggccgcctaccgtgaggtgtggcaggtgaacctgaagcccaagggtctgggccagagcaagaacctgacgggggtgtaccgtctgtgcctgtctgcgcgcaccatcggcttcgtgaagctcaactgcgagcagccgtcggtgacgctgcagctcatgaacatccgccgctgcggccactcggacagcttcttcttcatcgaggtgggccgctcggccgtcacaggccccggcgagctgtggatgcaggcggacgactcggtggtggcgcagaacatccacgagaccatcctggaggccatgaaggcgctcaaggagctcttcgagttccggccgcgcagtaagagccaatcgtcggggtcgtcggccacgcaccccatcagcgtccccggcgcgcgccgccaccaccacctggtcaacctgccccccagccagacgggcctggtgcgccgctcgcgcaccgacagcctggccgccaccccgccggcggccaagtgcagctcgtgccgggtgcgcaccgccagcgagggcgacggcggcgcggcggcgggagcggcggccgcgggcgccaggccggtgtcggtggctgggagccccctgagccccgggccggtgcgcgcgcccctgagccgctcgcacaccctgagcggcggctgcggcggccgcgggagcaaggtggcgctgctgccggcagggggcgcgctgcaacacagccgctccatgtccatgcccgtggcgcactcgccgcccgccgccaccagccccggctccctgtcgtccagcagcggccacggctcgggctcctacccgccgccgcccggcccgcacccgcctctgccgcatccgctgcaccacggccccggccagcggccctccagcggcagcgcctccgcctcgggctcccccagcgaccccggcttcatgtccctggacgagtacggctccagcccaggcgacctgcgcgccttctgcagccaccgaagcaacacgcccgagtccatcgcggagacgcccccggcccgagacggcggcggcggcggtgagttctacgggtacatgaccatggacaggcccctgagccactgtggccgctcctaccgccgggtctcgggggacgcggcccaggacctggaccgagggctgcgcaagaggacctactccctgaccacgccagcccggcagcggccggtgccccagccctcctctgcctcgctggatgaatacaccctgatgcgggccaccttctcgggcagcgcgggccgcctctgcccgtcctgccccgcgtcctctcccaaggtggcctaccacccctacccagaggactacggagacatcgagatcggctcccacaggagctccagcagcaacctgggggcagacgacggctacatgcccatgacgcccggcgcggccctcgcgggcagtgggagcggcagctgcaggagcgacgactacatgcccatgagccccgccagcgtgtccgcccccaagcagatcttgcagcccagggccgccgccgccgccgccgccgccgtgccttctgcggggcctgcggggccagcacccacctctgcggcgggcaggacattcccggcgagcgggggcggctacaaggccagctcgcccgccgagagctcccccgaggacagtgggtacatgcgcatgtggtgcggttccaagctgtccatggagcatgcagatggcaagctgctgcccaacggggactacctcaacgtgtcccccagcgacgcggtcaccacgggcaccccgcccgacttcttctccgcagccctgcaccccggcggggagccgctcaggggcgttcccggctgctgctacagctccttgccccgctcctacaaggccccctacacctgtggcggggacagcgaccagtacgtgctcatgagctcccccgtggggcgcatcctggaggaggagcgtctggagcctcaggccacgccagggcccagccaggcggccagcgccttcggggccggccccacgcagccccctcaccctgtagtgccttcgcccgtgcggcctagcggcggccgcccggagggcttcttgggccagcgcggccgggcggtgaggcccacgcgcctgtccctggaggggctgcccagcctgcccagcatgcacgagtacccactgccaccggagcccaagagccccggcgagtacatcaacatcgactttggcgagcccggggcccgcctgtcgccgcccgcgcctcccctgctggcgtcggcggcctcgtcctcctcgctcttgtccgccagcagcccggcctcgtcgctgggctcaggcaccccgggcaccagcagcgacagccggcagcggtctccgctctccgactacatgaacctcgacttcagctcccccaagtctcctaagccgggcgccccgagcggccaccccgtgggctccttggacggcctcctgtcccccgaggcctcctccccgtatccgccgttgcccccgcgtccgtccgcgtccccgtcgtcgtctctgcagccgccgccaccgccgccggccccgggggagctgtaccgcctgccccccgcctcggccgttgccaccgcccagggcccgggcgccgcctcatcgttgtcctcggacaccggggacaatggtgactacaccgagatggcttttggtgtggccgccaccccgccgcaacctatcgcggcccccccgaagccagaagctgcccgcgtggccagcccgacgtcgggcgtgaagaggctgagcctcatggagcaggtgtcgggagtcgaggccttcctgcaggccagccagcccccggacccccaccgcggcgccaaggtcatccgcgcagacccgcaggggggccgccgccgccacagttccgagaccttctcctccaccacgacggtcacccccgtgtccccgtccttcgcccacaaccccaagcgccacaactcggcctccgtggaaaatgtctctctcaggaaaagcagcgagggcggcgtgggtgtcggccctggagggggcgacgagccgcccacctccccacgacagttgcagccggcgccccctttggcaccgcagggccggccgtggaccccgggtcagcccgggggcttggtcggttgtcctgggagcggtggatcgcccatgcgcagagagacctctgccggcttccagaatggtctcaactacatcgccatcgacgtgagggaggagcccgggctgccaccccagccgcagccgccgccgccgccgcttcctcagccgggagacaagagctcctggggccggacccgaagcctcgggggtctcatcagcgctgtgggcgtcggcagcaccggcggcgggtgcggggggccgggtcccggtgccctgccccctgccaacacctacgccagcattgacttcttgtcccaccacttgaaggaggccaccatcgtgaaagagtgaagatctgtctggctttatcaccaggatgtcacatgtcagagaatatcattaaaagaagacgctcagcactgtttcagcccgaagctgcttgcagttttcttttggatctgagcaatgactgtgtttggaaacatctgtggactctgttagatgaggcaccaacaaggcaaggtcacctgcctctttcccttgttcccggatggggcattcatcattgtgctgtttgcgtttgttttgttttgttttaacaaaattagctgaagaagttattctcaagaaaattggatgttttcattggccttcttaaattgtggccagtgtcttttaatttcttcttcttttccttttggcaaagcagatataaccctcagcatgctaggagagtgcacccgtacctatggaagtggtaaaatctggtatttactggcttacactcaaaacgaccacagtcctacctcagttcaaggtaaagccggatttccgtggcgggggtcccacaggacctcctgtagtagcccctgcgctgtgtgtctggagcgcggtcctcggccttattgaaatggtccaagtagacagctgcttgttggattccagtgcaggtacctgcgatgtttacgtccacaccgagcccagtgtgggactgacatttctcaatggaagtgaaatttgggattggactttgaagacggattactaaataataattattatatgtaactgaagcaacctacttttgaaaatcaactgtattgggtagtgggaggtgggagggaagggctttgggaaggggatgaatatctctttttacctttaacagacttgtttaatcttctcgatgtagatgtttatgtaggtacttcacattgcaaacgccttttattctatttacaagctcagatgtctctgctctcctgaatcttgggcatgcctttctgtaaccaaaaatccctgtaggcgtgctagcaattccagggtggtccgggtttggcagatttgatttttaaaaaacgtattatctttaataaaatgttattatgtcaaccagtgaggctgccctgaacaaaaaaaaacaaaaagaaaaaaaaaaaaaaggaaagaaagaaactgataaaaagaggcattccagcccctatgttattgatggaaaaagaaaaagaagaaaagcaatctcgcagtacatgttacttgtcgaaaaaattccggacaagactacccttgttttatgttttcagtattctgaaaataccagtgtgtggcagttctcgcagatgttacctaaaactgctgaacttgaccggcagaatgttctgccgttttctgctccctcgacacttgattggagggctgtcgacctctcctcccgtgggggcttccccagtgcctatcttctctgatagtcatggagaggttacactaattcattggagatgtaagttgttggttttgttttgttttgtttttagaaaaatatatataaatatataatagatatctatcgctatagaataatgcattaataaaatgaggcttttttagaggaagaccaaaaaattcaatgtcttaaaaatatatttaatggcaatgcaaaagtcttcctgcttccgtgctgaactttagaacagaggattgtattgcaagacaaagttgaatgtaaagtgatctccctgaacatttttaaggttttacttttctgaaattatacatcacagcagtgcataggccatataatgttagctggaaggtcaatttcagtgtatgatatactttattaagatgtataaaacatcctgaagtttttatttagttttgggaataggcatcaatgggtggtatttgctttgtaactccccccaggtacgatagggactgaatatggaccctgctgaaagcagtgtattgacgcatatttaactcgccctctatccgtagagtagtcatgacactatacagatggttcgtgttcatactgcagcttaaaacaagcaaaatacacagatgataatatgctaaattttcctctatcctgtacatttcacaaaaaggcatatgcaatatttacatttttaatttagtttacagaatggaaccaaaatgtataaatgttatgtttgctaaaacttcacaatgtatattgggtctttgtacattttgcctgacttaccttaaatttaaaatattttttgctatataaactttaacagttattaaacagtgttttctttttgggtacgtattgtttctggatatcaagatgttaaatatatttcttgctattgtgatatgacaagagacttaacttatcttgctctgtcttccactgtacacgctgtatataggggtcaatgtgatgctgctggagacgagaataaactggactagaatagtgcattgtatttagtctgtattgatcatggatgccctccttaatagccatatgcaataaaataaagtacattatttatgaaatgaa

SEQ ID NO: 433402 - DNA, 6916 bp, Homo sapiens
  misc_feature (258)..(258): n is a, c, g, or t
  misc_feature (260)..(260): n is a, c, g, or t
gcggggaccgcgacgagcccgggtcgccgttggcagcagcagcagcaacaccagcagcagcagcagccccggcggcggcgcggaccccgagcgcccgggcgcaccccggcttcccggagcgcgacgcggcggcagcagccccggtgcggccgcgcgcgccttaggctcggccccgcggctcggggaccccgactcccggcccagcgagcgcgtcccccggcgccgcccgagagcccgaggaggcagcggccgcaggcncnggggaggggggcggccaccgcccgcgccgggcatcctcaggagccccagagcgcggagggcgcggcgccgccgagcggtgctggcccccgcgggctccccggaccttccccaccgcctgggcccgagggacgcgtgatcgggcgggcggccgggcgcaagggtgggagggagccgcccccgcccgcgccccctccgcccctcgccccaacccctgggcgccgggcccgggccgcgcggcctgaagcgcccgcgatggcgagcccgccgcggcacgggccgcccgggccggcgagcggagacggccccaacctcaacaacaacaacaacaacaacaaccacagcgtgcgcaagtgcggctacctgcgcaagcagaagcatggccacaagcgcttcttcgtgctgcgcggacccggcgcgggcggcgacgaggcgacggcgggcggggggtcggcgccgcaaccgccgcggctcgagtactacgagagcgagaaaaagtggcggagcaaggcaggcgcgccgaaacgggtgatcgctctcgactgctgcctgaacatcaacaagcgcgccgacgccaagcacaagtacctgatcgccctctacaccaaggacgagtacttcgccgtggccgccgagaacgagcaggagcaggagggctggtaccgcgcgctcaccgacctggtcagcgagggccgcgcggccgccggagacgcgccccccgccgccgcgcccgccgcgtcctgcagcgcctccctgcccggcgccctgggcggctctgccggcgccgccggggccgaggacagctacgggctggtggctcccgccacggccgcctaccgtgaggtgtggcaggtgaacctgaagcccaagggtctgggccagagcaagaacctgacgggggtgtaccgtctgtgcctgtctgcgcgcaccatcggcttcgtgaagctcaactgcgagcagccgtcggtgacgctgcagctcatgaacatccgccgctgcggccactcggacagcttcttcttcatcgaggtgggccgctcggccgtcacaggccccggcgagctgtggatgcaggcggacgactcggtggtggcgcagaacatccacgagaccatcctggaggccatgaaggcgctcaaggagctcttcgagttccggccgcgcagtaagagccaatcgtcggggtcgtcggccacgcaccccatcagcgtccccggcgcgcgccgccaccaccacctggtcaacctgccccccagccagacgggcctggtgcgccgctcgcgcaccgacagcctggccgccaccccgccggcggccaagtgcagctcgtgccgggtgcgcaccgccagcgagggcgacggcggcgcggcggcgggagcggcggccgcgggcgccaggccggtgtcggtggctgggagccccctgagccccgggccggtgcgcgcgcccctgagccgctcgcacaccctgagcggcggctgcggcggccgcgggagcaaggtggcgctgctgccggcagggggcgcgctgcaacacagccgctccatgtccatgcccgtggcgcactcgccgcccgccgccaccagccccggctccctgtcgtccagcagcggccacggctcgggctcctacccgccgccgcccggcccgcacccgcctctgccgcatccgctgcaccacggccccggccagcggccctccagcggcagcgcctccgcctcgggctcccccagcgaccccggcttcatgtccctggacgagtacggctccagcccaggcgacctgcgcgccttctgcagccaccgaagcaacacgcccgagtccatcgcggagacgcccccggcccgagacggcggcggcggcggtgagttctacgggtacatgaccatggacaggcccctgagccactgtggccgctcctaccgccgggtctcgggggacgcggcccaggacctggaccgagggctgcgcaagaggacctactccctgaccacgccagcccggcagcggccggtgccccagccctcctctgcctcgctggatgaatacaccctgatgcgggccaccttctcgggcagcgcgggccgcctctgcccgtcctgccccgcgtcctctcccaaggtggcctaccacccctacccagaggactacggagacatcgagatcggctcccacaggagctccagcagcaacctgggggcagacgacggctacatgcccatgacgcccggcgcggccctcgcgggcagtgggagcggcagctgcaggagcgacgactacatgcccatgagccccgccagcgtgtccgcccccaagcagatcttgcagcccagggccgccgccgccgccgccgccgccgtgccttctgcggggcctgcggggccagcacccacctctgcggcgggcaggacattcccggcgagcgggggcggctacaaggccagctcgcccgccgagagctcccccgaggacagtgggtacatgcgcatgtggtgcggttccaagctgtccatggagcatgcagatggcaagctgctgcccaacggggactacctcaacgtgtcccccagcgacgcggtcaccacgggcaccccgcccgacttcttctccgcagccctgcaccccggcggggagccgctcaggggcgttcccggctgctgctacagctccttgccccgctcctacaaggccccctacacctgtggcggggacagcgaccagtacgtgctcatgagctcccccgtggggcgcatcctggaggaggagcgtctggagcctcaggccacgccagggcccagccaggcggccagcgccttcggggccggccccacgcagccccctcaccctgtagtgccttcgcccgtgcggcctagcggcggccgcccggagggcttcttgggccagcgcggccgggcggtgaggcccacgcgcctgtccctggaggggctgcccagcctgcccagcatgcacgagtacccactgccaccggagcccaagagccccggcgagtacatcaacatcgactttggcgagcccggggcccgcctgtcgccgcccgcgcctcccctgctggcgtcggcggcctcgtcctcctcgctcttgtccgccagcagcccggcctcgtcgctgggctcaggcaccccgggcaccagcagcgacagccggcagcggtctccgctctccgactacatgaacctcgacttcagctcccccaagtctcctaagccgggcgccccgagcggccaccccgtgggctccttggacggcctcctgtcccccgaggcctcctccccgtatccgccgttgcccccgcgtccgtccgcgtccccgtcgtcgtctctgcagccgccgccaccgccgccggccccgggggagctgtaccgcctgccccccgcctcggccgttgccaccgcccagggcccgggcgccgcctcatcgttgtcctcggacaccggggacaatggtgactacaccgagatggcttttggtgtggccgccaccccgccgcaacctatcgcggcccccccgaagccagaagctgcccgcgtggccagcccgacgtcgggcgtgaagaggctgagcctcatggagcaggtgtcgggagtcgaggccttcctgcaggccagccagcccccggacccccaccgcggcgccaaggtcatccgcgcagacccgcaggggggccgccgccgccacagttccgagaccttctcctccaccacgacggtcacccccgtgtccccgtccttcgcccacaaccccaagcgccacaactcggcctccgtggaaaatgtctctctcaggaaaagcagcgagggcggcgtgggtgtcggccctggagggggcgacgagccgcccacctccccacgacagttgcagccggcgccccctttggcaccgcagggccggccgtggaccccgggtcagcccgggggcttggtcggttgtcctgggagcggtggatcgcccatgcgcagagagacctctgccggcttccagaatggtctcaactacatcgccatcgacgtgagggaggagcccgggctgccaccccagccgcagccgccgccgccgccgcttcctcagccgggagacaagagctcctggggccggacccgaagcctcgggggtctcatcagcgctgtgggcgtcggcagcaccggcggcgggtgcggggggccgggtcccggtgccctgccccctgccaacacctacgccagcattgacttcttgtcccaccacttgaaggaggccaccatcgtgaaagagtgaagatctgtctggctttatcaccaggatgtcacatgtcagagaatatcattaaaagaagacgctcagcactgtttcagcccgaagctgcttgcagttttcttttggatctgagcaatgactgtgtttggaaacatctgtggactctgttagatgaggcaccaacaaggcaaggtcacctgcctctttcccttgttcccggatggggcattcatcattgtgctgtttgcgtttgttttgttttgttttaacaaaattagctgaagaagttattctcaagaaaattggatgttttcattggccttcttaaattgtggccagtgtcttttaatttcttcttcttttccttttggcaaagcagatataaccctcagcatgctaggagagtgcacccgtacctatggaagtggtaaaatctggtatttactggcttacactcaaaacgaccacagtcctacctcagttcaaggtaaagccggatttccgtggcgggggtcccacaggacctcctgtagtagcccctgcgctgtgtgtctggagcgcggtcctcggccttattgaaatggtccaagtagacagctgcttgttggattccagtgcaggtacctgcgatgtttacgtccacaccgagcccagtgtgggactgacatttctcaatggaagtgaaatttgggattggactttgaagacggattactaaataataattattatatgtaactgaagcaacctacttttgaaaatcaactgtattgggtagtgggaggtgggagggaagggctttgggaaggggatgaatatctctttttacctttaacagacttgtttaatcttctcgatgtagatgtttatgtaggtacttcacattgcaaacgccttttattctatttacaagctcagatgtctctgctctcctgaatcttgggcatgcctttctgtaaccaaaaatccctgtaggcgtgctagcaattccagggtggtccgggtttggcagatttgatttttaaaaaacgtattatctttaataaaatgttattatgtcaaccagtgaggctgccctgaacaaaaaaaaacaaaaagaaaaaaaaaaaaaaggaaagaaagaaactgataaaaagaggcattccagcccctatgttattgatggaaaaagaaaaagaagaaaagcaatctcgcagtacatgttacttgtcgaaaaaattccggacaagactacccttgttttatgttttcagtattctgaaaataccagtgtgtggcagttctcgcagatgttacctaaaactgctgaacttgaccggcagaatgttctgccgttttctgctccctcgacacttgattggagggctgtcgacctctcctcccgtgggggcttccccagtgcctatcttctctgatagtcatggagaggttacactaattcattggagatgtaagttgttggttttgttttgttttgtttttagaaaaatatatataaatatataatagatatctatcgctatagaataatgcattaataaaatgaggcttttttagaggaagaccaaaaaattcaatgtcttaaaaatatatttaatggcaatgcaaaagtcttcctgcttccgtgctgaactttagaacagaggattgtattgcaagacaaagttgaatgtaaagtgatctccctgaacatttttaaggttttacttttctgaaattatacatcacagcagtgcataggccatataatgttagctggaaggtcaatttcagtgtatgatatactttattaagatgtataaaacatcctgaagtttttatttagttttgggaataggcatcaatgggtggtatttgctttgtaactccccccaggtacgatagggactgaatatggaccctgctgaaagcagtgtattgacgcatatttaactcgccctctatccgtagagtagtcatgacactatacagatggttcgtgttcatactgcagcttaaaacaagcaaaatacacagatgataatatgctaaattttcctctatcctgtacatttcacaaaaaggcatatgcaatatttacatttttaatttagtttacagaatggaaccaaaatgtataaatgttatgtttgctaaaacttcacaatgtatattgggtctttgtacattttgcctgacttaccttaaatttaaaatattttttgctatataaactttaacagttattaaacagtgttttctttttgggtacgtattgtttctggatatcaagatgttaaatatatttcttgctattgtgatatgacaagagacttaacttatcttgctctgtcttccactgtacacgctgtatataggggtcaatgtgatgctgctggagacgagaataaactggactagaatagtg

SEQ ID NO: 433403 - DNA, 2489 bp, Homo sapiens
tgtgctgatcctacatcgagtatcgtcgctctgatcgtggatatggaggcgaaactactgatagtgcagttgtagctagggtagcttgtcctgggggtcaggttatagggtcatgagagtatagtagttcgcaatgactgtgtttggaaacatctgtggactctgttagatgaggcaccaacaaggcaaggtcacctgcctctttcccttgttcccggatggggcattcatcattgtgctgtttgcgtttgttttgttttgttttaacaaaattagctgaagaagttattctcaagaaaattggatgttttcattggccttcttaaattgtggccagtgtcttttaatttcttcttcttttccttttggcaaagcagatataaccctcagcatgctaggagagtgcacccgtacctatggaagtggtaaaatctggtatttactggcttacactcaaaacgaccacagtcctacctcagttcaaggtaaagccggatttccgtggcgggggtcccacaggacctcctgtagtagcccctgcgctgtgtgtctggagcgcggtcctcggccttattgaaatggtccaagtagacagctgcttgttggattccagtgcaggtacctgcgatgtttacgtccacaccgagcccagtgtgggactgacatttctcaatggaagtgaaatttgggattggactttgaagacggattactaaataataattattatatgtaactgaagcaacctacttttgaaaatcaactgtattgggtagtgggaggtgggagggaagggctttgggaaggggatgaatatctctttttacctttaacagacttgtttaatcttctcgatgtagatgtttatgtaggtacttcacattgcaaacgccttttattctatttacaagctcagatgtctctgctctcctgaatcttgggcatgcctttctgtaaccaaaaatccctgtaggcgtgctagcaattccagggtggtccgggtttggcagatttgatttttaaaaaacgtattatctttaataaaatgttattatgtcaaccagtgaggctgccctgaacaaaaaaaaacaaaaagaaaaaaaaaaaaaaggaaagaaagaaactgataaaaagaggcattccagcccctatgttattgatggaaaaagaaaaagaagaaaagcaatctcgcagtacatgttacttgtcgaaaaaattccggacaagactacccttgttttatgttttcagtattctgaaaataccagtgtgtggcagttctcgcagatgttacctaaaactgctgaacttgaccggcagaatgttctgccgttttctgctccctcgacacttgattggagggctgtcgacctctcctcccgtgggggcttccccagtgcctatcttctctgatagtcatggagaggttacactaattcattggagatgtaagttgttggttttgttttgttttgtttttagaaaaatatatataaatatataatagatatctatcgctatagaataatgcattaataaaatgaggcttttttagaggaagaccaaaaaattcaatgtcttaaaaatatatttaatggcaatgcaaaagtcttcctgcttccgtgctgaactttagaacagaggattgtattgcaagacaaagttgaatgtaaagtgatctccctgaacatttttaaggttttacttttctgaaattatacatcacagcagtgcataggccatataatgttagctggaaggtcaatttcagtgtatgatatactttattaagatgtataaaacatcctgaagtttttatttagttttgggaataggcatcaatgggtggtatttgctttgtaactccccccaggtacgatagggactgaatatggaccctgctgaaagcagtgtattgacgcatatttaactcgccctctatccgtagagtagtcatgacactatacagatggttcgtgttcatactgcagcttaaaacaagcaaaatacacagatgataatatgctaaattttcctctatcctgtacatttcacaaaaaggcatatgcaatatttacatttttaatttagtttacagaatggaaccaaaatgtataaatgttatgtttgctaaaacttcacaatgtatattgggtctttgtacattttgcctgacttaccttaaatttaaaatattttttgctatataaactttaacagttattaaacagtgttttctttttgggtacgtattgtttctggatatcaagatgttaaatatatttcttgctattgtgatatgacaagagacttaacttatcttgctctgtcttccactgtacacgctgtatataggggtcaatgtgatgctgctggagacgagaataaactggactagaatagtgcattgtatttagtctgtattgatcatggatgccctccttaatagccatatgcaataaaataaagtacattatttatgaaatgaa

SEQ ID NO: 433404 - DNA, 6527 bp, Homo sapiens
  misc_feature (258)..(258): n is a, c, g, or t
  misc_feature (260)..(260): n is a, c, g, or t
gcggggaccgcgacgagcccgggtcgccgttggcagcagcagcagcaacaccagcagcagcagcagccccggcggcggcgcggaccccgagcgcccgggcgcaccccggcttcccggagcgcgacgcggcggcagcagccccggtgcggccgcgcgcgccttaggctcggccccgcggctcggggaccccgactcccggcccagcgagcgcgtcccccggcgccgcccgagagcccgaggaggcagcggccgcaggcncnggggaggggggcggccaccgcccgcgccgggcatcctcaggagccccagagcgcggagggcgcggcgccgccgagcggtgctggcccccgcgggctccccggaccttccccaccgcctgggcccgagggacgcgtgatcgggcgggcggccgggcgcaagggtgggagggagccgcccccgcccgcgccccctccgcccctcgccccaacccctgggcgccgggcccgggccgcgcggcctgaagcgcccgcgatggcgagcccgccgcggcacgggccgcccgggccggcgagcggagacggccccaacctcaacaacaacaacaacaacaacaaccacagcgtgcgcaagtgcggctacctgcgcaagcagaagcatggccacaagcgcttcttcgtgctgcgcggacccggcgcgggcggcgacgaggcgacggcgggcggggggtcggcgccgcaaccgccgcggctcgagtactacgagagcgagaaaaagtggcggagcaaggcaggcgcgccgaaacgggtgatcgctctcgactgctgcctgaacatcaacaagcgcgccgacgccaagcacaagtacctgatcgccctctacaccaaggacgagtacttcgccgtggccgccgagaacgagcaggagcaggagggctggtaccgcgcgctcaccgacctggtcagcgagggccgcgcggccgccggagacgcgccccccgccgccgcgcccgccgcgtcctgcagcgcctccctgcccggcgccctgggcggctctgccggcgccgccggggccgaggacagctacgggctggtggctcccgccacggccgcctaccgtgaggtgtggcaggtgaacctgaagcccaagggtctgggccagagcaagaacctgacgggggtgtaccgtctgtgcctgtctgcgcgcaccatcggcttcgtgaagctcaactgcgagcagccgtcggtgacgctgcagctcatgaacatccgccgctgcggccactcggacagcttcttcttcatcgaggtgggccgctcggccgtcacaggccccggcgagctgtggatgcaggcggacgactcggtggtggcgcagaacatccacgagaccatcctggaggccatgaaggcgctcaaggagctcttcgagttccggccgcgcagtaagagccaatcgtcggggtcgtcggccacgcaccccatcagcgtccccggcgcgcgccgccaccaccacctggtcaacctgccccccagccagacgggcctggtgcgccgctcgcgcaccgacagcctggccgccaccccgccggcggccaagtgcagctcgtgccgggtgcgcaccgccagcgagggcgacggcggcgcggcggcgggagcggcggccgcgggcgccaggccggtgtcggtggctgggagccccctgagccccgggccggtgcgcgcgcccctgagccgctcgcacaccctgagcggcggctgcggcggccgcgggagcaaggtggcgctgctgccggcagggggcgcgctgcaacacagccgctccatgtccatgcccgtggcgcactcgccgcccgccgccaccagccccggctccctgtcgtccagcagcggccacggctcgggctcctacccgccgccgcccggcccgcacccgcctctgccgcatccgctgcaccacggccccggccagcggccctccagcggcagcgcctccgcctcgggctcccccagcgaccccggcttcatgtccctggacgagtacggctccagcccaggcgacctgcgcgccttctgcagccaccgaagcaacacgcccgagtccatcgcggagacgcccccggcccgagacggcggcggcggcggtgagttctacgggtacatgaccatggacaggcccctgagccactgtggccgctcctaccgccgggtctcgggggacgcggcccaggacctggaccgagggctgcgcaagaggacctactccctgaccacgccagcccggcagcggccggtgccccagccctcctctgcctcgctggatgaatacaccctgatgcgggccaccttctcgggcagcgcgggccgcctctgcccgtcctgccccgcgtcctctcccaaggtggcctaccacccctacccagaggactacggagacatcgagatcggctcccacaggagctccagcagcaacctgggggcagacgacggctacatgcccatgacgcccggcgcggccctcgcgggcagtgggagcggcagctgcaggagcgacgactacatgcccatgagccccgccagcgtgtccgcccccaagcagatcttgcagcccagggccgccgccgccgccgccgccgccgtgccttctgcggggcctgcggggccagcacccacctctgcggcgggcaggacattcccggcgagcgggggcggctacaaggccagctcgcccgccgagagctcccccgaggacagtgggtacatgcgcatgtggtgcggttccaagctgtccatggagcatgcagatggcaagctgctgcccaacggggactacctcaacgtgtcccccagcgacgcggtcaccacgggcaccccgcccgacttcttctccgcagccctgcaccccggcggggagccgctcaggggcgttcccggctgctgctacagctccttgccccgctcctacaaggccccctacacctgtggcggggacagcgaccagtacgtgctcatgagctcccccgtggggcgcatcctggaggaggagcgtctggagcctcaggccacgccagggcccagccaggcggccagcgccttcggggccggccccacgcagccccctcaccctgtagtgccttcgcccgtgcggcctagcggcggccgcccggagggcttcttgggccagcgcggccgggcggtgaggcccacgcgcctgtccctggaggggctgcccagcctgcccagcatgcacgagtacccactgccaccggagcccaagagccccggcgagtacatcaacatcgactttggcgagcccggggcccgcctgtcgccgcccgcgcctcccctgctggcgtcggcggcctcgtcctcctcgctcttgtccgccagcagcccggcctcgtcgctgggctcaggcaccccgggcaccagcagcgacagccggcagcggtctccgctctccgactacatgaacctcgacttcagctcccccaagtctcctaagccgggcgccccgagcggccaccccgtgggctccttggacggcctcctgtcccccgaggcctcctccccgtatccgccgttgcccccgcgtccgtccgcgtccccgtcgtcgtctctgcagccgccgccaccgccgccggccccgggggagctgtaccgcctgccccccgcctcggccgttgccaccgcccagggcccgggcgccgcctcatcgttgtcctcggacaccggggacaatggtgactacaccgagatggcttttggtgtggccgccaccccgccgcaacctatcgcggcccccccgaagccagaagctgcccgcgtggccagcccgacgtcgggcgtgaagaggctgagcctcatggagcaggtgtcgggagtcgaggccttcctgcaggccagccagcccccggacccccaccgcggcgccaaggtcatccgcgcagacccgcaggggggccgccgccgccacagttccgagaccttctcctccaccacgacggtcacccccgtgtccccgtccttcgcccacaaccccaagcgccacaactcggcctccgtggaaaatgtctctctcaggaaaagcagcgagggcggcgtgggtgtcggccctggagggggcgacgagccgcccacctccccacgacagttgcagccggcgccccctttggcaccgcagggccggccgtggaccccgggtcagcccgggggcttggtcggttgtcctgggagcggtggatcgcccatgcgcagagagacctctgccggcttccagaatggtctcaactacatcgccatcgacgtgagggaggagcccgggctgccaccccagccgcagccgccgccgccgccgcttcctcagccgggagacaagagctcctggggccggacccgaagcctcgggggtctcatcagcgctgtgggcgtcggcagcaccggcggcgggtgcggggggccgggtcccggtgccctgccccctgccaacacctacgccagcattgacttcttgtcccaccacttgaaggaggccaccatcgtgaaagagtgaagatctgtctggctttatcaccaggatgtcacatgtcagagaatatcattaaaagaagacgctcagcactgtttcagcccgaagctgcttgcagttttcttttggatctgagcaatgactgtgtttggaaacatctgtggactctgttagatgaggcaccaacaaggcaaggtcacctgcctctttcccttgttcccggatggggcattcatcattgtgctgtttgcgtttgttttgttttgttttaacaaaattagctgaagaagttattctcaagaaaattggatgttttcattggccttcttaaattgtggccagtgtcttttaatttcttcttcttttccttttggcaaagcagatataaccctcagcatgctaggagagtgcacccgtacctatggaagtggtaaaatctggtatttactggcttacactcaaaacgaccacagtcctacctcagttcaaggtaaagccggatttccgtggcgggggtcccacaggacctcctgtagtagcccctgcgctgtgtgtctggagcgcggtcctcggccttattgaaatggtccaagtagacagctgcttgttggattccagtgcaggtacctgcgatgtttacgtccacaccgagcccagtgtgggactgacatttctcaatggaagtgaaatttgggattggactttgaagacggattactaaataataattattatatgtaactgaagcaacctacttttgaaaatcaactgtattgggtagtgggaggtgggagggaagggctttgggaaggggatgaatatctctttttacctttaacagacttgtttaatcttctcgatgtagatgtttatgtaggtacttcacattgcaaacgccttttattctatttacaagctcagatgtctctgctctcctgaatcttgggcatgcctttctgtaaccaaaaatccctgtaggcgtgctagcaattccagggtggtccgggtttggcagatttgatttttaaaaaacgtattatctttaataaaatgttattatgtcaaccagtgaggctgccctgaacaaaaaaaaacaaaaagaaaaaaaaaaaaaaggaaagaaagaaactgataaaaagaggcattccagcccctatgttattgatggaaaaagaaaaagaagaaaagcaatctcgcagtacatgttacttgtcgaaaaaattccggacaagactacccttgttttatgttttcagtattctgaaaataccagtgtgtggcagttctcgcagatgttacctaaaactgctgaacttgaccggcagaatgttctgccgttttctgctccctcgacacttgattggagggctgtcgacctctcctcccgtgggggcttccccagtgcctatcttctctgatagtcatggagaggttacactaattcattggagatgtaagttgttggttttgttttgttttgtttttagaaaaatatatataaatatataatagatatctatcgctatagaataatgcattaataaaatgaggcttttttagaggaagaccaaaaaattcaatgtcttaaaaatatatttaatggcaatgcaaaagtcttcctgcttccgtgctgaactttagaacagaggattgtattgcaagacaaagttgaatgtaaagtgatctccctgaacatttttaaggttttacttttctgaaattatacatcacagcagtgcataggccatataatgttagctggaaggtcaatttcagtgtatgatatactttattaagatgtataaaacatcctgaagtttttatttagttttgggaataggctccagggggggaagcgtgagactccccagtacataggactgatatgaccggtgaagcggttgacgctataatgctcacggagacgccccataaaggaggggcaacgggtacaagccacaacaattgaatccctctacctccaaggacaaaaaacaaatgtttgacagcaggggagggcc

SEQ ID NO: 433405 - DNA, 7323 bp, Homo sapiens
  misc_feature (258)..(258): n is a, c, g, or t
  misc_feature (260)..(260): n is a, c, g, or t
gcggggaccgcgacgagcccgggtcgccgttggcagcagcagcagcaacaccagcagcagcagcagccccggcggcggcgcggaccccgagcgcccgggcgcaccccggcttcccggagcgcgacgcggcggcagcagccccggtgcggccgcgcgcgccttaggctcggccccgcggctcggggaccccgactcccggcccagcgagcgcgtcccccggcgccgcccgagagcccgaggaggcagcggccgcaggcncnggggaggggggcggccaccgcccgcgccgggcatcctcaggagccccagagcgcggagggcgcggcgccgccgagcggtgctggcccccgcgggctccccggaccttccccaccgcctgggcccgagggacgcgtgatcgggcgggcggccgggcgcaagggtgggagggagccgcccccgcccgcgccccctccgcccctcgccccaacccctgggcgccgggcccgggccgcgcggcctgaagcgcccgcgatggcgagcccgccgcggcacgggccgcccgggccggcgagcggagacggccccaacctcaacaacaacaacaacaacaacaaccacagcgtgcgcaagtgcggctacctgcgcaagcagaagcatggccacaagcgcttcttcgtgctgcgcggacccggcgcgggcggcgacgaggcgacggcgggcggggggtcggcgccgcaaccgccgcggctcgagtactacgagagcgagaaaaagtggcggagcaaggcaggcgcgccgaaacgggtgatcgctctcgactgctgcctgaacatcaacaagcgcgccgacgccaagcacaagtacctgatcgccctctacaccaaggacgagtacttcgccgtggccgccgagaacgagcaggagcaggagggctggtaccgcgcgctcaccgacctggtcagcgagggccgcgcggccgccggagacgcgccccccgccgccgcgcccgccgcgtcctgcagcgcctccctgcccggcgccctgggcggctctgccggcgccgccggggccgaggacagctacgggctggtggctcccgccacggccgcctaccgtgaggtgtggcaggtgaacctgaagcccaagggtctgggccagagcaagaacctgacgggggtgtaccgtctgtgcctgtctgcgcgcaccatcggcttcgtgaagctcaactgcgagcagccgtcggtgacgctgcagctcatgaacatccgccgctgcggccactcggacagcttcttcttcatcgaggtgggccgctcggccgtcacaggccccggcgagctgtggatgcaggcggacgactcggtggtggcgcagaacatccacgagaccatcctggaggccatgaaggcgctcaaggagctcttcgagttccggccgcgcagtaagagccaatcgtcggggtcgtcggccacgcaccccatcagcgtccccggcgcgcgccgccaccaccacctggtcaacctgccccccagccagacgggcctggtgcgccgctcgcgcaccgacagcctggccgccaccccgccggcggccaagtgcagctcgtgccgggtgcgcaccgccagcgagggcgacggcggcgcggcggcgggagcggcggccgcgggcgccaggccggtgtcggtggctgggagccccctgagccccgggccggtgcgcgcgcccctgagccgctcgcacaccctgagcggcggctgcggcggccgcgggagcaaggtggcgctgctgccggcagggggcgcgctgcaacacagccgctccatgtccatgcccgtggcgcactcgccgcccgccgccaccagccccggctccctgtcgtccagcagcggccacggctcgggctcctacccgccgccgcccggcccgcacccgcctctgccgcatccgctgcaccacggccccggccagcggccctccagcggcagcgcctccgcctcgggctcccccagcgaccccggcttcatgtccctggacgagtacggctccagcccaggcgacctgcgcgccttctgcagccaccgaagcaacacgcccgagtccatcgcggagacgcccccggcccgagacggcggcggcggcggtgagttctacgggtacatgaccatggacaggcccctgagccactgtggccgctcctaccgccgggtctcgggggacgcggcccaggacctggaccgagggctgcgcaagaggacctactccctgaccacgccagcccggcagcggccggtgccccagccctcctctgcctcgctggatgaatacaccctgatgcgggccaccttctcgggcagcgcgggccgcctctgcccgtcctgccccgcgtcctctcccaaggtggcctaccacccctacccagaggactacggagacatcgagatcggctcccacaggagctccagcagcaacctgggggcagacgacggctacatgcccatgacgcccggcgcggccctcgcgggcagtgggagcggcagctgcaggagcgacgactacatgcccatgagccccgccagcgtgtccgcccccaagcagatcttgcagcccagggccgccgccgccgccgccgccgccgtgccttctgcggggcctgcggggccagcacccacctctgcggcgggcaggacattcccggcgagcgggggcggctacaaggccagctcgcccgccgagagctcccccgaggacagtgggtacatgcgcatgtggtgcggttccaagctgtccatggagcatgcagatggcaagctgctgcccaacggggactacctcaacgtgtcccccagcgacgcggtcaccacgggcaccccgcccgacttcttctccgcagccctgcaccccggcggggagccgctcaggggcgttcccggctgctgctacagctccttgccccgctcctacaaggccccctacacctgtggcggggacagcgaccagtacgtgctcatgagctcccccgtggggcgcatcctggaggaggagcgtctggagcctcaggccacgccagggcccagccaggcggccagcgccttcggggccggccccacgcagccccctcaccctgtagtgccttcgcccgtgcggcctagcggcggccgcccggagggcttcttgggccagcgcggccgggcggtgaggcccacgcgcctgtccctggaggggctgcccagcctgcccagcatgcacgagtacccactgccaccggagcccaagagccccggcgagtacatcaacatcgactttggcgagcccggggcccgcctgtcgccgcccgcgcctcccctgctggcgtcggcggcctcgtcctcctcgctcttgtccgccagcagcccggcctcgtcgctgggctcaggcaccccgggcaccagcagcgacagccggcagcggtctccgctctccgactacatgaacctcgacttcagctcccccaagtctcctaagccgggcgccccgagcggccaccccgtgggctccttggacggcctcctgtcccccgaggcctcctccccgtatccgccgttgcccccgcgtccgtccgcgtccccgtcgtcgtctctgcagccgccgccaccgccgccggccccgggggagctgtaccgcctgccccccgcctcggccgttgccaccgcccagggcccgggcgccgcctcatcgttgtcctcggacaccggggacaatggtgactacaccgagatggcttttggtgtggccgccaccccgccgcaacctatcgcggcccccccgaagccagaagctgcccgcgtggccagcccgacgtcgggcgtgaagaggctgagcctcatggagcaggtgtcgggagtcgaggccttcctgcaggccagccagcccccggacccccaccgcggcgccaaggtcatccgcgcagacccgcaggggggccgccgccgccacagttccgagaccttctcctccaccacgacggtcacccccgtgtccccgtccttcgcccacaaccccaagcgccacaactcggcctccgtggaaaatgtctctctcaggaaaagcagcgagggcggcgtgggtgtcggccctggagggggcgacgagccgcccacctccccacgacagttgcagccggcgccccctttggcaccgcagggccggccgtggaccccgggtcagcccgggggcttggtcggttgtcctgggagcggtggatcgcccatgcgcagagagacctctgccggcttccagaatggtctcaactacatcgccatcgacgtgagggaggagcccgggctgccaccccagccgcagccgccgccgccgccgcttcctcagccgggagacaagagctcctggggccggacccgaagcctcgggggtctcatcagcgctgtgggcgtcggcagcaccggcggcgggtgcggggggccgggtcccggtgccctgccccctgccaacacctacgccagcattgacttcttgtcccaccacttgaaggaggccaccatcgtgaaagagtgaagatctgtctggctttatcaccaggatgtcacatgtcagagaatatcattaaaagaagacgctcagcactgtttcagcccgaagctgcttgcagttttcttttggatctgagcaatgactgtgtttggaaacatctgtggactctgttagatgaggcaccaacaaggcaaggtcacctgcctctttcccttgttcccggatggggcattcatcattgtgctgtttgcgtttgttttgttttgttttaacaaaattagctgaagaagttattctcaagaaaattggatgttttcattggccttcttaaattgtggccagtgtcttttaatttcttcttcttttccttttggcaaagcagatataaccctcagcatgctaggagagtgcacccgtacctatggaagtggtaaaatctggtatttactggcttacactcaaaacgaccacagtcctacctcagttcaaggtaaagccggatttccgtggcgggggtcccacaggacctcctgtagtagcccctgcgctgtgtgtctggagcgcggtcctcggccttattgaaatggtccaagtagacagctgcttgttggattccagtgcaggtacctgcgatgtttacgtccacaccgagcccagtgtgggactgacatttctcaatggaagtgaaatttgggattggactttgaagacggattactaaataataattattatatgtaactgaagcaacctacttttgaaaatcaactgtattgggtagtgggaggtgggagggaagggctttgggaaggggatgaatatctctttttacctttaacagacttgtttaatcttctcgatgtagatgtttatgtaggtacttcacattgcaaacgccttttattctatttacaagctcagatgtctctgctctcctgaatcttgggcatgcctttctgtaaccaaaaatccctgtaggcgtgctagcaattccagggtggtccgggtttggcagatttgatttttaaaaaacgtattatctttaataaaatgttattatgtcaaccagtgaggctgccctgaacaaaaaaaaacaaaaagaaaaaaaaaaaaaaggaaagaaagaaactgataaaaagaggcattccagcccctatgttattgatggaaaaagaaaaagaagaaaagcaatctcgcagtacatgttacttgtcgaaaaaattccggacaagactacccttgttttatgttttcagtattctgaaaataccagtgtgtggcagttctcgcagatgttacctaaaactgctgaacttgaccggcagaatgttctgccgttttctgctccctcgacacttgattggagggctgtcgacctctcctcccgtgggggcttccccagtgcctatcttctctgatagtcatggagaggttacactaattcattggagatgtaagttgttggttttgttttgttttgtttttagaaaaatatatataaatatataatagatatctatcgctatagaataatgcattaataaaatgaggcttttttagaggaagaccaaaaaattcaatgtcttaaaaatatatttaatggcaatgcaaaagtcttcctgcttccgtgctgaactttagaacagaggattgtattgcaagacaaagttgaatgtaaagtgatctccctgaacatttttaaggttttacttttctgaaattatacatcacagcagtgcataggccatataatgttagctggaaggtcaatttcagtgtatgatatactttattaagatgtataaaacatcctgaagtttttatttagttttgggaataggcatcaatgggtggtatttgctttgtaactccccccaggtacgatagggactgaatatggaccctgctgaaagcagtgtattgacgcatatttaactcgccctctatccgtagagtagtcatgacactatacagatggttcgtgttcatactgcagcttaaaacaagcaaaatacacagatgataatatgctaaattttcctctatcctgtacatttcacaaaaaggcatatgcaatatttacatttttaatttagtttacagaatggaaccaaaatgtataaatgttatgtttgctaaaacttcacaatgtatattgggtctttgtacattttgcctgacttaccttaaatttaaaatattttttgctatataaactttaacagttattaaacagtgttttctttttgggtacgtattgtttctggatatcaagatgttaaatatatttcttgctattgtgatatgacaagagacttaacttatcttgctctgtcttccactgtacacgctgtatataggggtcaatgtgatgctgctggagacgagaataaactggactagaatagtgcattgtatttagtctgtattgatcatggatgccctccttaatagccatatgcaataaaataaagtacattatttatgaaatgaaaaaaaaaaaaaaaaaaaaaaaaaagaaaaaaaaaaaaaaaaaaaaaaaagaaaaaaaaaagaaaaaaaagagagaaagaaaaagaaaagagagaggagggagagaagaaaacagcgaggacagacgaaagaaacacagaaaaaaaaaaggcacaaagaaagggaacaaagaagaaagagacgagaagaaaaaagggagaaggacgaaagcgagaggacagagagagagcacacggagggggaaaaagaaacaacacagaaaacacagggagaaaaagcggaggcggaaaaccacaagagcggaaaagaacgagaggagaaaaa

SEQ ID NO: 433406 - DNA, 5248 bp, Homo sapiens
  misc_feature (258)..(258): n is a, c, g, or t
  misc_feature (260)..(260): n is a, c, g, or t
gcggggaccgcgacgagcccgggtcgccgttggcagcagcagcagcaacaccagcagcagcagcagccccggcggcggcgcggaccccgagcgcccgggcgcaccccggcttcccggagcgcgacgcggcggcagcagccccggtgcggccgcgcgcgccttaggctcggccccgcggctcggggaccccgactcccggcccagcgagcgcgtcccccggcgccgcccgagagcccgaggaggcagcggccgcaggcncnggggaggggggcggccaccgcccgcgccgggcatcctcaggagccccagagcgcggagggcgcggcgccgccgagcggtgctggcccccgcgggctccccggaccttccccaccgcctgggcccgagggacgcgtgatcgggcgggcggccgggcgcaagggtgggagggagccgcccccgcccgcgccccctccgcccctcgccccaacccctgggcgccgggcccgggccgcgcggcctgaagcgcccgcgatggcgagcccgccgcggcacgggccgcccgggccggcgagcggagacggccccaacctcaacaacaacaacaacaacaacaaccacagcgtgcgcaagtgcggctacctgcgcaagcagaagcatggccacaagcgcttcttcgtgctgcgcggacccggcgcgggcggcgacgaggcgacggcgggcggggggtcggcgccgcaaccgccgcggctcgagtactacgagagcgagaaaaagtggcggagcaaggcaggcgcgccgaaacgggtgatcgctctcgactgctgcctgaacatcaacaagcgcgccgacgccaagcacaagtacctgatcgccctctacaccaaggacgagtacttcgccgtggccgccgagaacgagcaggagcaggagggctggtaccgcgcgctcaccgacctggtcagcgagggccgcgcggccgccggagacgcgccccccgccgccgcgcccgccgcgtcctgcagcgcctccctgcccggcgccctgggcggctctgccggcgccgccggggccgaggacagctacgggctggtggctcccgccacggccgcctaccgtgaggtgtggcaggtgaacctgaagcccaagggtctgggccagagcaagaacctgacgggggtgtaccgtctgtgcctgtctgcgcgcaccatcggcttcgtgaagctcaactgcgagcagccgtcggtgacgctgcagctcatgaacatccgccgctgcggccactcggacagcttcttcttcatcgaggtgggccgctcggccgtcacaggccccggcgagctgtggatgcaggcggacgactcggtggtggcgcagaacatccacgagaccatcctggaggccatgaaggcgctcaaggagctcttcgagttccggccgcgcagtaagagccaatcgtcggggtcgtcggccacgcaccccatcagcgtccccggcgcgcgccgccaccaccacctggtcaacctgccccccagccagacgggcctggtgcgccgctcgcgcaccgacagcctggccgccaccccgccggcggccaagtgcagctcgtgccgggtgcgcaccgccagcgagggcgacggcggcgcggcggcgggagcggcggccgcgggcgccaggccggtgtcggtggctgggagccccctgagccccgggccggtgcgcgcgcccctgagccgctcgcacaccctgagcggcggctgcggcggccgcgggagcaaggtggcgctgctgccggcagggggcgcgctgcaacacagccgctccatgtccatgcccgtggcgcactcgccgcccgccgccaccagccccggctccctgtcgtccagcagcggccacggctcgggctcctacccgccgccgcccggcccgcacccgcctctgccgcatccgctgcaccacggccccggccagcggccctccagcggcagcgcctccgcctcgggctcccccagcgaccccggcttcatgtccctggacgagtacggctccagcccaggcgacctgcgcgccttctgcagccaccgaagcaacacgcccgagtccatcgcggagacgcccccggcccgagacggcggcggcggcggtgagttctacgggtacatgaccatggacaggcccctgagccactgtggccgctcctaccgccgggtctcgggggacgcggcccaggacctggaccgagggctgcgcaagaggacctactccctgaccacgccagcccggcagcggccggtgccccagccctcctctgcctcgctggatgaatacaccctgatgcgggccaccttctcgggcagcgcgggccgcctctgcccgtcctgccccgcgtcctctcccaaggtggcctaccacccctacccagaggactacggagacatcgagatcggctcccacaggagctccagcagcaacctgggggcagacgacggctacatgcccatgacgcccggcgcggccctcgcgggcagtgggagcggcagctgcaggagcgacgactacatgcccatgagccccgccagcgtgtccgcccccaagcagatcttgcagcccagggccgccgccgccgccgccgccgccgtgccttctgcggggcctgcggggccagcacccacctctgcggcgggcaggacattcccggcgagcgggggcggctacaaggccagctcgcccgccgagagctcccccgaggacagtgggtacatgcgcatgtggtgcggttccaagctgtccatggagcatgcagatggcaagctgctgcccaacggggactacctcaacgtgtcccccagcgacgcggtcaccacgggcaccccgcccgacttcttctccgcagccctgcaccccggcggggagccgctcaggggcgttcccggctgctgctacagctccttgccccgctcctacaaggccccctacacctgtggcggggacagcgaccagtacgtgctcatgagctcccccgtggggcgcatcctggaggaggagcgtctggagcctcaggccacgccagggcccagccaggcggccagcgccttcggggccggccccacgcagccccctcaccctgtagtgccttcgcccgtgcggcctagcggcggccgcccggagggcttcttgggccagcgcggccgggcggtgaggcccacgcgcctgtccctggaggggctgcccagcctgcccagcatgcacgagtacccactgccaccggagcccaagagccccggcgagtacatcaacatcgactttggcgagcccggggcccgcctgtcgccgcccgcgcctcccctgctggcgtcggcggcctcgtcctcctcgctcttgtccgccagcagcccggcctcgtcgctgggctcaggcaccccgggcaccagcagcgacagccggcagcggtctccgctctccgactacatgaacctcgacttcagctcccccaagtctcctaagccgggcgccccgagcggccaccccgtgggctccttggacggcctcctgtcccccgaggcctcctccccgtatccgccgttgcccccgcgtccgtccgcgtccccgtcgtcgtctctgcagccgccgccaccgccgccggccccgggggagctgtaccgcctgccccccgcctcggccgttgccaccgcccagggcccgggcgccgcctcatcgttgtcctcggacaccggggacaatggtgactacaccgagatggcttttggtgtggccgccaccccgccgcaacctatcgcggcccccccgaagccagaagctgcccgcgtggccagcccgacgtcgggcgtgaagaggctgagcctcatggagcaggtgtcgggagtcgaggccttcctgcaggccagccagcccccggacccccaccgcggcgccaaggtcatccgcgcagacccgcaggggggccgccgccgccacagttccgagaccttctcctccaccacgacggtcacccccgtgtccccgtccttcgcccacaaccccaagcgccacaactcggcctccgtggaaaatgtctctctcaggaaaagcagcgagggcggcgtgggtgtcggccctggagggggcgacgagccgcccacctccccacgacagttgcagccggcgccccctttggcaccgcagggccggccgtggaccccgggtcagcccgggggcttggtcggttgtcctgggagcggtggatcgcccatgcgcagagagacctctgccggcttccagaatggtctcaactacatcgccatcgacgtgagggaggagcccgggctgccaccccagccgcagccgccgccgccgccgcttcctcagccgggagacaagagctcctggggccggacccgaagcctcgggggtctcatcagcgctgtgggcgtcggcagcaccggcggcgggtgcggggggccgggtcccggtgccctgccccctgccaacacctacgccagcattgacttcttgtcccaccacttgaaggaggccaccatcgtgaaagagtgaagatctgtctggctttatcaccaggatgtcacatgtcagagaatatcattaaaagaagacgctcagcactgtttcagcccgaagctgcttgcagttttcttttggatctgagcaatgactgtgtttggaaacatctgtggactctgttagatgaggcaccaacaaggcaaggtcacctgcctctttcccttgttcccggatggggcattcatcattgtgctgtttgcgtttgttttgttttgttttaacaaaattagctgaagaagttattctcaagaaaattggatgttttcattggccttcttaaattgtggccagtgtcttttaatttcttcttcttttccttttggcaaagcagatataaccctcagcatgctaggagagtgcacccgtacctatggaagtggtaaaatctggtatttactggcttacactcaaaacgaccacagtcctacctcagttcaaggtaaagccggatttccgtggcgggggtcccacaggacctcctgtagtagcccctgcgctgtgtgtctggagcgcggtcctcggccttattgaaatggtccaagtagacagctgcttgttggattccagtgcaggtacctgcgatgtttacgtccacaccgagcccagtgtggagagagcatttagcagaaatggtaatgacagtgatataatgcctgtacctgttgtccagtgtggacgagacgggatcctc

SEQ ID NO: 433407 - DNA, 511 bp, Homo sapiens
gctaacatggcatttaactacaaattgtgaagagctgtcaggagctataaaaatcatacttcagtagggacttaagctgaaagaacattcacccttttcctcaatcagtcagtcagtcaatgaaaattgcttttgtatagtgctcttcatgacatgcatcccaaagtgaattacagcaaaagggaaatcatctgctcttttttcatttctgtgtttagactgaaatgatattgctcaacattttgacatactaaccaagacatctttcatacttaagattccattccataatactgagtaggagaaaatgcagtcgcatatttaactgatgttgagattttggcctacaggaaccttagcaagactattacagtcaaaaacacttaagcagatgaaatacagtcatatctcttgtcctcttaaaaagaatagtcagattttctaatgttaataaagacatttccagtgatccttaaataaaaaatatgctctttatgtaacccattagctc

SEQ ID NO: 433408 - DNA, 836 bp, Homo sapiens
ccgcgggcgtctggggcttccgcggcgcccgcctctgctccctcccctcgggcgctgggtgccgaccggccggctggccggcgccgctcctgggaagatggcgctgcacttccagagtttggctgaattggaagtgttatgtactcatctctacatagggactgatcttacacaaagaatagaggctgagaaagcactcttggaacttattgacagtccagaatgtctcagcaagtgtcaacttttattagaacaaggaacaacatcctatgctcagctccttgcagcaacatgtctttcaaaacttgtcagccgagtcagtcctttacctgttgagcagaggatggacatcagaaactacattctgaattacgtggcatcacagcccaagctggctccctttgtcatccaagctcttattcaagtcattgctaaaatcactaagttggggtggtttgaggttcagaaagaccaatttgtcttcagagaaattattgctgatgtgaagaagtttctccagggtactgtggaacactgcataataggagtaataatcctttctgaattgactcaggaaatgaacctggttgattattctagaccttcagcaaaacacaggaaaatagctacctcatttcgtgatacttctctcaaagacgttttagtgctagcatgctctcttttaaaagaggtaagttatttgataattcaacttcctagttagaatatttgggaaattttaagagtttcaaaagaatttcagttgaattttccccccagttttgccttttaaagaattattgtggacagacttaagtatagtaaatttgcataag

SEQ ID NO: 433409 - DNA, 583 bp, Homo sapiens
ccagttttagaagttccaatagcagttttaaattattactaaatcacctgaaaaaaattcccaaagagaaccacacactaccatatcctaacaacttttgcatttcccataattgtagttaatgtcagcccagtaggccagaccaacccccagttcaatactttccttccccaaaagctctatactttgaaggaaaacagatacagtatcaaattatgacactttccttgctattggtttatttttacattttctttttgtttcactggaaaggaaagatgatgctcagttcctagttttagaagtttcaatagcattacaaatattcgacaacaactttataccagaagatgtcaagcgtatgttgatcgggctggcaagagatcttcgagggattgcctttgcactgaacacaaagaccagctacaccatgctgtttgactggatatccttttaagaaaacttgtgaagatagatgctattgaaacttctaaaactaggagttttagaagtttcatagcacctagttttagaagtttcaatagcactcctagttttagaagtttcatagcagaataaattt

SEQ ID NO: 433410 - DNA, 3705 bp, Homo sapiens
ccgcgggcgtctggggcttccgcggcgcccgcctctgctccctcccctcgggcgctgggtgccgaccggccggctggccggcgccgctcctgggaagatggcgctgcacttccagagtttggctgaattggaagtgttatgtactcatctctacatagggactgatcttacacaaagaatagaggctgagaaagcactcttggaacttattgacagtccagaatgtctcagcaagtgtcaacttttattagaacaaggaacaacatcctatgctcagctccttgcagcaacatgtctttcaaaacttgtcagccgagtcagtcctttacctgttgagcagaggatggacatcagaaactacattctgaattacgtggcatcacagcccaagctggctccctttgtcatccaagctcttattcaagtcattgctaaaatcactaagttggggtggtttgaggttcagaaagaccaatttgtcttcagagaaattattgctgatgtgaagaagtttctccagggtactgtggaacactgcataataggagtaataatcctttctgaattgactcaggaaatgaacctggttgattattctagaccttcagcaaaacacaggaaaatagctacctcatttcgtgatacttctctcaaagacgttttagtgctagcatgctctcttttaaaagaggtgtttgccaaacctttaaatcttcaggatcaatgtcagcaaaatctggtaatgcaggtcttgaaactggtccttaactgccttaactttgacttcattggcagttcagcagatgaatctgcagatgatctttgcacggtgcagattccaacaacttggagaacaattttcctggaaccagaaacattggatcttttcttcaatttgtatcattcacttccaccactactatctcagttagcactttcatgtttagttcagtttgcttcgacaagaaggtccttatttaacagtcctgaacgtgccaagtaccttggtaatttaattaagggagtaaaaaggatacttgaaaaccctcagggtttgtctgatccaggtaattatcatgaattttgtcgatttttggctcgtttaaagacaaattatcagctgggagaattagttatggtgaaggaatatcctgaagttattagattgattgctaattttaccattactagcctacagcactgggaatttgctcctaacagtgttcattatttattaactctgtggcaaaggatggtagcatctgttccttttgtgaaatcaactgaaccccacctattagacacttatgcaccagaaatcacgaaggcctttatcacttctcggttggactctgttgccatagttgtgagagatcacttagatgatccactggatgatactgccactgtgtttcagcagttggagcagttgtgcacggtcagcagatgtgaatatgaaaagacatgtgctcttcttgtgcagttattcgaccaaaatgcacagaattaccaaaaacttctgcatccatattctggtgtaactgtggacatcaccattcaggaaggacgtcttgcatggctggtatacttagttgggacagttgtaggaggaagattaacatataccagtacagatgagcatgatgctatggatggagaattatcctgtcgagtttttcagcttatatctttaatggataccggattgcctcgatgttgtaatgagaaaatagagcttgcaattctgtggttcttggatcagtttcgtaaaacatatgttggtgatcaacttcaaagaacctcaaaggtatatgctcgtatgtcagaagtcttaggaataacagatgacaaccacgttctagagacgttcatgacaaaaattgttacaaaccttaaatactggggaagatatgagcctgtaatttcaaggactcttcagttcctaaatgacctttctgttggttatatccttttaaaaaaacttgtgaagatagatgctgtgaaattcatgctaaaaaaccacacgagtgaacacttcccttttcttggcatcagtgacaatcatagtctcagcgacttcaggtgtcgaacaaccttctacacagcgctcactcgccttctgatggtagatctgggtgaagatgaggatgaatttgagaatttcatgctgcctcttacagttgcttttgaaacagtattacaaatattcaacaacaactttaaacaagaagatgtaaagcgtatgttgatcgggctggcaagagatcttcgagggattgcctttgcactgaacacaaagaccagctacaccatgctgtttgactggatgtacccaacgtaccttccccttcttcagaatgctgttgaacggtggtatggagagccaacatgtacaactcccatcttgaaacttatggcagaacttatgcaaaacagatcccagcgtttgaattttgatgtatcatctcctaatggaattcttctcttcagagaagctagtaaaatggtttgcacttatggtaatcagatcctgtcccttgggagcctctcaaaagatcagatttatccaatgaaactcaagggcatctccatctgctattcagctctcaagtctgccttgtgtggaaattatgtcagctttggcgtcttcaagttgtatggggacaaccattttgacaatgtactccaggcttttgtcaaaatgctgctgtcagtgtcccacagtgacttgctacaataccggaaactgagccagtcttattatccactcctggaatgtctcactcaggaccatatgagcttcatcatcaacttagagcctcctgtactcatgtatgttctcacatctatctcagagggactcactactcttgatacagttgtctcctccagctgctgtaccagtttagactacatcgtcacctacctcttcaagcacatagcaaaagagggcaagaagccacttcgatgcagagaggctacccaggctggtcagagactattacattttatgcagcaaaacccagatgtcctgcagcagatgatgtctgtcctcatgaacaccattgtctttgaagactgtcggaaccagtggtcagtatccaggcctctcctggggctcatcctgctcaatgagaagtatttcagtgaactgagagcaagtttgataaacagccagcccctccccaagcaggaggtccttgcccagtgcttcagaaacctaatggaaggagtggagcagaacctgtccgtcaagaacagagacaggttcacccaaaatctgtctgtattcagaagagatgtggcagaggcgttgcgcagtgatggcaacactgaaccatgcagtctcgacatgatgagctgacccgacttttctgaccatgtgcggagcagcctttatcaagagactcctgaaggtctgggtctcaggacagtgatgttggctagcccaggggaatgtatttttcaaaacatacaagcaacagcaaaagccctaacttcttatacgtctagcctaattataagaatttctaacagtaccagtgtaaattcagtcttttctctgaaaagcaaaggatgtgttttcagtctttctatcaaatattatctttgttctcctaatgctctgaaaggatgtagaaacaatatttaaccaaagaacgtaataaaccaggtttgcacctaagtgtgtactagtttatggtt

SEQ ID NO: 433411 - DNA, 1983 bp, Homo sapiens
ccgcgggcgtctggggcttccgcggcgcccgcctctgctccctcccctcgggcgctgggtgccgaccggccggctggccggcgccgctcctgggaagatggcgctgcacttccagagtttggctgaattggaagtgttatgtactcatctctacatagggactgatcttacacaaagaatagaggctgagaaagcactcttggaacttattgacagtccagaatgtctcagcaagtgtcaacttttattagaacaaggaacaacatcctatgctcagctccttgcagcaacatgtctttcaaaacttgtcagccgagtcagtcctttacctgttgagcagaggatggacatcagaaactacattctgaattacgtggcatcacagcccaagctggctccctttgtcatccaagctcttattcaagtcattgctaaaatcactaagttggggtggtttgaggttcagaaagaccaatttgtcttcagagaaattattgctgatgtgaagaagtttctccagggtactgtggaacactgcataataggagtaataatcctttctgaattgactcaggaaatgaacctggttgattattctagaccttcagcaaaacacaggaaaatagctacctcatttcgtgatacttctctcaaagacgttttagtgctagcatgctctcttttaaaagaggtgtttgccaaacctttaaatcttcaggatcaatgtcagcaaaatctggtaatgcaggtcttgaaactggtccttaactgccttaactttgacttcattggcagttcagcagatgaatctgcagatgatctttgcacggtgcagattccaacaacttggagaacaattttcctggaaccagaaacattggatcttttcttcaatttgtatcattcacttccaccactactatctcagttagcactttcatgtttagttcagtttgcttcgacaagaaggtccttatttaacagtcctgaacgtgccaagtaccttggtaatttaattaagggagtaaaaaggatacttgaaaaccctcagggtttgtctgatccaggtaattatcatgaattttgtcgatttttggctcgtttaaagacaaattatcagctgggagaattagttatggtgaaggaatatcctgaagttattagattgattgctaattttaccattactagcctacagcactgggaatttgctcctaacagtgttcattatttattaactctgtggcaaaggatggtagcatctgttccttttgtgaaatcaactgaaccccacctattagacacttatgcaccagaaatcacgaaggcctttatcacttctcggttggactctgttgccatagttgtgagagatcacttagatgatccactggatgatactgccactgtgtttcagcagttggagcagttgtgcacggtcagcagatgtgaatatgaaaagacatgtgctcttcttgtgcagttattcgaccaaaatgcacagaattaccaaaaacttctgcatccatattctggtgtaactgtggacatcaccattcaggaaggacgtcttgcatggctggtatacttagttgggacagttgtaggaggaagattaacatataccagtacagatgagcatgatgctatggatggagaattatcctgtcgagtttttcagcttatatctttaatggataccggattgcctcgatgttgtaatgagaaaatagagcttgcaattctgtggttcttggatcagtttcgtaaaacatatgttggtgatcaacttcaaagaacctcaaagaagacagacatcttcctgtgaagggcttgtggcaaacctatccaactcgggtttcttcttccttgagaacgatctgattcatcatcatctgaaccagggatcacagtctaaggtccaggatgcacctaaactattgatgattaatcaccttattaaatgattccattctgtgtaaa

SEQ ID NO: 433412 - DNA, 1750 bp, Homo sapiens
ccgcgggcgtctggggcttccgcggcgcccgcctctgctccctcccctcgggcgctgggtgccgaccggccggctggccggcgccgctcctgggaagatggcgctgcacttccagagtttggctgaattggaagtgttatgtactcatctctacatagggactgatcttacacaaagaatagaggctgagaaagcactcttggaacttattgacagtccagaatgtctcagcaagtgtcaacttttattagaacaaggaacaacatcctatgctcagctccttgcagcaacatgtctttcaaaacttgtcagccgagtcagtcctttacctgttgagcagaggatggacatcagaaactacattctgaattacgtggcatcacagcccaagctggctccctttgtcatccaagctcttattcaagtcattgctaaaatcactaagttggggtggtttgaggttcagaaagaccaatttgtcttcagagaaattattgctgatgtgaagaagtttctccagggtactgtggaacactgcataataggagtaataatcctttctgaattgactcaggaaatgaacctggttgattattctagaccttcagcaaaacacaggaaaatagctacctcatttcgtgatacttctctcaaagacgttttagtgctagcatgctctcttttaaaagaggtgtttgccaaacctttaaatcttcaggatcaatgtcagcaaaatctggtaatgcaggtcttgaaactggtccttaactgccttaactttgacttcattggcagttcagcagatgaatctgcagatgatctttgcacggtgcagattccaacaacttggagaacaattttcctggaaccagaaacattggatcttttcttcaatttgtatcattcacttccaccactactatctcagttagcactttcatgtttagttcagtttgcttcgacaagaaggtccttatttaacagtcctgaacgtgccaagtaccttggtaatttaattaagggagtaaaaaggatacttgaaaaccctcagggtttgtctgatccaggtaattatcatgaattttgtcgatttttggctcgtttaaagacaaattatcagctgggagaattagttatggtgaaggaatatcctgaagttattagattgattgctaattttaccattactagcctacagcactgggaatttgctcctaacagtgttcattatttattaactctgtggcaaaggatggtagcatctgttccttttgtgaaatcaactgaaccccacctattagacacttatgcaccagaaatcacgaaggcctttatcacttctcggttggactctgttgccatagttgtgagagatcacttagatgatccactggatgatactgccactgtgtttcagcagttggagcagttgtgcacggtcagcagatgtgaatatgaaaagacatgtgctcttcttgtgcagttattcgaccaaaatgcacagaattaccaaaaacttctgcatccatattctggtgtaactgtggacatcaccattcaggaagttttcctctataagattgataggatatacttctctctggaatcaatatgaagaaaaattgataatggcccttgagcagatagtttatgaacataactatcttaactggttgtgttttcttctttgctatacttgattgcaaactcagaacccaatttcagccaataaaaagtatataatatatca

SEQ ID NO: 433413 - DNA, 336 bp, Homo sapiens
atgaaaattgggagacttaagatgctttggggttttactgattttattgtccataggttggcttgtttttaagcctttctttttgtctcataatttagggtttgtctgatccaggtaattatcatgaattttgtcgatttttggctcgtttaaagacaaattatcagctgggagaattagttatggtgaaggaatatcctgaagttattagattgattgctaattttaccattactagcctacaggtaggtaaaaatatgtaattatgttaaactgtagccagttttaaaacagcttcttggtaagggttggtgggggtatttgaaaaatatctat

SEQ ID NO: 433414 - DNA, 3630 bp, Homo sapiens
gtgctgcaggcttgaggaacgaggcacgaggcacttccagagtttggctgaattggaagtgttatgtactcatctctacatagggactgatcttacacaaagaatagaggctgagaaagcactcttggaacttattgacagtccagaatgtctcagcaagtgtcaacttttattagaacaaggaacaacatcctatgctcagctccttgcagcaacatgtctttcaaaacttgtcagccgagtcagtcctttacctgttgagcagaggatggacatcagaaactacattctgaattacgtggcatcacagcccaagctggctccctttgtcatccaagctcttattcaagtcattgctaaaatcactaagttggggtggtttgaggttcagaaagaccaatttgtcttcagagaaattattgctgatgtgaagaagtttctccagggtactgtggaacactgcataataggagtaataatcctttctgaattgactcaggaaatgaacctggttgattattctagaccttcagcaaaacacaggaaaatagctacctcatttcgtgatacttctctcaaagacgttttagtgctagcatgctctcttttaaaagaggtgtttgccaaacctttaaatcttcaggatcaatgtcagcaaaatctggtaatgcaggtcttgaaactggtccttaactgccttaactttgacttcattggcagttcagcagatgaatctgcagatgatctttgcacggtgcagattccaacaacttggagaacaattttcctggaaccagaaacattggatcttttcttcaatttgtatcattcacttccaccactactatctcagttagcactttcatgtttagttcagtttgcttcgacaagaaggtccttatttaacagtcctgaacgtgccaagtaccttggtaatttaattaagggagtaaaaaggatacttgaaaaccctcagggtttgtctgatccaggtaattatcatgaattttgtcgatttttggctcgtttaaagacaaattatcagctgggagaattagttatggtgaaggaatatcctgaagttattagattgattgctaattttaccattactagcctacagcactgggaatttgctcctaacagtgttcattatttattaactctgtggcaaaggatggtagcatctgttccttttgtgaaatcaactgaaccccacctattagacacttatgcaccagaaatcacgaaggcctttatcacttctcggttggactctgttgccatagttgtgagagatcacttagatgatccactggatgatactgccactgtgtttcagcagttggagcagttgtgcacggtcagcagatgtgaatatgaaaagacatgtgctcttcttgtgcagttattcgaccaaaatgcacagaattaccaaaaacttctgcatccatattctggtgtaactgtggacatcaccattcaggaaggacgtcttgcatggctggtatacttagttgggacagttgtaggaggaagattaacatataccagtacagatgagcatgatgctatggatggagaattatcctgtcgagtttttcagcttatatctttaatggataccggattgcctcgatgttgtaatgagaaaatagagcttgcaattctgtggttcttggatcagtttcgtaaaacatatgttggtgatcaacttcaaagaacctcaaaggtatatgctcgtatgtcagaagtcttaggaataacagatgacaaccacgttctagagacgttcatgacaaaaattgttacaaaccttaaatactggggaagatatgagcctgtaatttcaaggactcttcagttcctaaatgacctttctgttggttatatccttttaaaaaaacttgtgaagatagatgctgtgaaattcatgctaaaaaaccacacgagtgaacacttcccttttcttggcatcagtgacaatcatagtctcagcgacttcaggtgtcgaacaaccttctacacagcgctcactcgccttctgatggtagatctgggtgaagatgaggatgaatttgagaatttcatgctgcctcttacagttgcttttgaaacagtattacaaatattcaacaacaactttaaacaagaagatgtaaagcgtatgttgatcgggctggcaagagatcttcgagggattgcctttgcactgaacacaaagaccagctacaccatgctgtttgactggatgtacccaacgtaccttccccttcttcagaatgctgttgaacggtggtatggagagccaacatgtacaactcccatcttgaaacttatggcagaacttatgcaaaacagatcccagcgtttgaattttgatgtatcatctcctaatggaattcttctcttcagagaagctagtaaaatggtttgcacttatggtaatcagatcctgtcccttgggagcctctcaaaagatcagatttatccaatgaaactcaagggcatctccatctgctattcagctctcaagtctgccttgtgtggaaattatgtcagctttggcgtcttcaagttgtatggggacaaccattttgacaatgtactccaggcttttgtcaaaatgctgctgtcagtgtcccacagtgacttgctacaataccggaaactgagccagtcttattatccactcctggaatgtctcactcaggaccatatgagcttcatcatcaacttagagcctcctgtactcatgtatgttctcacatctatctcagagggactcactactcttgatacagttgtctcctccagctgctgtaccagtttagactacatcgtcacctacctcttcaagcacatagcaaaagagggcaagaagccacttcgatgcagagaggctacccaggctggtcagagactattacattttatgcagcaaaacccagatgtcctgcagcagatgatgtctgtcctcatgaacaccattgtctttgaagactgtcggaaccagtggtcagtatccaggcctctcctggggctcatcctgctcaatgagaagtatttcagtgaactgagagcaagtttgataaacagccagcccctccccaagcaggaggtccttgcccagtgcttcagaaacctaatggaaggagtggagcagaacctgtccgtcaagaacagagacaggttcacccaaaatctgtctgtattcagaagagatgtggcagaggcgttgcgcagtgatggcaacactgaaccatgcagtctcgacatgatgagctgacccgacttttctgaccatgtgcggagcagcctttatcaagagactcctgaaggtctgggtctcaggacagtgatgttggctagcccaggggaatgtatttttcaaaacatacaagcaacagcaaaagccctaacttcttatacgtctagcctaattataagaatttctaacagtaccagtgtaaattcagtcttttctctgaaaagcaaaggatgtgttttcagtctttctatcaaatattatctttgttctcctaatgctctgaaaggatgtagaaacaatatttaaccaaagaacgtaataaaccaggtttgcacctaagtgtgtactagtttatggtt

SEQ ID NO: 433415 - DNA, 635 bp, Homo sapiens
gtgctgcaggcttgaggaacgaggcacgaggcacttccagagtttggctgaattggaagtgttatgtactcatctctacatagggactgatcttacacaaagaatagaggctgagaaagcactcttggaacttattgacagtccagaatgtctcagcaagtgtcaacttttattagaacaaggaacaacatcctatgctcagctccttgcagcaacatgtctttcaaaacttgtcagccgagtcagtcctttacctgttgagcagaggatggacatcagaaactacattctgaattacgtggcatcacagcccaagctggctccctttgtcatccaagctcttattcaagtcattgctaaaatcactaagttggggtggtttgaggttcagaaagaccaatttgtcttcagagaaattattgctgatgtgaagaagtttctccagggtactgtggaacactgcataataggagtaataatcctttctgaattgactcaggaaatgaacctggtaagcgagcctttccatctaacaggagcctgagtttgcttaagtaatgctgtttcttttctgcttttatttgtggcaaaatagacagccttcattttgtggcataaaactctgaataatcaaa

SEQ ID NO: 433416 - DNA, 1059 bp, Homo sapiens
ccgcgggcgtctggggcttccgcggcgcccgcctctgctccctcccctcgggcgctgggtgccgaccggccggctggccggcgccgctcctgggaagatggcgctgcacttccagagtttggctgaattggaagtgttatgtactcatctctacatagggactgatcttacacaaagaatagaggctgagaaagcactcttggaacttattgacagtccagaatgtctcagcaagtgtcaacttttattagaacaaggaacaacatcctatgctcagctccttgcagcaacatgtctttcaaaacttgtcagccgagtcagtcctttacctgttgagcagaggatggacatcagaaactacattctgaattacgtggcatcacagcccaagctggctccctttgtcatccaagctcttattcaagtcattgctaaaatcactaagttggggtggtttgaggttcagaaagaccaatttgtcttcagagaaattattgctgatgtgaagaagtttctccagggtactgtggaacactgcataataggagtaataatcctttctgaattgactcaggaaatgaacctggttgattattctagaccttcagcaaaacacaggaaaatagctacctcatttcgtgatacttctctcaaagacgttttagtgctagcatgctctcttttaaaagaggtgtttgccaaacctttaaatcttcaggatcaatgtcagcaaaatctggtaatgcaggtcttgaaactggtccttaactgccttaactttgacttcattggcagttcagcagatgaatctgcagatgatctttgcacggtgcagattccaacaacttggagaacaagtaagaaaaaactttggtatgaagggtcatcaacataaaggcacagtattaagcaatatagtttctgtatgtatagttatctttttgccaggaattaaaaaaatagctcaaatggatttgtaacctgaagtagctgctgatagctaatattgaaatgttttctgtaattcatattatagtaacttctatattttgatttagg

SEQ ID NO: 433417 - DNA, 3097 bp, Homo sapiens
aggcagggaaagaccagcagagaggaaagagaaactgggagagggaggaagggagaaagtgagaagggaaatcggaaagagaaaagggaggaaacggcagagccagagagaaagaggaagagactgagtgtgaaggagagaggacacaggggatgactgagagacagagagagagagagagagagaatgagacagagacttaaggaagagaccctgtgagtctgacaataaaagatttggacagaaacagaaagattggagagagagagagagggagagaatgagtgagagagagactggaagagacagagatcagagggagacacagaaagtgagagtggggagagaggtagtgtaaaaggaagagagagagagagagaccgtaagagacaggagacaaagagacaaaaagtgtgagtgagcaggtgaggagagagattgagaactatgagagacagcagctaagagacaaaggaggcgggagactgcctaggtgccgcagcacccacaccgtcctcttgcccccccgtcactgggaccccagagctggcccttgatggaggggagccgacctcgcagcagcctgagcctggccagcagcgcctccaccatctcctcgctcagcagcctgagccccaagaagcccacccgggcagtaaacaagatccacgcctttgggaagagaggcaatgcgctcaggagggatcccaaccttcccgtgcacatccgaggctggcttcataagcaggacagctcggggctccgtctctggaaacgccgctggttcgtcctctccggccattgcctcttttattacaaggacagccgcgaggagagtgtcctaggcagcgtcctgctccccagctacaatattagaccagatgggccgggagccccccgagggcggcgcttcaccttcaccgcagagcacccgggcatgaggacctacgttttggccgctgacaccttagaagacctgcggggctggctacgggcgctgggccgggcctcccgtgcggagggggacgactatgggcaacccaggtcacctgcacgaccccagcccggggagggccccggcggccccggtggtcccccggaggtgagcagaggggaagaggggcgcatctcagaatcaccggaagtgactcgactctccagaggtcgtggtagacccaggctgctcactcccagccccacaaccgacctccactctggactccagatgcggagggcgaggagccccgacctgttcacccccctctctcgccctccctcgcctctgagcctcccccgtccccgttctgcccctgcgcggcgaccccctgccccctcaggagacacagcaccccctgcccgacctcacaccccgttgagtcgcattgatgtccgacctcctctggattggggcccccaacgccagaccctctcccgaccccctactccccgccgaggacctccctctgaggctgggggaggaaagccccccaggagtccccagcactggagtcaggagcccagaacacaggcacactctggctcccccacttatctccagctccccccgcggccccctgggacccgggcctccatggttttattgccgggtcctcccctggagtcaactttccaccaaagcttggagacagatacgctgctgaccaagttgtgcgggcaggaccggcttctgcggaggctgcaggaggagatagaccagaagcaggaggagaaggagcaactagaagcagctctggagttgacccggcaacagctgggccaagccaccagggaggctggggctcccgggagggcctggggtcgccagcgcctcttgcaggaccggctggtcagtgtgagggccaccctctgtcacttgactcaggagcgagagagggtttgggacacgtacagtggcctggagcaggagctgggcaccttaagagagacgctggagtacctgctgcaccttggttctccccaggacagagtgtctgctcagcagcagctgtggatggtggaagacacgctggcaggtctgggtggcccccagaaaccgcccccacacactgagcctgactccccatctcccgtgctccagggcgaggagtcctcagagagggagagcctgccagagtccttggaactgagctcccctaggtcccccgagactgactgggggcggcctcctggaggcgacaaagacctcgccagccctcacttaggtcttgggtctccgagggtctcccgggcttccagccctgagggtcgccacctcccttccccacagctaggaaccaaggccccggtggcccggccccggatgagtgcccaggagcagctggagcggatgcgcagaaaccaggaatgtggacggcccttccctcgcccgacctccccccggcttctcaccctgggaaggacactgtccccagccagacgccagcctgacgtggagcaaaggcctgtcgtaggacactcgggagcccagaaatggctcagaagctctgggtcctggagtagtccaaggaacaccaccccttacttgccgacttccgaaggtcaccgggagcgggttctcagcctctcccaagccctggctactgaggcgtcgcagtggcacagaatgatgacaggtggaaatttggactcccagggagaccctcttcccggtgtgccgctgcctccttcggaccccacgcgccaggagacccctccccccagatctcccccggtggctaattcgggttccacggggttctctcgccgagggagtgggcgtggaggaggtcccaccccctgggggcccgcgtgggatgccgggatcgcccctccggtcctgccacaagacgagggggcatggcctctgcgagtcactctgctacaatccagcttctaatccgcccaaaagcggcagccaatcggagcgcgaggacgtggtctggaggtaccgccggagatctgggaccactcagggcatcagggggcgtggtctggtccccattgcgggcccgggaggggaatggtttctatggccaaagtttggttttctcaacactgtctaaatttggattaaaactttgaacttttaaaaatagct

SEQ ID NO: 433418 - DNA, 574 bp, Homo sapiens
gggcggggagagggccgacaactgagtctcaaagaggactggactggcgtatccagactcctggatctgagggaggaggggctgggggcctggactcctgggtctgagggaggaggggctgggggcctggactcctgggtctgatggaggaggggctgggaatccggagtcctgggtctgagggaggaggggctgggaatccggggtcctagcgctgaggtttgccattctcatgtcccactcatcctctccaggtggaaatttggactcccagggagaccctcttcccggtgtgccgctgcctcctccggtcctgccacaagacgagggggcatggcctctgcgagtcactctgctacaatccagcttctaatccgcccaaaagcggcagccaatcggagcgcgaggacgtggtctggaggtaccgccggagatctgggaccactcagggcatcagggggcgtggtctggtccccattgcgggcccgggaggggaatggtttctatggccaaagtttggttttctcaacactgtctaaatttggattaaaactttgaacttttaaaaatagct

SEQ ID NO: 433419 - DNA, 655 bp, Homo sapiens
aaacaatctagttacaccctttaatttatttaaaaatgtacaattaaattattattgactatagtcattctgttgtgctatctaatagtaggtcttattcatccttttctttttgtaccaattaaccatcccccacctctcccccatgtacacacccccacccccaatcttctttttttttctagtccaaggaacaccaccccttacttgccgacttccgaaggtcaccgggagcgggttctcagcctctcccaagccctggctactgaggcgtcgcagtggcacagaatgatgacaggtggaaatttggactcccagggagaccctcttcccggtgtgccgctgcctccttcggaccccacgcgccaggagacccctccccccagatctcccccggtggctaattcgggttccacggggttctctcgccgagggagtgggcgtggaggaggtcccaccccctgggggcccgcgtgggatgccgggatcgcccctccggtcctgccacaagacgagggggcatgggctttggcgggacatctgttcccagcttttaatgcgccccgggagccaattcgggcgctaggacctgtcttgaaggtcccccccgagattttggaccacctgcgattgggggcgtgttctggtccccctt

SEQ ID NO: 433420 - DNA, 2876 bp, Homo sapiens
aggcagggaaagaccagcagagaggaaagagaaactgggagagggaggaagggagaaagtgagaagggaaatcggaaagagaaaagggaggaaacggcagagccagagagaaagaggaagagactgagtgtgaaggagagaggacacaggggatgactgagagacagagagagagagagagagagaatgagacagagacttaaggaagagaccctgtgagtctgacaataaaagatttggacagaaacagaaagattggagagagagagagagggagagaatgagtgagagagagactggaagagacagagatcagagggagacacagaaagtgagagtggggagagaggtagtgtaaaaggaagagagagagagagagaccgtaagagacaggagacaaagagacaaaaagtgtgagtgagcaggtgaggagagagattgagaactatgagagacagcagctaagagacaaaggaggcgggagactgcctaggtgccgcagcacccacaccgtcctcttgcccccccgtcactgggaccccagagctggcccttgatggaggggagccgacctcgcagcagcctgagcctggccagcagcgcctccaccatctcctcgctcagcagcctgagccccaagaagcccacccgggcagtaaacaagatccacgcctttgggaagagaggcaatgcgctcaggagggatcccaaccttcccgtgcacatccgaggctggcttcataagcaggacagctcggggctccgtctctggaaacgccgctggttcgtcctctccggccattgcctcttttattacaaggacagccgcgaggagagtgtcctaggcagcgtcctgctccccagctacaatattagaccagatgggccgggagccccccgagggcggcgcttcaccttcaccgcagagcacccgggcatgaggacctacgttttggccgctgacaccttagaagacctgcggggctggctacgggcgctgggccgggcctcccgtgcggagggggacgactatgggcaacccaggtcacctgcacgaccccagcccggggagggccccggcggccccggtggtcccccggaggtgagcagaggggaagaggggcgcatctcagaatcaccggaagtgactcgactctccagaggtcgtggtagacccaggctgctcactcccagccccacaaccgacctccactctggactccagatgcggagggcgaggagccccgacctgttcacccccctctctcgccctccctcgcctctgagcctcccccgtccccgttctgcccctgcgcggcgaccccctgccccctcaggagacacagcaccccctgcccgacctcacaccccgttgagtcgcattgatgtccgacctcctctggattggggcccccaacgccagaccctctcccgaccccctactccccgccgaggacctccctctgaggctgggggaggaaagccccccaggagtccccagcactggagtcaggagcccagaacacaggcacactctggctcccccacttatctccagctccccccgcggccccctgggacccgggcctccatggttttattgccgggtcctcccctggagtcaactttccaccaaagcttggagacagatacgctgctgaccaagttgtgcgggcaggaccggcttctgcggaggctgcaggaggagatagaccagaagcaggaggagaaggagcaactagaagcagctctggagttgacccggcaacagctgggccaagccaccagggaggctggggctcccgggagggcctggggtcgccagcgcctcttgcaggaccggctggtcagtgtgagggccaccctctgtcacttgactcaggagcgagagagggtttgggacacgtacagtggcctggagcaggagctgggcaccttaagagagacgctggagtacctgctgcaccttggttctccccaggacagagtgtctgctcagcagcagctgtggatggtggaagacacgctggcaggtctgggtggcccccagaaaccgcccccacacactgagcctgactccccatctcccgtgctccagggcgaggagtcctcagagagggagagcctgccagagtccttggaactgagctcccctaggtcccccgagactgactgggggcggcctcctggaggcgacaaagacctcgccagccctcacttaggtcttgggtctccgagggtctcccgggcttccagccctgagggtcgccacctcccttccccacagctaggaaccaagtccaaggaacaccaccccttacttgccgacttccgaaggtcaccgggagcgggttctcagcctctcccaagccctggctactgaggcgtcgcagtggcacagaatgatgacaggtggaaatttggactcccagggagaccctcttcccggtgtgccgctgcctccttcggaccccacgcgccaggagacccctccccccagatctcccccggtggctaattcgggttccacggggttctctcgccgagggagtgggcgtggaggaggtcccaccccctgggggcccgcgtgggatgccgggatcgcccctccggtcctgccacaagacgagggggcatggcctctgcgagtcactctgctacaatccagcttctaatccgcccaaaagcggcagccaatcggagcgcgaggacgtggtctggaggtaccgccggagatctgggaccactcagggcatcagggggcgtggtctggtccccattgcgggcccgggaggggaatggtttctatggccaaagtttggttttctcaacactgtctaaatttggattaaaactttgaacttttaaaaatagct

SEQ ID NO: 433421 - DNA, 2965 bp, Homo sapiens
aggcagggaaagaccagcagagaggaaagagaaactgggagagggaggaagggagaaagtgagaagggaaatcggaaagagaaaagggaggaaacggcagagccagagagaaagaggaagagactgagtgtgaaggagagaggacacaggggatgactgagagacagagagagagagagagagagaatgagacagagacttaaggaagagaccctgtgagtctgacaataaaagatttggacagaaacagaaagattggagagagagagagagggagagaatgagtgagagagagactggaagagacagagatcagagggagacacagaaagtgagagtggggagagaggtagtgtaaaaggaagagagagagagagagaccgtaagagacaggagacaaagagacaaaaagtgtgagtgagcaggtgaggagagagattgagaactatgagagacagcagctaagagacaaaggaggcgggagactgcctaggtgccgcagcacccacaccgtcctcttgcccccccgtcactgggaccccagagctggcccttgatggaggggagccgacctcgcagcagcctgagcctggccagcagcgcctccaccatctcctcgctcagcagcctgagccccaagaagcccacccgggcagtaaacaagatccacgcctttgggaagagaggcaatgcgctcaggagggatcccaaccttcccgtgcacatccgaggctggcttcataagcagacagccgcgaggagagtgtcctaggcagcgtcctgctccccagctacaatattagaccagatgggccgggagccccccgagggcggcgcttcaccttcaccgcagagcacccgggcatgaggacctacgttttggccgctgacaccttagaagacctgcggggctggctacgggcgctgggccgggcctcccgtgcggagggggacgactatgggcaacccaggtcacctgcacgaccccagcccggggagggccccggcggccccggtggtcccccggaggtgagcagaggggaagaggggcgcatctcagaatcaccggaagtgactcgactctccagaggtcgtggtagacccaggctgctcactcccagccccacaaccgacctccactctggactccagatgcggagggcgaggagccccgacctgttcacccccctctctcgccctccctcgcctctgagcctcccccgtccccgttctgcccctgcgcggcgaccccctgccccctcaggagacacagcaccccctgcccgacctcacaccccgttgagtcgcattgatgtccgacctcctctggattggggcccccaacgccagaccctctcccgaccccctactccccgccgaggacctccctctgaggctgggggaggaaagccccccaggagtccccagcactggagtcaggagcccagaacacaggcacactctggctcccccacttatctccagctccccccgcggccccctgggacccgggcctccatggttttattgccgggtcctcccctggagtcaactttccaccaaagcttggagacagatacgctgctgaccaagttgtgcgggcaggaccggcttctgcggaggctgcaggaggagatagaccagaagcaggaggagaaggagcaactagaagcagctctggagttgacccggcaacagctgggccaagccaccagggaggctggggctcccgggagggcctggggtcgccagcgcctcttgcaggaccggctggtcagtgtgagggccaccctctgtcacttgactcaggagcgagagagggtttgggacacgtacagtggcctggagcaggagctgggcaccttaagagagacgctggagtacctgctgcaccttggttctccccaggacagagtgtctgctcagcagcagctgtggatggtggaagacacgctggcaggtctgggtggcccccagaaaccgcccccacacactgagcctgactccccatctcccgtgctccagggcgaggagtcctcagagagggagagcctgccagagtccttggaactgagctcccctaggtcccccgagactgactgggggcggcctcctggaggcgacaaagacctcgccagccctcacttaggtcttgggtctccgagggtctcccgggcttccagccctgagggtcgccacctcccttccccacagctaggaaccaaggccccggtggcccggccccggatgagtgcccaggagcagctggagcggatgcgcagaaaccaggaatgtggacggcccttccctcgcccgacctccccccggcttctcaccctgggaaggacactgtccccagccagacgccagcctgacgtggagcaaaggtccaaggaacaccaccccttacttgccgacttccgaaggtcaccgggagcgggttctcagcctctcccaagccctggctactgaggcgtcgcagtggcacagaatgatgacaggtggaaatttggactcccagggagaccctcttcccggtgtgccgctgcctccttcggaccccacgcgccaggagacccctccccccagatctcccccggtggctaattcgggttccacggggttctctcgccgagggagtgggcgtggaggaggtcccaccccctgggggcccgcgtgggatgccgggatcgcccctccggtcctgccacaagacgagggggcatggcctctgcgagtcactctgctacaatccagcttctaatccgcccaaaagcggcagccaatcggagcgcgaggacgtggtctggaggtaccgccggagatctgggaccactcagggcatcagggggcgtggtctggtccccattgcgggcccgggaggggaatggtttctatggccaaagtttggttttctcaacactgtctaaatttggattaaaactttgaacttttaaaaatagct

SEQ ID NO: 433422 - DNA, 2864 bp, Homo sapiens
aggcagggaaagaccagcagagaggaaagagaaactgggagagggaggaagggagaaagtgagaagggaaatcggaaagagaaaagggaggaaacggcagagccagagagaaagaggaagagactgagtgtgaaggagagaggacacaggggatgactgagagacagagagagagagagagagagaatgagacagagacttaaggaagagaccctgtgagtctgacaataaaagatttggacagaaacagaaagattggagagagagagagagggagagaatgagtgagagagagactggaagagacagagatcagagggagacacagaaagtgagagtggggagagaggtagtgtaaaaggaagagagagagagagagaccgtaagagacaggagacaaagagacaaaaagtgtgagtgagcaggtgaggagagagattgagaactatgagagacagcagctaagagacaaaggaggcgggagactgcctaggtgccgcagcacccacaccgtcctcttgcccccccgtcactgggaccccagagctggcccttgatggaggggagccgacctcgcagcagcctgagcctggccagcagcgcctccaccatctcctcgctcagcagcctgagccccaagaagcccacccgggcagtaaacaagatccacgcctttgggaagagaggcaatgcgctcaggagggatcccaaccttcccgtgcacatccgaggctggcttcataagcaggcagagcacccgggcatgaggacctacgttttggccgctgacaccttagaagacctgcggggctggctacgggcgctgggccgggcctcccgtgcggagggggacgactatgggcaacccaggtcacctgcacgaccccagcccggggagggccccggcggccccggtggtcccccggaggtgagcagaggggaagaggggcgcatctcagaatcaccggaagtgactcgactctccagaggtcgtggtagacccaggctgctcactcccagccccacaaccgacctccactctggactccagatgcggagggcgaggagccccgacctgttcacccccctctctcgccctccctcgcctctgagcctcccccgtccccgttctgcccctgcgcggcgaccccctgccccctcaggagacacagcaccccctgcccgacctcacaccccgttgagtcgcattgatgtccgacctcctctggattggggcccccaacgccagaccctctcccgaccccctactccccgccgaggacctccctctgaggctgggggaggaaagccccccaggagtccccagcactggagtcaggagcccagaacacaggcacactctggctcccccacttatctccagctccccccgcggccccctgggacccgggcctccatggttttattgccgggtcctcccctggagtcaactttccaccaaagcttggagacagatacgctgctgaccaagttgtgcgggcaggaccggcttctgcggaggctgcaggaggagatagaccagaagcaggaggagaaggagcaactagaagcagctctggagttgacccggcaacagctgggccaagccaccagggaggctggggctcccgggagggcctggggtcgccagcgcctcttgcaggaccggctggtcagtgtgagggccaccctctgtcacttgactcaggagcgagagagggtttgggacacgtacagtggcctggagcaggagctgggcaccttaagagagacgctggagtacctgctgcaccttggttctccccaggacagagtgtctgctcagcagcagctgtggatggtggaagacacgctggcaggtctgggtggcccccagaaaccgcccccacacactgagcctgactccccatctcccgtgctccagggcgaggagtcctcagagagggagagcctgccagagtccttggaactgagctcccctaggtcccccgagactgactgggggcggcctcctggaggcgacaaagacctcgccagccctcacttaggtcttgggtctccgagggtctcccgggcttccagccctgagggtcgccacctcccttccccacagctaggaaccaaggccccggtggcccggccccggatgagtgcccaggagcagctggagcggatgcgcagaaaccaggaatgtggacggcccttccctcgcccgacctccccccggcttctcaccctgggaaggacactgtccccagccagacgccagcctgacgtggagcaaaggtccaaggaacaccaccccttacttgccgacttccgaaggtcaccgggagcgggttctcagcctctcccaagccctggctactgaggcgtcgcagtggcacagaatgatgacaggtggaaatttggactcccagggagaccctcttcccggtgtgccgctgcctccttcggaccccacgcgccaggagacccctccccccagatctcccccggtggctaattcgggttccacggggttctctcgccgagggagtgggcgtggaggaggtcccaccccctgggggcccgcgtgggatgccgggatcgcccctccggtcctgccacaagacgagggggcatggcctctgcgagtcactctgctacaatccagcttctaatccgcccaaaagcggcagccaatcggagcgcgaggacgtggtctggaggtaccgccggagatctgggaccactcagggcatcagggggcgtggtctggtccccattgcgggcccgggaggggaatggtttctatggccaaagtttggttttctcaacactgtctaaatttggattaaaactttgaacttttaaaaatagct

SEQ ID NO: 433423 - DNA, 1407 bp, Homo sapiens
gccaaagcttggagacagatacgctgctgaccaagttgtgcgggcaggaccggcttctgcggaggctgcaggaggagatagaccagaagcaggaggagaaggagcaactagaagcagctctggagttgacccggcaacagctgggccaagccaccagggaggctggggctcccgggagggcctggggtcgccagcgcctcttgcaggaccggctggtcagtgtgagggccaccctctgtcacttgactcaggagcgagagagggtttgggacacgtacagtggcctggagcaggagctgggcaccttaagagagacgctggagtacctgctgcaccttggttctccccaggacagagtgtctgctcagcagcagctgtggatggtggaagacacgctggcaggtctgggtggcccccagaaaccgcccccacacactgagcctgactccccatctcccgtgctccagggcgaggagtcctcagagagggagagcctgccagagtccttggaactgagctcccctaggtcccccgagactgactgggggcggcctcctggaggcgacaaagacctcgccagccctcacttaggtcttgggtctccgagggtctcccgggcttccagccctgagggtcgccacctcccttccccacagctaggaaccaaggccccggtggcccggccccggatgagtgcccaggagcagctggagcggatgcgcagaaaccaggaatgtggacggcccttccctcgcccgacctccccccggcttctcaccctgggaaggacactgtccccagccagacgccagcctgacgtggagcaaaggtccaaggaacaccaccccttacttgccgacttccgaaggtcaccgggagcgggttctcagcctctcccaagccctggctactgaggcgtcgcagtggcacagaatgatgacaggtggaaatttggactcccagggagaccctcttcccggtgtgccgctgcctccttcggaccccacgcgccaggagacccctccccccagatctcccccggtggctaattcgggttccacggggttctctcgccgagggagtgggcgtggaggaggtcccaccccctgggggcccgcgtgggatgccgggatcgcccctccggtcctgccacaagacgagggggcatggcctctgcgagtcactctgctacaatccagcttctaatccgcccaaaagcggcagccaatcggagcgcgaggacgtggtctggaggtaccgccggagatctgggaccactcagggcatcagggggcgtggtctggtccccattgcgggcccgggaggggaatggtttctatggccaaagtttggttttctcaacactgtctaaatttggattaaaactttgaacttttaaaaatagct

SEQ ID NO: 433424 - DNA, 1081 bp, Homo sapiens
aggcagggaaagaccagcagagaggaaagagaaactgggagagggaggaagggagaaagtgagaagggaaatcggaaagagaaaagggaggaaacggcagagccagagcctgccagagtccttggaactgagctcccctaggtcccccgagactgactgggggcggcctcctggaggcgacaaagacctcgccagccctcacttaggtcttgggtctccgagggtctcccgggcttccagccctgagggtcgccacctcccttccccacagctaggaaccaaggccccggtggcccggccccggatgagtgcccaggagcagctggagcggatgcgcagaaaccaggaatgtggacggcccttccctcgcccgacctccccccggcttctcaccctgggaaggacactgtccccagccagacgccagcctgacgtggagcaaaggcctgtcgtaggacactcgggagcccagaaatggctcagaagctctgggtcctggagtagtccaaggaacaccaccccttacttgccgacttccgaaggtcaccgggagcgggttctcagcctctcccaagccctggctactgaggcgtcgcagtggcacagaatgatgacaggtggaaatttggactcccagggagaccctcttcccggtgtgccgctgcctccttcggaccccacgcgccaggagacccctccccccagatctcccccggtggctaattcgggttccacggggttctctcgccgagggagtgggcgtggaggaggtcccaccccctgggggcccgcgtgggatgccgggatcgcccctccggtcctgccacaagacgagggggcatggcctctgcgagtcactctgctacaatccagcttctaatccgcccaaaagcggcagccaatcggagcgcgaggacgtggtctggaggtaccgccggagatctgggaccactcagggcatcagggggcgtggtctggtccccattgcgggcccgggaggggaatggtttctatggccaaagtttggttttctcaacactgtctaaatttggattaaaactttgaacttttaaaaatagct

SEQ ID NO: 433425 - DNA, 2910 bp, Homo sapiens
aggcagggaaagaccagcagagaggaaagagaaactgggagagggaggaagggagaaagtgagaagggaaatcggaaagagaaaagggaggaaacggcagagccagagagaaagaggaagagactgagtgtgaaggagagaggacacaggggatgactgagagacagagagagagagagagagagaatgagacagagacttaaggaagagaccctgtgagtctgacaataaaagatttggacagaaacagaaagattggagagagagagagagggagagaatgagtgagagagagactggaagagacagagatcagagggagacacagaaagtgagagtggggagagaggtagtgtaaaaggaagagagagagagagagaccgtaagagacaggagacaaagagacaaaaagtgtgagtgagcaggtgaggagagagattgagaactatgagagacagcagctaagagacaaaggaggcgggagactgcctaggtgccgcagcacccacaccgtcctcttgcccccccgtcactgggaccccagagctggcccttgatggaggggagccgacctcgcagcagcctgagcctggccagcagcgcctccaccatctcctcgctcagcagcctgagccccaagaagcccacccgggcagtaaacaagatccacgcctttgggaagagaggcaatgcgctcaggagggatcccaaccttcccgtgcacatccgaggctggcttcataagcaggacagctcggggctccgtctctggaaacgccgctggttcgtcctctccggccattgcctcttttattacaaggacagccgcgaggagagtgtcctaggcagcgtcctgctccccagctacaatattagaccagatgggccgggagccccccgagggcggcgcttcaccttcaccgcagagcacccgggcatgaggacctacgttttggccgctgacaccttagaagacctgcggggctggctacgggcgctgggccgggcctcccgtgcggagggggacgactatgggcaacccaggtcacctgcacgaccccagcccggggagggccccggcggccccggtggtcccccggaggtgagcagaggggaagaggggcgcatctcagaatcaccggaagtgactcgactctccagaggtcgtggtagacccaggctgctcactcccagccccacaaccgacctccactctggactccagatgcggagggcgaggagccccgacctgttcacccccctctctcgccctccctcgcctctgagcctcccccgtccccgttctgcccctgcgcggcgaccccctgccccctcaggagacacagcaccccctgcccgacctcacaccccgttgagtcgcattgatgtccgacctcctctggattggggcccccaacgccagaccctctcccgaccccctactccccgccgaggacctccctctgaggctgggggaggaaagccccccaggagtccccagcactggagtcaggagcccagaacacaggcacactctggctcccccacttatctccagctccccccgcggccccctgggacccgggcctccatggttttattgccgggtcctcccctggagtcaactttccaccaaagcttggagacagatacgctgctgaccaagttgtgcgggcaggaccggcttctgcggaggctgcaggaggagatagaccagaagcaggaggagaaggagcaactagaagcagctctggagttgacccggcaacagctgggccaagccaccagggaggctggggctcccgggagggcctggggtcgccagcgcctcttgcaggaccggctggtcagtgtgagggccaccctctgtcacttgactcaggagcgagagagggtttgggacacgtacagtggcctggagcaggagctgggcaccttaagagagacgctggagtacctgctgcaccttggttctccccaggacagagtgtctgctcagcagcagctgtggatggtggaagacacgctggcaggtctgggtggcccccagaaaccgcccccacacactgagcctgactccccatctcccgtgctccagggcgaggagtcctcagagagggagagcctgccagagtccttggaactgagctcccctaggtcccccgagactgactgggggcggcctcctggaggcgacaaagacctcgccagccctcacttaggtgagcatcctggttgggtgggactttacggaaattcccgtcctcaccaagtcccgttctgtctttccaggtcttgggtctccgagggtctcccgggcttccagccctgagggtcgccacctcccttccccacagctaggaaccaaggtaagctgtaggtccatcctgtaatccttgcatctgaccatcagggacccccacacttctgggaaacagctaggagtagagcgttctaaggccatactcagagcagagagagcactgcttgttaagagcattgagattgatttttgtctctgtcgcttctaagctgtgtgactttgggtcagttattaaacctctctgtgccttcattttttcttctctaaaatggggctaatagcagaacctaccacctagagctgacatcaagatgaaaactagatgaatgaggccaggcgcggtggctcacgcctgtaatcccagcactttgtcaggagttccagaccagcctggctaacatggtgaaaccccgtctctactaaaagtacaaaaattagccaggcgtggtggtgggcgcctgtaatcccagccactcgggaggctgaggcaggagaatcgcttgaactcgggaggcagaggttgcagtgagctgagatcacaccattgcactccagcttgtgcgacaagagcaaaaatctgtctcaaa

SEQ ID NO: 433426 - DNA, 2840 bp, Homo sapiens
aggcagggaaagaccagcagagaggaaagagaaactgggagagggaggaagggagaaagtgagaagggaaatcggaaagagaaaagggaggaaacggcagagccagagagaaagaggaagagactgagtgtgaaggagagaggacacaggggatgactgagagacagagagagagagagagagagaatgagacagagacttaaggaagagaccctgtgagtctgacaataaaagatttggacagaaacagaaagattggagagagagagagagggagagaatgagtgagagagagactggaagagacagagatcagagggagacacagaaagtgagagtggggagagaggtagtgtaaaaggaagagagagagagagagaccgtaagagacaggagacaaagagacaaaaagtgtgagtgagcaggtgaggagagagattgagaactatgagagacagcagctaagagacaaaggaggcgggagactgcctaggtgccgcagcacccacaccgtcctcttgcccccccgtcactgggaccccagagctggcccttgatggaggggagccgacctcgcagcagcctgagcctggccagcagcgcctccaccatctcctcgctcagcagcctgagccccaagaagcccacccgggcagtaaacaagatccacgcctttgggaagagaggcaatgcgctcaggagggatcccaaccttcccgtgcacatccgaggctggcttcataagcaggacagctcggggctccgtctctggaaacgccgctggttcgtcctctccggccattgcctcttttattacaaggacagccgcgaggagagtgtcctaggcagcgtcctgctccccagctacaatattagaccagatgggccgggagccccccgagggcggcgcttcaccttcaccgcagagcacccgggcatgaggacctacgttttggccgctgacaccttagaagacctgcggggctggctacgggcgctgggccgggcctcccgtgcggagggggacgactatgggcaacccaggtcacctgcacgaccccagcccggggagggccccggcggccccggtggtcccccggaggtgagcagaggggaagaggggcgcatctcagaatcaccggaagtgactcgactctccagaggtcgtggtagacccaggctgctcactcccagccccacaaccgacctccactctggactccagatgcggagggcgaggagccccgacctgttcacccccctctctcgccctccctcgcctctgagcctcccccgtccccgttctgcccctgcgcggcgaccccctgccccctcaggagacacagcaccccctgcccgacctcacaccccgttgagtcgcattgatgtccgacctcctctggattggggcccccaacgccagaccctctcccgaccccctactccccgccgaggacctccctctgaggctgggggaggaaagccccccaggagtccccagcactggagtcaggagcccagaacacaggcacactctggctcccccacttatctccagctccccccgcggccccctgggacccgggcctccatggttttattgccgggtcctcccctggagtcaactttccaccaaagcttggagacagatacgctgctgaccaagttgtgcgggcaggaccggcttctgcggaggctgcaggaggagatagaccagaagcaggaggagaaggagcaactagaagcagctctggagttgacccggcaacagctgggccaagccaccagggaggctggggctcccgggagggcctggggtcgccagcgcctcttgcaggaccggctggtcagtgtgagggccaccctctgtcacttgactcaggagcgagagagggtttgggacacgtacagtggcctggagcaggagctgggcaccttaagagagacgctggagtacctgctgcaccttggttctccccaggacagagtgtctgctcagcagcagctgtggatggtggaagacacgctggcaggtctgggtggcccccagaaaccgcccccacacactgagcctgactccccatctcccgtgctccagggcgaggagtcctcagagagggagagcctgccagagtccttggaactgagctcccctaggtcccccgagactgactgggggcggcctcctggaggcgacaaagacctcgccagccctcacttaggtcttgggtctccgagggtctcccgggcttccagccctgagggtcgccacctcccttccccacagctaggaaccaaggtaagctgtaggtccatcctgtaatccttgcatctgaccatcagggacccccacacttctgggaaacagctaggagtagagcgttctaaggccatactcagagcagagagagcactgcttgttaagagcattgagattgatttttgtctctgtcgcttctaagctgtgtgactttgggtcagttattaaacctctctgtgccttcattttttcttctctaaaatggggctaatagcagaacctaccacctagagctgacatcaagatgaaaactagatgaatgaggccaggcgcggtggctcacgcctgtaatcccagcactttgtcaggagttccagaccagcctggctaacatggtgaaaccccgtctctactaaaagtacaaaaattagccaggcgtggtggtgggcgcctgtaatcccagccactcgggaggctgaggcaggagaatcgcttgaactcgggaggcagaggttgcagtgagctgagatcacaccattgcactccagcttgtgcgacaagagcaaaaatctgtctcaaa

SEQ ID NO: 433427 - DNA, 1512 bp, Homo sapiens
aggcagggaaagaccagcagagaggaaagagaaactgggagagggaggaagggagaaagtgagaagggaaatcggaaagagaaaagggaggaaacggcagagccagagagaaagaggaagagactgagtgtgaaggagagaggacacaggggatgactgagagacagagagagagagagagagagaatgagacagagacttaaggaagagaccctgtgagtctgacaataaaagatttggacagaaacagaaagattggagagagagagagagggagagaatgagtgagagagagactggaagagacagagatcagagggagacacagaaagtgagagtggggagagaggtagtgtaaaaggaagagagagagagagagaccgtaagagacaggagacaaagagacaaaaagtgtgagtgagcaggtgaggagagagattgagaactatgagagacagcagctaagagacaaaggaggcgggagactgcctaggtgccgcagcacccacaccgtcctcttgcccccccgtcactgggaccccagagctggcccttgatggaggggagccgacctcgcagcagcctgagcctggccagcagcgcctccaccatctcctcgctcagcagcctgagccccaagaagcccacccgggcagtaaacaagatccacgcctttgggaagagaggcaatgcgctcaggagggatcccaaccttcccgtgcacatccgaggctggcttcataagcaggacagctcggggctccgtctctggaaacgccgctggttcgtcctctccggccattgcctcttttattacaaggacagccgcgaggagagtgtcctaggcagcgtcctgctccccagctacaatattagaccagatgggccgggagccccccgagggcggcgcttcaccttcaccgcagagcacccgggcatgaggacctacgttttggccgctgacaccttagaagacctgcggggctggctacgggcgctgggccgggcctcccgtgcggagggggacgactatgggcaacccaggtcacctgcacgaccccagcccggggagggccccggcggccccggtggtcccccggaggtgagcagaggggaagaggggcgcatctcagaatcaccggaagtgactcgactctccagaggtcgtggtagacccaggctgctcactcccagccccacaaccgacctccactctggactccagatgcggagggcgaggagccccgacctgttcacccccctctctcgccctccctcgcctctgagcctcccccgtccccgttctgcccctgcgcggcgaccccctgccccctcaggagacacagcaccccctgcccgacctcacaccccgttgagtcgcattgatgtccgacctcctctggattgggtccccattgcgggcccgggaggggaatggtttctatggccaaagtttggttttctcaacactgtctaaatttggattaaaactttgaacttttaaaaatagct

SEQ ID NO: 433428 - DNA, 1195 bp, Homo sapiens
aggcagggaaagaccagcagagaggaaagagaaactgggagagggaggaagggagaaagtgagaagggaaatcggaaagagaaaagggaggaaacggcagagccagagagaaagaggaagagactgagtgtgaaggagagaggacacaggggatgactgagagacagagagagagagagagagagaatgagacagagacttaaggaagagaccctgtgagtctgacaataaaagatttggacagaaacagaaagattggagagagagagagagggagagaatgagtgagagagagactggaagagacagagatcagagggagacacagaaagtgagagtggggagagaggtagtgtaaaaggaagagagagagagagagaccgtaagagacaggagacaaagagacaaaaagtgtgagtgagcaggtgaggagagagattgagaactatgagagacagcagctaagagacaaaggaggcgggagactgcctaggtgccgcagcacccacaccgtcctcttgcccccccgtcactgggaccccagagctggcccttgatggaggggagccgacctcgcagcagcctgagcctggccagcagcgcctccaccatctcctcgctcagcagcctgagccccaaggacagctcggggctccgtctctggaaacgccgctggttcgtcctctccggccattgcctcttttattacaaggacagccgcgaggagagtgtcctaggcagcgtcctgctccccagctacaatattagaccagatgggccgggagccccccgagggcggcgcttcaccttcaccgcagagcacccgggcatgaggacctacgttttggccgctgacaccttagaagacctgcggggctggctacgggcgctgggccgggcctcccgtgcggagggggacgactatgggcaacccaggtcacctgcacgaccccagcccggggagggccccggcggccccggtggtcccccggaggtgagcagaggggaagaggggcgcatctcagaatcaccggaagtgactcgactctccagaggtcgtggtagacccaggctgctcactcccagccccacaaccgacctccactctggactccagatgcggagggcgaggagccccgacttgttcacccacgtctctcgccctcctcgctcttgaagctcgggaggatgcgtg

SEQ ID NO: 433429 - DNA, 620 bp, Homo sapiens
  misc_feature (563)..(563): n is a, c, g, or t
  misc_feature (571)..(571): n is a, c, g, or t
  misc_feature (574)..(574): n is a, c, g, or t
  misc_feature (577)..(577): n is a, c, g, or t
aaacttacggctaggtagcgaggctgggtgggctcaggagggatcccaaccttcccgtgcacatccgaggctggcttcataagcagacagccgcgaggagagtgtcctaggcagcgtcctgctccccagctacaatattagaccagatgggccgggagccccccgagggcggcgcttcaccttcaccgcagagcacccgggcatgaggacctacgttttggccgctgacaccttagaagacctgcggggctggctacgggcgctgggccgggcctcccgtgcggagggggacgactatgggcaacccaggtcacctgcacgaccccagcccggggagggccccggcggccccggtggtcccccggaggtgagcagaggggaagaggggcgcatctcagaatcaccggaagtgactcgactctccagaggtcgtggtagacccaggctgctcactcccagccccacaaccgacctccactctggactccagatgcggagggcgaggagccccgacctgttcacccccctctctcgccctccctcgcctctgagcctccggcganccgactgnccnggnaggagaccctgaggatagagaaagaaaagaaagcgacacgcga

SEQ ID NO: 433430 - DNA, 3038 bp, Homo sapiens
aggcagggaaagaccagcagagaggaaagagaaactgggagagggaggaagggagaaagtgagaagggaaatcggaaagagaaaagggaggaaacggcagagccagagagaaagaggaagagactgagtgtgaaggagagaggacacaggggatgactgagagacagagagagagagagagagagaatgagacagagacttaaggaagagaccctgtgagtctgacaataaaagatttggacagaaacagaaagattggagagagagagagagggagagaatgagtgagagagagactggaagagacagagatcagagggagacacagaaagtgagagtggggagagaggtagtgtaaaaggaagagagagagagagagaccgtaagagacaggagacaaagagacaaaaagtgtgagtgagcaggtgaggagagagattgagaactatgagagacagcagctaagagacaaaggaggcgggagactgcctaggtgccgcagcacccacaccgtcctcttgcccccccgtcactgggaccccagagctggcccttgatggaggggagccgacctcgcagcagcctgagcctggccagcagcgcctccaccatctcctcgctcagcagcctgagccccaagaagcccacccgggcagtaaacaagatccacgcctttgggaagagaggcaatgcgctcaggagggatcccaaccttcccgtgcacatccgaggctggcttcataagcaggacagctcggggctccgtctctggaaacgccgctggttcgtcctctccggccattgcctcttttattacaaggacagccgcgaggagagtgtcctaggcagcgtcctgctccccagctacaatattagaccagatgggccgggagccccccgagggcggcgcttcaccttcaccgcagagcacccgggcatgaggacctacgttttggccgctgacaccttagaagacctgcggggctggctacgggcgctgggccgggcctcccgtgcggagggggacgactatgggcaacccaggtcacctgcacgaccccagcccggggagggccccggcggccccggtggtcccccggaggtgagcagaggggaagaggggcgcatctcagaatcaccggaagtgactcgactctccagaggtcgtggtagacccaggctgctcactcccagccccacaaccgacctccactctggactccagatgcggagggcgaggagccccgacctgttcacccccctctctcgccctccctcgcctctgagcctcccccgtccccgttctgcccctgcgcggcgaccccctgccccctcaggagacacagcaccccctgcccgacctcacaccccgttgagtcgcattgatgtccgacctcctctggattggggcccccaacgccagaccctctcccgaccccctactccccgccgaggacctccctctgaggctgggggaggaaagccccccaggagtccccagcactggagtcaggagcccagaacacaggcacactctggctcccccacttatctccagctccccccgcggccccctgggacccgggcctccatggttttattgccgggtcctcccctggagtcaactttccaccaaagcttggagacagatacgctgctgaccaagttgtgcgggcaggaccggcttctgcggaggctgcaggaggagatagaccagaagcaggaggagaaggagcaactagaagcagctctggagttgacccggcaacagctgggccaagccaccagggaggctggggctcccgggagggcctggggtcgccagcgcctcttgcaggaccggctggtcagtgtgagggccaccctctgtcacttgactcaggagcgagagagggtttgggacacgtacagtggcctggagcaggagctgggcaccttaagagagacgctggagtacctgctgcaccttggttctccccaggacagagtgtctgctcagcagcagctgtggatggtggaagacacgctggcaggtctgggtggcccccagaaaccgcccccacacactgagcctgactccccatctcccgtgctccagggcgaggagtcctcagagagggagagcctgccagagtccttggaactgagctcccctaggtcccccgagactgactgggggcggcctcctggaggcgacaaagacctcgccagccctcacttaggtcttgggtctccgagggtctcccgggcttccagccctgagggtcgccacctcccttccccacagctaggaaccaaggccccggtggcccggccccggatgagtgcccaggagcagctggagcggatgcgcagaaaccaggaatgtggacggcccttccctcgcccgacctccccccggcttctcaccctgggaaggacactgtccccagccagacgccagcctgacgtggagcaaaggtccaaggaacaccaccccttacttgccgacttccgaaggtcaccgggagcgggttctcagcctctcccaagccctggctactgaggcgtcgcagtggcacagaatgatgacaggtggaaatttggactcccagggagaccctcttcccggtgtgccgctgcctccttcggaccccacgcgccaggagacccctccccccagatctcccccggtggctaattcgggttccacggggttctctcgccgagggagtgggcgtggaggaggtcccaccccctgggggcccgcgtgggatgccgggatcgcccctccggtcctgccacaagacgagggggcatggcctctgcgagtcactctgctacaatccagcttctaatccgcccaaaagcggcagccaatcggagcgcgaggacgtggtctggaggtaccgccggagatctgggaccactcagggcatcagggggcgtggtctggtccccattgcgggcccgggaggggaatggtttctatggccaaagtttggttttctcaacactgtctaaatttggattaaaactttgaacttttaaaaatagct

SEQ ID NO: 433431 - DNA, 1711 bp, Homo sapiens
  misc_feature (1)..(1): n is a, c, g, or t
nggctggtactggcccggagatgtaatgtgtgtgacttgctggggctcccgtgggggtcacagcctgtcggggagaagactggaggggaagatgccacaaagcggacattactgaggatttggacagtagaggaggattctaacccagtgggacagtaagacacagtgaagtgagacatgtccttgaggctgacttgatgggcacactctggctcccccacttatctccagctccccccgcggccccctgggacccgggcctccatggttttattgccgggtcctcccctggagtcaactttccaccaaagcttggagacagatacgctgctgaccaagttgtgcgggcaggaccggcttctgcggaggctgcaggaggagatagaccagaagcaggaggagaaggagcaactagaagcagctctggagttgacccggcaacagctgggccaagccaccagggaggctggggctcccgggagggcctggggtcgccagcgcctcttgcaggaccggctggtcagtgtgagggccaccctctgtcacttgactcaggagcgagagagggtttgggacacgtacagtggcctggagcaggagctgggcaccttaagagagacgctggagtacctgctgcaccttggttctccccaggacagagtgtctgctcagcagcagctgtggatggtggaagacacgctggcaggtctgggtggcccccagaaaccgcccccacacactgagcctgactccccatctcccgtgctccagggcgaggagtcctcagagagggagagcctgccagagtccttggaactgagctcccctaggtcccccgagactgactgggggcggcctcctggaggcgacaaagacctcgccagccctcacttaggtcttgggtctccgagggtctcccgggcttccagccctgagggtcgccacctcccttccccacagctaggaaccaaggccccggtggcccggccccggatgagtgcccaggagcagctggagcggatgcgcagaaaccaggaatgtggacggcccttccctcgcccgacctccccccggcttctcaccctgggaaggacactgtccccagccagacgccagcctgacgtggagcaaaggtccaaggaacaccaccccttacttgccgacttccgaaggtcaccgggagcgggttctcagcctctcccaagccctggctactgaggcgtcgcagtggcacagaatgatgacaggtggaaatttggactcccagggagaccctcttcccggtgtgccgctgcctccttcggaccccacgcgccaggagacccctccccccagatctcccccggtggctaattcgggttccacggggttctctcgccgagggagtgggcgtggaggaggtcccaccccctgggggcccgcgtgggatgccgggatcgcccctccggtcctgccacaagacgagggggcatggcctctgcgagtcactctgctacaatccagcttctaatccgcccaaaagcggcagccaatcggagcgcgaggacgtggtctggaggtaccgccggagatctgggaccactcagggcatcagggggcgtggtctggtccccattgcgggcccgggaggggaatggtttctatggccaaagtttggttttctcaacactgtctaaatttggattaaaactttgaacttttaaaaatagct

SEQ ID NO: 433432 - DNA, 2953 bp, Homo sapiens
aggcagggaaagaccagcagagaggaaagagaaactgggagagggaggaagggagaaagtgagaagggaaatcggaaagagaaaagggaggaaacggcagagccagagagaaagaggaagagactgagtgtgaaggagagaggacacaggggatgactgagagacagagagagagagagagagagaatgagacagagacttaaggaagagaccctgtgagtctgacaataaaagatttggacagaaacagaaagattggagagagagagagagggagagaatgagtgagagagagactggaagagacagagatcagagggagacacagaaagtgagagtggggagagaggtagtgtaaaaggaagagagagagagagagaccgtaagagacaggagacaaagagacaaaaagtgtgagtgagcaggtgaggagagagattgagaactatgagagacagcagctaagagacaaaggaggcgggagactgcctaggtgccgcagcacccacaccgtcctcttgcccccccgtcactgggaccccagagctggcccttgatggaggggagccgacctcgcagcagcctgagcctggccagcagcgcctccaccatctcctcgctcagcagcctgagccccaagaagcccacccgggcagtaaacaagatccacgcctttgggaagagaggcaatgcgctcaggagggatcccaaccttcccgtgcacatccgaggctggcttcataagcaggacagctcggggctccgtctctggaaacgccgctggttcgtcctctccggccattgcctcttttattacaaggacagccgcgaggagagtgtcctaggcagcgtcctgctccccagctacaatattagaccagatgggccgggagccccccgagggcggcgcttcaccttcaccgcagagcacccgggcatgaggacctacgttttggccgctgacaccttagaagacctgcggggctggctacgggcgctgggccgggcctcccgtgcggagggggacgactatgggcaacccaggtcacctgcacgaccccagcccggggagggccccggcggccccggtggtcccccggaggtgagcagaggggaagaggggcgcatctcagaatcaccggaagtgactcgactctccagaggtcgtggtagacccaggctgctcactcccagccccacaaccgacctccactctggactccagatgcggagggcgaggagccccgacctgttcacccccctctctcgccctccctcgcctctgagcctcccccgtccccgttctgcccctgcgcggcgaccccctgccccctcaggagacacagcaccccctgcccgacctcacaccccgttgagtcgcattgatgtccgacctcctctggattggggcccccaacgccagaccctctcccgaccccctactccccgccgaggacctccctctgaggctgggggaggaaagccccccaggagtccccagcactggagtcaggagcccagaacacaggcacactctggctcccccacttatctccagctccccccgcggccccctgggacccgggcctccatggttttattgccgggtcctcccctggagtcaactttccaccaaagcttggagacagatacgctgctgaccaagttgtgcgggcaggaccggcttctgcggaggctgcaggaggagatagaccagaagcaggaggagaaggagcaactagaagcagctctggagttgacccggcaacagctgggccaagccaccagggaggctggggctcccgggagggcctggggtcgccagcgcctcttgcaggaccggctggtcagtgtgagggccaccctctgtcacttgactcaggagcgagagagggtttgggacacgtacagtggcctggagcaggagctgggcaccttaagagagacgctggagtacctgctgcaccttggttctccccaggacagagtgtctgctcagcagcagctgtggatggtggaagacacgctggcaggtctgggtggcccccagaaaccgcccccacacactgagcctgactccccatctcccgtgctccagggcgaggagtcctcagagagggagagcctgccagagtccttggaactgagctcccctaggtcccccgagactgactgggggcggcctcctggaggcgacaaagacctcgccagccctcacttaggtcttgggtctccgagggtctcccgggcttccagccctgagggtcgccacctcccttccccacagctaggaaccaaggccccggtggcccggccccggatgagtgcccaggagcagctggagcggatgcgcagaaaccaggaatgtggacggcccttccctcgcccgacctccccccggcttctcaccctgggaaggacactgtccccagccagacgccagcctgacgtggagcaaaggcctgtcgtaggacactcgggagcccagaaatggctcagaagctctgggtcctggagtagtccaaggaacaccaccccttacttgccgacttccgaaggtcaccgggagcgggttctcagcctctcccaagccctggctactgaggcgtcgcagtggcacagaatgatgacaggtggaaatttggactcccagggagaccctcttcccggtgtgccgctgcctcctccggtcctgccacaagacgagggggcatggcctctgcgagtcactctgctacaatccagcttctaatccgcccaaaagcggcagccaatcggagcgcgaggacgtggtctggaggtaccgccggagatctgggaccactcagggcatcagggggcgtggtctggtccccattgcgggcccgggaggggaatggtttctatggccaaagtttggttttctcaacactgtctaaatttggattaaaactttgaacttttaaaaatagct

SEQ ID NO: 433433 - DNA, 3167 bp, Homo sapiens
  misc_feature (2907)..(2907): n is a, c, g, or t
  misc_feature (2926)..(2926): n is a, c, g, or t
  misc_feature (3091)..(3091): n is a, c, g, or t
  misc_feature (3098)..(3098): n is a, c, g, or t
  misc_feature (3132)..(3132): n is a, c, g, or t
aggcagggaaagaccagcagagaggaaagagaaactgggagagggaggaagggagaaagtgagaagggaaatcggaaagagaaaagggaggaaacggcagagccagagagaaagaggaagagactgagtgtgaaggagagaggacacaggggatgactgagagacagagagagagagagagagagaatgagacagagacttaaggaagagaccctgtgagtctgacaataaaagatttggacagaaacagaaagattggagagagagagagagggagagaatgagtgagagagagactggaagagacagagatcagagggagacacagaaagtgagagtggggagagaggtagtgtaaaaggaagagagagagagagagaccgtaagagacaggagacaaagagacaaaaagtgtgagtgagcaggtgaggagagagattgagaactatgagagacagcagctaagagacaaaggaggcgggagactgcctaggtgccgcagcacccacaccgtcctcttgcccccccgtcactgggaccccagagctggcccttgatggaggggagccgacctcgcagcagcctgagcctggccagcagcgcctccaccatctcctcgctcagcagcctgagccccaagaagcccacccgggcagtaaacaagatccacgcctttgggaagagaggcaatgcgctcaggagggatcccaaccttcccgtgcacatccgaggctggcttcataagcaggacagctcggggctccgtctctggaaacgccgctggttcgtcctctccggccattgcctcttttattacaaggacagccgcgaggagagtgtcctaggcagcgtcctgctccccagctacaatattagaccagatgggccgggagccccccgagggcggcgcttcaccttcaccgcagagcacccgggcatgaggacctacgttttggccgctgacaccttagaagacctgcggggctggctacgggcgctgggccgggcctcccgtgcggagggggacgactatgggcaacccaggtcacctgcacgaccccagcccggggagggccccggcggccccggtggtcccccggaggtgagcagaggggaagaggggcgcatctcagaatcaccggaagtgactcgactctccagaggtcgtggtagacccaggctgctcactcccagccccacaaccgacctccactctggactccagatgcggagggcgaggagccccgacctgttcacccccctctctcgccctccctcgcctctgagcctcccccgtccccgttctgcccctgcgcggcgaccccctgccccctcaggagacacagcaccccctgcccgacctcacaccccgttgagtcgcattgatgtccgacctcctctggattggggcccccaacgccagaccctctcccgaccccctactccccgccgaggacctccctctgaggctgggggaggaaagccccccaggagtccccagcactggagtcaggagcccagaacacaggcacactctggctcccccacttatctccagctccccccgcggccccctgggacccgggcctccatggttttattgccgggtcctcccctggagtcaactttccaccaaagcttggagacagatacgctgctgaccaagttgtgcgggcaggaccggcttctgcggaggctgcaggaggagatagaccagaagcaggaggagaaggagcaactagaagcagctctggagttgacccggcaacagctgggccaagccaccagggaggctggggctcccgggagggcctggggtcgccagcgcctcttgcaggaccggctggtcagtgtgagggccaccctctgtcacttgactcaggagcgagagagggtttgggacacgtacagtggcctggagcaggagctgggcaccttaagagagacgctggagtacctgctgcaccttggttctccccaggacagagtgtctgctcagcagcagctgtggatggtggaagacacgctggcaggtctgggtggcccccagaaaccgcccccacacactgagcctgactccccatctcccgtgctccagggcgaggagtcctcagagagggagagcctgccagagtccttggaactgagctcccctaggtcccccgagactgactgggggcggcctcctggaggcgacaaagacctcgccagccctcacttaggtcttgggtctccgagggtctcccgggcttccagccctgagggtcgccacctcccttccccacagctaggaaccaaggccccggtggcccggccccggatgagtgcccaggagcagctggagcggatgcgcagaaaccaggaatgtggacggcccttccctcgcccgacctccccccggcttctcaccctgggaaggacactgtccccagccagacgccagcctgacgtggagcaaaggtccaaggaacaccaccccttacttgccgacttccgaaggtcaccgggagcgggttctcagcctctcccaagccctggctactgaggcgtcgcagtggcacagaatgatgacaggtggaaatttggactcccagggagaccctcttcccggtgtgccgctgcctccttcggaccccacgcgccaggagacccctccccccagatctcccccggtggctaattcgggttccacggggttctctcgccgagggagtgggcgtggaggaggtcccaccccctgggggcccgcgtgggatgccgggatcgcccctccggtcctgccacaagacgagggggcatggcctctgcgagtcactctgctacaatccagcttctaatccgcccaaaagcggcagcctgagcctggccagcagcgcctccaccatctcctcgctcagcagcctgagncccaagaagcccacccggnaggtaaacaagatccacgcctttgggaagagaggcaatgcgctcaggagggatcccaaccttcccgtgcacatccgaggctggcttcataagcaggacagctcggggctccgtctctggaaacgccgctggttcgtcctctccggccattgcctcttttattacnaggacanccgcgaagagagtgtccttaggcaagcgttctgntccccagctacaatatttagaccagatgggcccgg

SEQ ID NO: 433434 - DNA, 1739 bp, Homo sapiens
aggcagggaaagaccagcagagaggaaagagaaactgggagagggaggaagggagaaagtgagaagggaaatcggaaagagaaaagggaggaaacggcagagccagagagaaagaggaagagactgagtgtgaaggagagaggacacaggggatgactgagagacagagagagagagagagagagaatgagacagagacttaaggaagagaccctgtgagtctgacaataaaagatttggacagaaacagaaagattggagagagagagagagggagagaatgagtgagagagagactggaagagacagagatcagagggagacacagaaagtgagagtggggagagaggtagtgtaaaaggaagagagagagagagagaccgtaagagacaggagacaaagagacaaaaagtgtgagtgagcaggtgaggagagagattgagaactatgagagacagcagctaagagacaaaggaggcgggagactgcctaggtgccgcagcacccacaccgtcctcttgcccccccgtcactgggaccccagagctggcccttgatggaggggagccgacctcgcagcagcctgagcctggccagcagcgcctccaccatctcctcgctcagcagcctgagccccaagaagcccacccgggcagtaaacaagatccacgcctttgggaagagaggcaatgcgctcaggagggatcccaaccttcccgtgcacatccgaggctggcttcataagcaggacagctcggggctccgtctctggaaacgccgctggttcgtcctctccggccattgcctcttttattacaaggacagccgcgaggagagtgtcctaggcagcgtcctgctccccagctacaatattagaccagatgggccgggagccccccgagggcggcgcttcaccttcaccgcagagcacccgggcatgaggacctacgttttggccgctgacaccttagaagacctgcggggctggctacgggcgctgggccgggcctcccgtgcggagggggacgactatgggcaacccaggtcacctgcacgaccccagcccggggagggccccggcggccccggtggtcccccggaggtgagcagaggggaagaggggcgcatctcagaatcaccggaagtgactcgactctccagaggtcgtggtagacccaggctgctcactcccagccccacaaccgacctccactctggactccagatgcggagggcgaggagccccgacctgttcacccccctctctcgccctccctcgcctctgagcctcccccgtccccgttctgcccctgcgcggcgaccccctgccccctcaggagacacagcaccccctgcccgacctcacaccccgttgagtcgcattgatgtccgacctcctctggattggggcccccaacgccagaccctctcccgaccccctactccccgcgtgggatgccgggatcgcccctccggtcctgccacaagacgagggggcatggcctctgcgagtcactctgctacaatccagcttctaatccgcccaaaagcggcagccaatcggagcgcgaggacgtggtctggaggtaccgccggagatctgggaccactcagggcatcagggggcgtggtctggtccccattgcgggcccgggaggggaatggtttctatggccaaagtttggttttctcaacactgtctaaatttggattaaaactttgaacttttaaaaatagct

SEQ ID NO: 433435 - DNA, 1282 bp, Homo sapiens
  misc_feature (1225)..(1225): n is a, c, g, or t
  misc_feature (1233)..(1233): n is a, c, g, or t
  misc_feature (1236)..(1236): n is a, c, g, or t
  misc_feature (1239)..(1239): n is a, c, g, or t
aggcagggaaagaccagcagagaggaaagagaaactgggagagggaggaagggagaaagtgagaagggaaatcggaaagagaaaagggaggaaacggcagagccagagagaaagaggaagagactgagtgtgaaggagagaggacacaggggatgactgagagacagagagagagagagagagagaatgagacagagacttaaggaagagaccctgtgagtctgacaataaaagatttggacagaaacagaaagattggagagagagagagagggagagaatgagtgagagagagactggaagagacagagatcagagggagacacagaaagtgagagtggggagagaggtagtgtaaaaggaagagagagagagagagaccgtaagagacaggagacaaagagacaaaaagtgtgagtgagcaggtgaggagagagattgagaactatgagagacagcagctaagagacaaaggaggcgggagactgcctaggtgccgcagcacccacaccgtcctcttgcccccccgtcactgggaccccagagctggcccttgatggaggggagccgacctcgcagcagcctgagcctggccagcagcgcctccaccatctcctcgctcagcagcctgagccccaagaagcccacccgggcagtaaacaagatccacgcctttgggaagagaggcaatgcgctcaggagggatcccaaccttcccgtgcacatccgaggctggcttcataagcagacagccgcgaggagagtgtcctaggcagcgtcctgctccccagctacaatattagaccagatgggccgggagccccccgagggcggcgcttcaccttcaccgcagagcacccgggcatgaggacctacgttttggccgctgacaccttagaagacctgcggggctggctacgggcgctgggccgggcctcccgtgcggagggggacgactatgggcaacccaggtcacctgcacgaccccagcccggggagggccccggcggccccggtggtcccccggaggtgagcagaggggaagaggggcgcatctcagaatcaccggaagtgactcgactctccagaggtcgtggtagacccaggctgctcactcccagccccacaaccgacctccactctggactccagatgcggagggcgaggagccccgacctgttcacccccctctctcgccctccctcgcctctgagcctccggcganccgactgnccnggnaggagaccctgaggatagagaaagaaaagaaagcgacacgcga

SEQ ID NO: 433436 - DNA, 6822 bp, Homo sapiens
cggatgtgtatatctcatgattgatatggagaaactagtcatgggccaaaggtcaagatacttctctgggaaatgttgctgctgatgctgctttacaaagtcatacaatgagtgtttggtttaagaaagattttcatacttaaaagattttcatcttggaaatacatcaagtgaaaattaaattcttttgggaaacattttccttctgatatattatacttgtaatgggcgacatggcaaacaactcagttgcttacagtggtgtgaaaaactctttgaaggaagctaatcatgatggagactttggaattacgctcgcagagctgcgggctctcatggagctcaggtccacagatgcattacgaaaaatacaggaaagctatggagatgtctatggaatttgcaccaaattgaaaacatctcccaatgaaggtttaagtggaaaccctgcagatttagaaagaagagaagcagtgtttggaaagaattttatacctcctaaaaagccaaaaacctttcttcaattagtatgggaagcattacaagatgtcactttaattatattagaaattgcagccatagtatcattgggcctttctttttatcagcctccagaaggggataatgcactttgtggagaagtttctgttggggaggaagaaggtgaaggtgaaactggttggattgaaggagctgcaatcctcttgtctgtagtgtgtgtggtgttagtaacagctttcaatgactggagtaaggaaaaacagtttagaggtttgcagagccgaattgaacaagaacagaagttcactgtcatcaggggtggtcaggtcattcagatacctgtagctgacattactgttggagatattgctcaagtgaaatatggtgatcttcttccagctgacggcatacttattcaaggcaacgatcttaaaattgatgaaagctcattgactggtgaatcagatcatgttaaaaagtctttagataaggatcccttacttctatcaggtactcatgtaatggaaggctctggaagaatggtagttacagctgtaggtgtaaattctcaaactggaattatctttaccttacttggagctggaggtgaagaggaagagaagaaagatgagaagaaaaaggaaaagaaaaataagaaacaagatggagctattgagaatcgcaacaaagcaaaagcccaggatggtgcagccatggaaatgcagccattgaagagtgaagaaggtggagatggtgatgaaaaagataaaaagaaagcaaatttgccaaaaaaggaaaaatctgttttacaagggaaacttacaaaactggctgttcagattggcaaagcaggtctgttgatgtctgccatcacagttatcattctagtattatattttgtcattgacaccttctgggttcagaaaagaccatggcttgctgagtgcacaccaatttatatacaatactttgtgaagttcttcattattggagttacagttttagtggtcgcagtgccagaaggtcttccacttgcagtcacgatctcactggcttattcagtcaaaaaaatgatgaaagataataacttagtaaggcatctggatgcttgtgaaaccatgggaaatgctacagctatttgttcagataaaacaggaactttgacaatgaacagaatgacagtcgttcaagcttacataaatgaaaaacattataaaaaggttcctgaaccagaagctattccaccaaatattttgtcctatcttgtaacaggaatttctgtgaattgtgcttatacatcaaaaatattgccaccagagaaagagggtggattacctcgtcacgttggtaataaaactgaatgtgccttgttgggacttcttttggatttaaaacgggattatcaggatgttagaaatgaaataccagaagaagcactgtacaaagtctacaccttcaattctgttaggaagtccatgagtactgtcctgaaaaattcagatggaagttatcgaatattcagcaagggtgcatctgagataattctgaaaaagtgtttcaaaatcttgagtgctaatggtgaggcaaaagtattcagaccaagggaccgtgatgatattgtaaaaactgtgattgaaccgatggcatcagaaggcttgagaaccatatgtcttgcattcagagattttccagcaggagaaccagaaccagagtgggataatgaaaatgatattgtcaccggccttacatgcattgctgttgtggggattgaagatcctgtgagacctgaggtgccagatgcaattaaaaagtgtcagagggctggaattactgtgcggatggtcactggtgataatattaatactgctcgggccattgctaccaaatgtggtattttacatcctggggaagattttctgtgcctagaaggtaaagattttaacagaagaatacgaaatgaaaaaggagagattgagcaagagaggatagacaagatttggccaaaacttcgagtacttgcaagatcatctcctactgataagcatacactggttaaaggtataattgacagcactgtctcagaccaacgccaggttgtagctgtaactggtgatggtacaaatgatggcccagcactaaagaaagcagatgttggatttgcaatgggtattgctggaactgatgtagctaaagaagcatccgatattattctcacagatgacaactttacaagcattgttaaagcagttatgtggggacgaaatgtctatgacagcatctcaaaattccttcagttccaacttactgttaatgtagtagcagtgattgttgcttttacgggcgcctgcattactcaagactcaccgcttaaggctgtgcagatgctgtgggtaaacctcataatggatacactcgcttccctggctctggcaacggaaccacccactgagtctctcttgcttcggaaaccttatggtagaaataagcctctcatctcacgtacaatgatgaagaatattttgggtcatgcattctatcaacttgtagtagtctttacactcttatttgctggagaaaagttttttgacattgatagtggaagaaatgctcctttgcatgctcctccttcagaacattatactattgtttttaatacctttgtgctgatgcaacttttcaacgaaataaatgcccggaaaattcatggtgaaagaaatgtattcgaaggaatctttaacaatgccatcttctgcacaattgttttaggcacttttgtggtacagataataattgtgcagtttggtggaaaacctttcagttgttcagaactttcaatagaacagtggctatggtcaatattcctaggaatgggaacattactctggggccagcttatttcaacaattccaactagccgtttaaaattcctcaaagaagctggtcatggaacacaaaaggaagaaatacctgaggaggaattagcagaggatgttgaagagattgatcacgctgaaagggagttgcggcgtggccaaatcttgtggtttagaggtctgaacagaatccaaacacagattcgagtggtgaatgcatttcgtagttctttatatgaagggttagaaaaaccggaatcaagaagttcgattcacaactttatgacacatcctgagtttaggatagaagattcagagcctcatatcccccttattgatgacactgatgccgaagatgatgctcctacaaaacgtaactccagtcctccaccctctcccaacaaaaataacaatgctgttgacagtggaattcaccttacaatagaaatgaacaagtctgctacctcttcatccccaggaagcccactacatagtttggaaacatcactctgattgtaagctgaatgttaacacactagctgcattgtaaagaaacaaattgaaactgggtcttttcacatattgtgatggacaagctagtattcttgtctttggacttcaacagaagacacacttgtacgaatgtagatttatttttttaaaaaaaaaaaagcaaagctttctgccagactgagggtgctttttggggggtgggagaaatgaactgacagataaacagtaactcagcgtaagtgacctgtggatcatcagtagtacccaagcatggtcctgaacagtgtattagcagagctttagtttatctcagtcctggatgggagagagagggaggagtaaaactgggcaagacaaagagccctggatcgttgaattgatagtttaatttctgctgttggctgttaataatttggattatttatgtttataaatgatacagatctgtttacaaggtttgtagatactttttttgttcctgttcatagatgggaagcttccttataactgatgcagagaaaaattagtccttcaaatactgctgtattttcaggaaaaaaaaaaaaaggggtgtttctattgaaactgtactaaatttttgcctacaatttaccttgttaaatattgtagataaattgctaatactaatagccaaatagataacactaatgctttgtttaaaaaaacgaaaaaaacaaaacaaaacaaaaaaacatgagcagtggtgttctaatgaagttatgacatctgtcctaattagtttcttaaatacatttactacttaatggttttgaagcaactgtttaatttttaaaatttttgaaaacttgctaataaccttttgttcagaatttagtagattgtttaatgcaggacatcaactacataatgaaagatgcttgaaatgcttttgttatttcaggcaaatcaaattaaatcagactatcaaactacaagagaaccttagtcttttttgtttttgtctaaacatgttagtttagtgatgtcttggtgaactgtgagtgaactgtattgatttttctaatctttagagaccttcacacagcatgagggctgttggcattttgaaaaaggttaataagtagaagcatacatgttttccttttgtttttgaaacttgtttgtaaacataaataaatatgcccttttattaaataaattcatggcaatgtttttttaaaagacatttcagcttctttactcagttctgcatatacagtgcatcagtctgttctctttgaccacaattggaatacatttcaagatggtaacagccccatgaagtaccgctttaattccttgctggtaatctaatagaatcagattaagaaaattaacacaattttaccatttgacatactcttcattgaatttagtttgtctaaaatagtctcacaggtaaaaaacataacaacaatgaccaccattgtctttgatacatttattttaattcttaagtggccaaataacagattaggtaaaatgagattacatgaaaaggttctaaaatgatatatttagatgcaataattaaccatatgctagaatgcccacctctaagccaattggattctttagctctctttttctttccttcatctaccttcttctcttttttgcctctgtctttaccctttagaaactggcatgtgttagggcccagatttcaccagatacacaatcctcaggctgacataaagtttacgaggactgctactataactgagagtgctgaccaagcaaagaaacatttagttgatggtgcttgatatttttggtgggtgggggaaatctttttctcaccatcaaatctttgcagtaatcctctgcaggtcttagaaacacattggctctgtcagcatttgtaattgtacatttattcatcaggtatttatagtgaatcatactgtaaaaaagaggtagcatgatatgctggaaagcatattagactaggagtcaagacctggtttctagtcttggttttgccattaatgtgctgcatgatcttgggaaaatcatttaccctaaataagggtggtggactatcttgaagaaccctttcaactctaaaaattgaccctatcaactggagagcccacaaggcatagggaatagagaaaagggaaatgttttcagttttcttttttattttggttatgcttaaatatgaatgtaattaccaaaagatttagaagtgcatgtgctttggaggatttgtattgagcttttacagtattcatttttcaactcaaggcaatggctttctacaccaactctaatccataaacgggtcttatgacatctatgaagtagtagcaagacatgcttagtgtgtatttctctctttgagacactgtaatttctaccagaaatttccagagcattatgtaggtagaaaaaaatgcaagcaagctgttaaagatcttggatcccattatatagtatgtatagctgaaatctgtaattcaatcactttttctcttttatcctctaaccaaaaaattgtttaattttgcatcccaaatgtttttaatctttgtatattttttaaaaatccttttctcctcatcattgccttttttgtggttgtaaatagacttacttgcactttgaagatgagttactccttgtcatcttacaaatatgtgatatggtaattttcataacagatgtcagttttgaaccaagaattggtgatttgtttataagaaaaaaactggcttcatttctgtgaaattgctctttgaaaatttctttttacacgtgtaagccaactgagataccgtgatggtgttgatttctttcaatgatgcttaccatctattttagccactgagccttttattatttgtctatttgtaaagtttatttgtcttaactcatttaataaatatactgtttatctgtttctgaa

SEQ ID NO: 433437 - DNA, 6768 bp, Homo sapiens
cggatgtgtatatctcatgattgatatggagaaactagtcatgggccaaaggtcaagatacttctctgggaaatgttgctgctgatgctgctttacaaagtcatacaatgagtgtttggtttaagaaagattttcatacttaaaagattttcatcttggaaatacatcaagtgaaaattaaattcttttgggaaacattttccttctgatatattatacttgtaatgggcgacatggcaaacaactcagttgcttacagtggtgtgaaaaactctttgaaggaagctaatcatgatggagactttggaattacgctcgcagagctgcgggctctcatggagctcaggtccacagatgcattacgaaaaatacaggaaagctatggagatgtctatggaatttgcaccaaattgaaaacatctcccaatgaaggtttaagtggaaaccctgcagatttagaaagaagagaagcagtgtttggaaagaattttatacctcctaaaaagccaaaaacctttcttcaattagtatgggaagcattacaagatgtcactttaattatattagaaattgcagccatagtatcattgggcctttctttttatcagcctccagaaggggataatgcactttgtggagaagtttctgttggggaggaagaaggtgaaggtgaaactggttggattgaaggagctgcaatcctcttgtctgtagtgtgtgtggtgttagtaacagctttcaatgactggagtaaggaaaaacagtttagaggtttgcagagccgaattgaacaagaacagaagttcactgtcatcaggggtggtcaggtcattcagatacctgtagctgacattactgttggagatattgctcaagtgaaatatggtgatcttcttccagctgacggcatacttattcaaggcaacgatcttaaaattgatgaaagctcattgactggtgaatcagatcatgttaaaaagtctttagataaggatcccttacttctatcaggtactcatgtaatggaaggctctggaagaatggtagttacagctgtaggtgtaaattctcaaactggaattatctttaccttacttggagctggaggtgaagaggaagagaagaaagatgagaagaaaaaggaaaagaaaaataagaaacaagatggagctattgagaatcgcaacaaagcaaaagcccaggatggtgcagccatggaaatgcagccattgaagagtgaagaaggtggagatggtgatgaaaaagataaaaagaaagcaaatttgccaaaaaaggaaaaatctgttttacaagggaaacttacaaaactggctgttcagattggcaaagcaggtctgttgatgtctgccatcacagttatcattctagtattatattttgtcattgacaccttctgggttcagaaaagaccatggcttgctgagtgcacaccaatttatatacaatactttgtgaagttcttcattattggagttacagttttagtggtcgcagtgccagaaggtcttccacttgcagtcacgatctcactggcttattcagtcaaaaaaatgatgaaagataataacttagtaaggcatctggatgcttgtgaaaccatgggaaatgctacagctatttgttcagataaaacaggaactttgacaatgaacagaatgacagtcgttcaagcttacataaatgaaaaacattataaaaaggttcctgaaccagaagctattccaccaaatattttgtcctatcttgtaacaggaatttctgtgaattgtgcttatacatcaaaaatattgccaccagagaaagagggtggattacctcgtcacgttggtaataaaactgaatgtgccttgttgggacttcttttggatttaaaacgggattatcaggatgttagaaatgaaataccagaagaagcactgtacaaagtctacaccttcaattctgttaggaagtccatgagtactgtcctgaaaaattcagatggaagttatcgaatattcagcaagggtgcatctgagataattctgaaaaagtgtttcaaaatcttgagtgctaatggtgaggcaaaagtattcagaccaagggaccgtgatgatattgtaaaaactgtgattgaaccgatggcatcagaaggcttgagaaccatatgtcttgcattcagagattttccagcaggagaaccagaaccagagtgggataatgaaaatgatattgtcaccggccttacatgcattgctgttgtggggattgaagatcctgtgagacctgaggtgccagatgcaattaaaaagtgtcagagggctggaattactgtgcggatggtcactggtgataatattaatactgctcgggccattgctaccaaatgtggtattttacatcctggggaagattttctgtgcctagaaggtaaagattttaacagaagaatacgaaatgaaaaaggagagattgagcaagagaggatagacaagatttggccaaaacttcgagtacttgcaagatcatctcctactgataagcatacactggttaaaggtataattgacagcactgtctcagaccaacgccaggttgtagctgtaactggtgatggtacaaatgatggcccagcactaaagaaagcagatgttggatttgcaatgggtattgctggaactgatgtagctaaagaagcatccgatattattctcacagatgacaactttacaagcattgttaaagcagttatgtggggacgaaatgtctatgacagcatctcaaaattccttcagttccaacttactgttaatgtagtagcagtgattgttgcttttacgggcgcctgcattactcaagactcaccgcttaaggctgtgcagatgctgtgggtaaacctcataatggatacactcgcttccctggctctggcaacggaaccacccactgagtctctcttgcttcggaaaccttatggtagaaataagcctctcatctcacgtacaatgatgaagaatattttgggtcatgcattctatcaacttgtagtagtctttacactcttatttgctggagaaaagttttttgacattgatagtggaagaaatgctcctttgcatgctcctccttcagaacattatactattgtttttaatacctttgtgctgatgcaacttttcaacgaaataaatgcccggaaaattcatggtgaaagaaatgtattcgaaggaatctttaacaatgccatcttctgcacaattgttttaggcacttttgtggtacagataataattgtgcagtttggtggaaaacctttcagttgttcagaactttcaatagaacagtggctatggtcaatattcctaggaatgggaacattactctggggccagcttatttcaacaattccaactagccgtttaaaattcctcaaagaagctggtcatggaacacaaaaggaagaaatacctgaggaggaattagcagaggatgttgaagagattgatcacgctgaaagggagttgcggcgtggccaaatcttgtggtttagaggtctgaacagaatccaaacacagattcgagtggtgaatgcatttcgtagttctttatatgaagggttagaaaaaccggaatcaagaagttcgattcacaactttatgacacatcctgagtttaggatagaagattcagagcctcatatcccccttattgatgacactgatgccgaagatgatgctcctacaaaacgtaactccagtcctccaccctctcccaacaaaaataacaatgctgttgacagtggaattcaccttacaatagaaatgaacaagtctgctacctcttcatccccaggaagcccactacatagtttggaaacatcactctgattgtaagctgaatgttaacacactagctgcattgtaaagaaacaaattgaaactgggtcttttcacatattgtgatggacaagctagtattcttgtctttggacttcaacagaagacacacttgtacgaatgtagatttatttttttaaaaaaaaaaaagcaaagctttctgccagactgagggtgctttttggggggtgggagaaatgaactgacagataaacagtaactcagcgtaagtgacctgtggatcatcagtagtacccaagcatggtcctgaacagtgtattagcagagctttagtttatctcagtcctggatgggagagagagggaggagtaaaactgggcaagacaaagagccctggatcgttgaattgatagtttaatttctgctgttggctgttaataatttggattatttatgtttataaatgatacagatctgtttacaaggtttgtagatactttttttgttcctgttcatagatgggaagcttccttataactgatgcagagaaaaattagtccttcaaatactgctgtattttcaggaaaaaaaaaaaaaggggtgtttctattgaaactgtactaaatttttgcctacaatttaccttgttaaatattgtagataaattgctaatactaatagccaaatagataacactaatgctttgtttaaaaaaacgaaaaaaacaaaacaaaacaaaaaaacatgagcagtggtgttctaatgaagttatgacatctgtcctaattagtttcttaaatacatttactacttaatggttttgaagcaactgtttaatttttaaaatttttgaaaacttgctaataaccttttgttcagaatttagtagattgtttaatgcaggacatcaactacataatgaaagatgcttgaaatgcttttgttatttcaggcaaatcaaattaaatcagactatcaaactacaagagaaccttagtcttttttgtttttgtctaaacatgttagtttagtgatgtcttggtgaactgtgagtgaactgtattgatttttctaatctttagagaccttcacacagcatgagggctgttggcattttgaaaaaggttaataagtagaagcatacatgttttccttttgtttttgaaacttgtttgtaaacataaataaatatgcccttttattaaataaattcatggcaatgttttttttctctttgaccacaattggaatacatttcaagatggtaacagccccatgaagtaccgctttaattccttgctggtaatctaatagaatcagattaagaaaattaacacaattttaccatttgacatactcttcattgaatttagtttgtctaaaatagtctcacaggtaaaaaacataacaacaatgaccaccattgtctttgatacatttattttaattcttaagtggccaaataacagattaggtaaaatgagattacatgaaaaggttctaaaatgatatatttagatgcaataattaaccatatgctagaatgcccacctctaagccaattggattctttagctctctttttctttccttcatctaccttcttctcttttttgcctctgtctttaccctttagaaactggcatgtgttagggcccagatttcaccagatacacaatcctcaggctgacataaagtttacgaggactgctactataactgagagtgctgaccaagcaaagaaacatttagttgatggtgcttgatatttttggtgggtgggggaaatctttttctcaccatcaaatctttgcagtaatcctctgcaggtcttagaaacacattggctctgtcagcatttgtaattgtacatttattcatcaggtatttatagtgaatcatactgtaaaaaagaggtagcatgatatgctggaaagcatattagactaggagtcaagacctggtttctagtcttggttttgccattaatgtgctgcatgatcttgggaaaatcatttaccctaaataagggtggtggactatcttgaagaaccctttcaactctaaaaattgaccctatcaactggagagcccacaaggcatagggaatagagaaaagggaaatgttttcagttttcttttttattttggttatgcttaaatatgaatgtaattaccaaaagatttagaagtgcatgtgctttggaggatttgtattgagcttttacagtattcatttttcaactcaaggcaatggctttctacaccaactctaatccataaacgggtcttatgacatctatgaagtagtagcaagacatgcttagtgtgtatttctctctttgagacactgtaatttctaccagaaatttccagagcattatgtaggtagaaaaaaatgcaagcaagctgttaaagatcttggatcccattatatagtatgtatagctgaaatctgtaattcaatcactttttctcttttatcctctaaccaaaaaattgtttaattttgcatcccaaatgtttttaatctttgtatattttttaaaaatccttttctcctcatcattgccttttttgtggttgtaaatagacttacttgcactttgaagatgagttactccttgtcatcttacaaatatgtgatatggtaattttcataacagatgtcagttttgaaccaagaattggtgatttgtttataagaaaaaaactggcttcatttctgtgaaattgctctttgaaaatttctttttacacgtgtaagccaactgagataccgtgatggtgttgatttctttcaatgatgcttaccatctattttagccactgagccttttattatttgtctatttgtaaagtttatttgtcttaactcatttaataaatatactgtttatctgtttctgaa

SEQ ID NO: 433438 - DNA, 7150 bp, Homo sapiens
  misc_feature (7150)..(7150): n is a, c, g, or t
cggatgtgtatatctcatgattgatatggagaaactagtcatgggccaaaggtcaagatacttctctgggaaatgttgctgctgatgctgctttacaaagtcatacaatgagtgtttggtttaagaaagattttcatacttaaaagattttcatcttggaaatacatcaagtgaaaattaaattcttttgggaaacattttccttctgatatattatacttgtaatgggcgacatggcaaacaactcagttgcttacagtggtgtgaaaaactctttgaaggaagctaatcatgatggagactttggaattacgctcgcagagctgcgggctctcatggagctcaggtccacagatgcattacgaaaaatacaggaaagctatggagatgtctatggaatttgcaccaaattgaaaacatctcccaatgaaggtttaagtggaaaccctgcagatttagaaagaagagaagcagtgtttggaaagaattttatacctcctaaaaagccaaaaacctttcttcaattagtatgggaagcattacaagatgtcactttaattatattagaaattgcagccatagtatcattgggcctttctttttatcagcctccagaaggggataatgcactttgtggagaagtttctgttggggaggaagaaggtgaaggtgaaactggttggattgaaggagctgcaatcctcttgtctgtagtgtgtgtggtgttagtaacagctttcaatgactggagtaaggaaaaacagtttagaggtttgcagagccgaattgaacaagaacagaagttcactgtcatcaggggtggtcaggtcattcagatacctgtagctgacattactgttggagatattgctcaagtgaaatatggtgatcttcttccagctgacggcatacttattcaaggcaacgatcttaaaattgatgaaagctcattgactggtgaatcagatcatgttaaaaagtctttagataaggatcccttacttctatcaggtactcatgtaatggaaggctctggaagaatggtagttacagctgtaggtgtaaattctcaaactggaattatctttaccttacttggagctggaggtgaagaggaagagaagaaagatgagaagaaaaaggaaaagaaaaataagaaacaagatggagctattgagaatcgcaacaaagcaaaagcccaggatggtgcagccatggaaatgcagccattgaagagtgaagaaggtggagatggtgatgaaaaagataaaaagaaagcaaatttgccaaaaaaggaaaaatctgttttacaagggaaacttacaaaactggctgttcagattggcaaagcaggtctgttgatgtctgccatcacagttatcattctagtattatattttgtcattgacaccttctgggttcagaaaagaccatggcttgctgagtgcacaccaatttatatacaatactttgtgaagttcttcattattggagttacagttttagtggtcgcagtgccagaaggtcttccacttgcagtcacgatctcactggcttattcagtcaaaaaaatgatgaaagataataacttagtaaggcatctggatgcttgtgaaaccatgggaaatgctacagctatttgttcagataaaacaggaactttgacaatgaacagaatgacagtcgttcaagcttacataaatgaaaaacattataaaaaggttcctgaaccagaagctattccaccaaatattttgtcctatcttgtaacaggaatttctgtgaattgtgcttatacatcaaaaatattgccaccagagaaagagggtggattacctcgtcacgttggtaataaaactgaatgtgccttgttgggacttcttttggatttaaaacgggattatcaggatgttagaaatgaaataccagaagaagcactgtacaaagtctacaccttcaattctgttaggaagtccatgagtactgtcctgaaaaattcagatggaagttatcgaatattcagcaagggtgcatctgagataattctgaaaaagtgtttcaaaatcttgagtgctaatggtgaggcaaaagtattcagaccaagggaccgtgatgatattgtaaaaactgtgattgaaccgatggcatcagaaggcttgagaaccatatgtcttgcattcagagattttccagcaggagaaccagaaccagagtgggataatgaaaatgatattgtcaccggccttacatgcattgctgttgtggggattgaagatcctgtgagacctgaggtgccagatgcaattaaaaagtgtcagagggctggaattactgtgcggatggtcactggtgataatattaatactgctcgggccattgctaccaaatgtggtattttacatcctggggaagattttctgtgcctagaaggtaaagattttaacagaagaatacgaaatgaaaaaggagagattgagcaagagaggatagacaagatttggccaaaacttcgagtacttgcaagatcatctcctactgataagcatacactggttaaaggtataattgacagcactgtctcagaccaacgccaggttgtagctgtaactggtgatggtacaaatgatggcccagcactaaagaaagcagatgttggatttgcaatgggtattgctggaactgatgtagctaaagaagcatccgatattattctcacagatgacaactttacaagcattgttaaagcagttatgtggggacgaaatgtctatgacagcatctcaaaattccttcagttccaacttactgttaatgtagtagcagtgattgttgcttttacgggcgcctgcattactcaagactcaccgcttaaggctgtgcagatgctgtgggtaaacctcataatggatacactcgcttccctggctctggcaacggaaccacccactgagtctctcttgcttcggaaaccttatggtagaaataagcctctcatctcacgtacaatgatgaagaatattttgggtcatgcattctatcaacttgtagtagtctttacactcttatttgctggagaaaagttttttgacattgatagtggaagaaatgctcctttgcatgctcctccttcagaacattatactattgtttttaatacctttgtgctgatgcaacttttcaacgaaataaatgcccggaaaattcatggtgaaagaaatgtattcgaaggaatctttaacaatgccatcttctgcacaattgttttaggcacttttgtggtacagataataattgtgcagtttggtggaaaacctttcagttgttcagaactttcaatagaacagtggctatggtcaatattcctaggaatgggaacattactctggggccagcttatttcaacaattccaactagccgtttaaaattcctcaaagaagctggtcatggaacacaaaaggaagaaatacctgaggaggaattagcagaggatgttgaagagattgatcacgctgaaagggagttgcggcgtggccaaatcttgtggtttagaggtctgaacagaatccaaacacagattcgagtggtgaatgcatttcgtagttctttatatgaagggttagaaaaaccggaatcaagaagttcgattcacaactttatgacacatcctgagtttaggatagaagattcagagcctcatatcccccttattgatgacactgatgccgaagatgatgctcctacaaaacgtaactccagtcctccaccctctcccaacaaaaataacaatgctgttgacagtggaattcaccttacaatagaaatgaacaagtctgctacctcttcatccccaggaagcccactacatagtttggaaacatcactctgattgtaagctgaatgttaacacactagctgcattgtaaagaaacaaattgaaactgggtcttttcacatattgtgatggacaagctagtattcttgtctttggacttcaacagaagacacacttgtacgaatgtagatttatttttttaaaaaaaaaaaagcaaagctttctgccagactgagggtgctttttggggggtgggagaaatgaactgacagataaacagtaactcagcgtaagtgacctgtggatcatcagtagtacccaagcatggtcctgaacagtgtattagcagagctttagtttatctcagtcctggatgggagagagagggaggagtaaaactgggcaagacaaagagccctggatcgttgaattgatagtttaatttctgctgttggctgttaataatttggattatttatgtttataaatgatacagatctgtttacaaggtttgtagatactttttttgttcctgttcatagatgggaagcttccttataactgatgcagagaaaaattagtccttcaaatactgctgtattttcaggaaaaaaaaaaaaaggggtgtttctattgaaactgtactaaatttttgcctacaatttaccttgttaaatattgtagataaattgctaatactaatagccaaatagataacactaatgctttgtttaaaaaaacgaaaaaaacaaaacaaaacaaaaaaacatgagcagtggtgttctaatgaagttatgacatctgtcctaattagtttcttaaatacatttactacttaatggttttgaagcaactgtttaatttttaaaatttttgaaaacttgctaataaccttttgttcagaatttagtagattgtttaatgcaggacatcaactacataatgaaagatgcttgaaatgcttttgttatttcaggcaaatcaaattaaatcagactatcaaactacaagagaaccttagtcttttttgtttttgtctaaacatgttagtttagtgatgtcttggtgaactgtgagtgaactgtattgatttttctaatctttagagaccttcacacagcatgagggctgttggcattttgaaaaaggttaataagtagaagcatacatgttttccttttgtttttgaaacttgtttgtaaacataaataaatatgcccttttattaaataaattcatggcaatgtttttttaaaagacatttcagcttctttactcagttctgcatatacagtgcatcagtctgttctctttgaccacaattggaatacatttcaagatggtaacagccccatgaagtaccgctttaattccttgctggtaatctaatagaatcagattaagaaaattaacacaattttaccatttgacatactcttcattgaatttagtttgtctaaaatagtctcacaggtaaaaaacataacaacaatgaccaccattgtctttgatacatttattttaattcttaagtggccaaataacagattaggtaaaatgagattacatgaaaaggttctaaaatgatatatttagatgcaataattaaccatatgctagaatgcccacctctaagccaattggattctttagctctctttttctttccttcatctaccttcttctcttttttgcctctgtctttaccctttagaaactggcatgtgttagggcccagatttcaccagatacacaatcctcaggctgacataaagtttacgaggactgctactataactgagagtgctgaccaagcaaagaaacatttagttgatggtgcttgatatttttggtgggtgggggaaatctttttctcaccatcaaatctttgcagtaatcctctgcaggtcttagaaacacattggctctgtcagcatttgtaattgtacatttattcatcaggtatttatagtgaatcatactgtaaaaaagaggtagcatgatatgctggaaagcatattagactaggagtcaagacctggtttctagtcttggttttgccattaatgtgctgcatgatcttgggaaaatcatttaccctaaataagggtggtggactatcttgaagaaccctttcaactctaaaaattgaccctatcaactggagagcccacaaggcatagggaatagagaaaagggaaatgttttcagttttcttttttattttggttatgcttaaatatgaatgtaattaccaaaagatttagaagtgcatgtgctttggaggatttgtattgagcttttacagtattcatttttcaactcaaggcaatggctttctacaccaactctaatccataaacgggtcttatgacatctatgaagtagtagcaagacatgcttagtgtgtatttctctctttgagacactgtaatttctaccagaaatttccagagcattatgtaggtagaaaaaaatgcaagcaagctgttaaagatcttggatcccattatatagtatgtatagctgaaatctgtaattcaatcactttttctcttttatcctctaaccaaaaaattgtttaattttgcatcccaaatgtttttaatctttgtatattttttaaaaatccttttctcctcatcattgccttttttgtggttgtaaatagacttacttgcactttgaagatgagttactccttgtcatcttacaaatatgtgatatggtaattttcataacagatgtcagttttgaaccaagaattggtgatttgtttataagaaaaaaactggcttcatttctgtgaaattgctctttgaaaatttctttttacacgtgtaagccaactgagataccgtgatggtgttgatttctttcaatgatgcttaccatctattttagccactgagccttttattatttgtctatttgtaaagtttatttgtcttaactcatttaataaatatactgtttatctgtttctgaaaaaaaaaaaaaaaaaaaaaaaaaaaacactctgtgggggcgcgcgcttgggccttggaaaaaactttctaaacccttcgcgggggggcggcggggccccaagtggttcagggaactgtggccaaaagcgctggtcccaaggagagacccggggacaagcgacaagggcgcggggtttcccacccaaaaaaaaaagcgcgggggggcgaacccggggggtcgcggaaacatacccagagagggggctccgagagggccaagacggggccctccacaacggggagccccaggagacgcggaaataaaatacgcggccgcgcggcgggcgn

SEQ ID NO: 433439 - DNA, 4839 bp, Homo sapiens
cggatgtgtatatctcatgattgatatggagaaactagtcatgggccaaaggtcaagatacttctctgggaaatgttgctgctgatgctgctttacaaagtcatacaatgagtgtttggtttaagaaagattttcatacttaaaagattttcatcttggaaatacatcaagtgaaaattaaattcttttgggaaacattttccttctgatatattatacttgtaatgggcgacatggcaaacaactcagttgcttacagtggtgtgaaaaactctttgaaggaagctaatcatgatggagactttggaattacgctcgcagagctgcgggctctcatggagctcaggtccacagatgcattacgaaaaatacaggaaagctatggagatgtctatggaatttgcaccaaattgaaaacatctcccaatgaaggtttaagtggaaaccctgcagatttagaaagaagagaagcagtgtttggaaagaattttatacctcctaaaaagccaaaaacctttcttcaattagtatgggaagcattacaagatgtcactttaattatattagaaattgcagccatagtatcattgggcctttctttttatcagcctccagaaggggataatgcactttgtggagaagtttctgttggggaggaagaaggtgaaggtgaaactggttggattgaaggagctgcaatcctcttgtctgtagtgtgtgtggtgttagtaacagctttcaatgactggagtaaggaaaaacagtttagaggtttgcagagccgaattgaacaagaacagaagttcactgtcatcaggggtggtcaggtcattcagatacctgtagctgacattactgttggagatattgctcaagtgaaatatggtgatcttcttccagctgacggcatacttattcaaggcaacgatcttaaaattgatgaaagctcattgactggtgaatcagatcatgttaaaaagtctttagataaggatcccttacttctatcaggtactcatgtaatggaaggctctggaagaatggtagttacagctgtaggtgtaaattctcaaactggaattatctttaccttacttggagctggaggtgaagaggaagagaagaaagatgagaagaaaaaggaaaagaaaaataagaaacaagatggagctattgagaatcgcaacaaagcaaaagcccaggatggtgcagccatggaaatgcagccattgaagagtgaagaaggtggagatggtgatgaaaaagataaaaagaaagcaaatttgccaaaaaaggaaaaatctgttttacaagggaaacttacaaaactggctgttcagattggcaaagcaggtctgttgatgtctgccatcacagttatcattctagtattatattttgtcattgacaccttctgggttcagaaaagaccatggcttgctgagtgcacaccaatttatatacaatactttgtgaagttcttcattattggagttacagttttagtggtcgcagtgccagaaggtcttccacttgcagtcacgatctcactggcttattcagtcaaaaaaatgatgaaagataataacttagtaaggcatctggatgcttgtgaaaccatgggaaatgctacagctatttgttcagataaaacaggaactttgacaatgaacagaatgacagtcgttcaagcttacataaatgaaaaacattataaaaaggttcctgaaccagaagctattccaccaaatattttgtcctatcttgtaacaggaatttctgtgaattgtgcttatacatcaaaaatattgccaccagagaaagagggtggattacctcgtcacgttggtaataaaactgaatgtgccttgttgggacttcttttggatttaaaacgggattatcaggatgttagaaatgaaataccagaagaagcactgtacaaagtctacaccttcaattctgttaggaagtccatgagtactgtcctgaaaaattcagatggaagttatcgaatattcagcaagggtgcatctgagataattctgaaaaagtgtttcaaaatcttgagtgctaatggtgaggcaaaagtattcagaccaagggaccgtgatgatattgtaaaaactgtgattgaaccgatggcatcagaaggcttgagaaccatatgtcttgcattcagagattttccagcaggagaaccagaaccagagtgggataatgaaaatgatattgtcaccggccttacatgcattgctgttgtggggattgaagatcctgtgagacctgaggtgccagatgcaattaaaaagtgtcagagggctggaattactgtgcggatggtcactggtgataatattaatactgctcgggccattgctaccaaatgtggtattttacatcctggggaagattttctgtgcctagaaggtaaagattttaacagaagaatacgaaatgaaaaaggagagattgagcaagagaggatagacaagatttggccaaaacttcgagtacttgcaagatcatctcctactgataagcatacactggttaaaggtataattgacagcactgtctcagaccaacgccaggttgtagctgtaactggtgatggtacaaatgatggcccagcactaaagaaagcagatgttggatttgcaatgggtattgctggaactgatgtagctaaagaagcatccgatattattctcacagatgacaactttacaagcattgttaaagcagttatgtggggacgaaatgtctatgacagcatctcaaaattccttcagttccaacttactgttaatgtagtagcagtgattgttgcttttacgggcgcctgcattactcaagactcaccgcttaaggctgtgcagatgctgtgggtaaacctcataatggatacactcgcttccctggctctggcaacggaaccacccactgagtctctcttgcttcggaaaccttatggtagaaataagcctctcatctcacgtacaatgatgaagaatattttgggtcatgcattctatcaacttgtagtagtctttacactcttatttgctggagaaaagttttttgacattgatagtggaagaaatgctcctttgcatgctcctccttcagaacattatactattgtttttaatacctttgtgctgatgcaacttttcaacgaaataaatgcccggaaaattcatggtgaaagaaatgtattcgaaggaatctttaacaatgccatcttctgcacaattgttttaggcacttttgtggtacagataataattgtgcagtttggtggaaaacctttcagttgttcagaactttcaatagaacagtggctatggtcaatattcctaggaatgggaacattactctggggccagcttatttcaacaattccaactagccgtttaaaattcctcaaagaagctggtcatggaacacaaaaggaagaaatacctgaggaggaattagcagaggatgttgaagagattgatcacgctgaaagggagttgcggcgtggccaaatcttgtggtttagaggtctgaacagaatccaaacacagattcgagtggtgaatgcatttcgtagttctttatatgaagggttagaaaaaccggaatcaagaagttcgattcacaactttatgacacatcctgagtttaggatagaagattcagagcctcatatcccccttattgatgacactgatgccgaagatgatgctcctacaaaacgtaactccagtcctccaccctctcccaacaaaaataacaatgctgttgacagtggaattcaccttacaatagaaatgaacaagtctgctacctcttcatccccaggaagcccactacatagtttggaaacatcactctgattgtaagctgaatgttaacacactagctgcattgtaaagaaacaaattgaaactgggtcttttcacatattgtgatggacaagctagtattcttgtctttggacttcaacagaagacacacttgtacgaatgtagatttatttttttaaaaaaaaaaaagcaaagctttctgccagactgagggtgctttttggggggtgggagaaatgaactgacagataaacagtaactcagcgtaagtgacctgtggatcatcagtagtacccaagcatggtcctgaacagtgtattagcagagctttagtttatctcagtcctggatgggagagagagggaggagtaaaactgggcaagacaaagagccctggatcgttgaattgatagtttaatttctgctgttggctgttaataatttggattatttatgtttataaatgatacagatctgtttacaaggtttgtagatactttttttgttcctgttcatagatgggaagcttccttataactgatgcagagaaaaattagtccttcaaatactgctgtattttcaggaaaaaaaaaaaaaggggtgtttctattgaaactgtactaaatttttgcctacaatttaccttgttaaatattgtagataaattgctaatactaatagccaaatagataacactaatgctttgtttaaaaaaacgaaaaaaacaaaacaaaacaaaaaaacatgagcagtggtgttctaatgaagttatgacatctgtcctaattagtttcttaaatacatttactacttaatggttttgaagcaactgtttaatttttaaaatttttgaaaacttgctaataaccttttgttcagaatttagtagattgtttaatgcaggacatcaactacataatgaaagatgcttgaaatgcttttgttatttcaggcaaatcaaattaaatcagactatcaaact

SEQ ID NO: 433440 - DNA, 4567 bp, Homo sapiens
cggatgtgtatatctcatgattgatatggagaaactagtcatgggccaaaggtcaagatacttctctgggaaatgttgctgctgatgctgctttacaaagtcatacaatgagtgtttggtttaagaaagattttcatacttaaaagattttcatcttggaaatacatcaagtgaaaattaaattcttttgggaaacattttccttctgatatattatacttgtaatgggcgacatggcaaacaactcagttgcttacagtggtgtgaaaaactctttgaaggaagctaatcatgatggagactttggaattacgctcgcagagctgcgggctctcatggagctcaggtccacagatgcattacgaaaaatacaggaaagctatggagatgtctatggaatttgcaccaaattgaaaacatctcccaatgaaggtttaagtggaaaccctgcagatttagaaagaagagaagcagtgtttggaaagaattttatacctcctaaaaagccaaaaacctttcttcaattagtatgggaagcattacaagatgtcactttaattatattagaaattgcagccatagtatcattgggcctttctttttatcagcctccagaaggggataatgcactttgtggagaagtttctgttggggaggaagaaggtgaaggtgaaactggttggattgaaggagctgcaatcctcttgtctgtagtgtgtgtggtgttagtaacagctttcaatgactggagtaaggaaaaacagtttagaggtttgcagagccgaattgaacaagaacagaagttcactgtcatcaggggtggtcaggtcattcagatacctgtagctgacattactgttggagatattgctcaagtgaaatatggtgatcttcttccagctgacggcatacttattcaaggcaacgatcttaaaattgatgaaagctcattgactggtgaatcagatcatgttaaaaagtctttagataaggatcccttacttctatcaggtactcatgtaatggaaggctctggaagaatggtagttacagctgtaggtgtaaattctcaaactggaattatctttaccttacttggagctggaggtgaagaggaagagaagaaagatgagaagaaaaaggaaaagaaaaataagaaacaagatggagctattgagaatcgcaacaaagcaaaagcccaggatggtgcagccatggaaatgcagccattgaagagtgaagaaggtggagatggtgatgaaaaagataaaaagaaagcaaatttgccaaaaaaggaaaaatctgttttacaagggaaacttacaaaactggctgttcagattggcaaagcaggtctgttgatgtctgccatcacagttatcattctagtattatattttgtcattgacaccttctgggttcagaaaagaccatggcttgctgagtgcacaccaatttatatacaatactttgtgaagttcttcattattggagttacagttttagtggtcgcagtgccagaaggtcttccacttgcagtcacgatctcactggcttattcagtcaaaaaaatgatgaaagataataacttagtaaggcatctggatgcttgtgaaaccatgggaaatgctacagctatttgttcagataaaacaggaactttgacaatgaacagaatgacagtcgttcaagcttacataaatgaaaaacattataaaaaggttcctgaaccagaagctattccaccaaatattttgtcctatcttgtaacaggaatttctgtgaattgtgcttatacatcaaaaatattgccaccagagaaagagggtggattacctcgtcacgttggtaataaaactgaatgtgccttgttgggacttcttttggatttaaaacgggattatcaggatgttagaaatgaaataccagaagaagcactgtacaaagtctacaccttcaattctgttaggaagtccatgagtactgtcctgaaaaattcagatggaagttatcgaatattcagcaagggtgcatctgagataattctgaaaaagtgtttcaaaatcttgagtgctaatggtgaggcaaaagtattcagaccaagggaccgtgatgatattgtaaaaactgtgattgaaccgatggcatcagaaggcttgagaaccatatgtcttgcattcagagattttccagcaggagaaccagaaccagagtgggataatgaaaatgatattgtcaccggccttacatgcattgctgttgtggggattgaagatcctgtgagacctgaggtgccagatgcaattaaaaagtgtcagagggctggaattactgtgcggatggtcactggtgataatattaatactgctcgggccattgctaccaaatgtggtattttacatcctggggaagattttctgtgcctagaaggtaaagattttaacagaagaatacgaaatgaaaaaggagagattgagcaagagaggatagacaagatttggccaaaacttcgagtacttgcaagatcatctcctactgataagcatacactggttaaaggtataattgacagcactgtctcagaccaacgccaggttgtagctgtaactggtgatggtacaaatgatggcccagcactaaagaaagcagatgttggatttgcaatgggtattgctggaactgatgtagctaaagaagcatccgatattattctcacagatgacaactttacaagcattgttaaagcagttatgtggggacgaaatgtctatgacagcatctcaaaattccttcagttccaacttactgttaatgtagtagcagtgattgttgcttttacgggcgcctgcattactcaagactcaccgcttaaggctgtgcagatgctgtgggtaaacctcataatggatacactcgcttccctggctctggcaacggaaccacccactgagtctctcttgcttcggaaaccttatggtagaaataagcctctcatctcacgtacaatgatgaagaatattttgggtcatgcattctatcaacttgtagtagtctttacactcttatttgctggagaaaagttttttgacattgatagtggaagaaatgctcctttgcatgctcctccttcagaacattatactattgtttttaatacctttgtgctgatgcaacttttcaacgaaataaatgcccggaaaattcatggtgaaagaaatgtattcgaaggaatctttaacaatgccatcttctgcacaattgttttaggcacttttgtggtacagataataattgtgcagtttggtggaaaacctttcagttgttcagaactttcaatagaacagtggctatggtcaatattcctaggaatgggaacattactctggggccagcttatttcaacaattccaactagccgtttaaaattcctcaaagaagctggtcatggaacacaaaaggaagaaatacctgaggaggaattagcagaggatgttgaagagattgatcacgctgaaagggagttgcggcgtggccaaatcttgtggtttagaggtctgaacagaatccaaacacagattcgagtggtgaatgcatttcgtagttctttatatgaagggttagaaaaaccggaatcaagaagttcgattcacaactttatgacacatcctgagtttaggatagaagattcagagcctcatatcccccttattgatgacactgatgccgaagatgatgctcctacaaaacgtaactccagtcctccaccctctcccaacaaaaataacaatgctgttgacagtggaattcaccttacaatagaaatgaacaagtctgctacctcttcatccccaggaagcccactacatagtttggaaacatcactctgattgtaagctgaatgttaacacactagctgcattgtaaagaaacaaattgaaactgggtcttttcacatattgtgatggacaagctagtattcttgtctttggacttcaacagaagacacacttgtacgaatgtagatttatttttttaaaaaaaaaaaagcaaagctttctgccagactgagggtgctttttggggggtgggagaaatgaactgacagataaacagtaactcagcgtaagtgacctgtggatcatcagtagtacccaagcatggtcctgaacagtgtattagcagagctttagtttatctcagtcctggatgggagagagagggaggagtaaaactgggcaagacaaagagccctggatcgttgaattgatagtttaatttctgctgttggctgttaataatttggattatttatgtttataaatgatacagatctgtttacaaggtttgtagatactttttttgttcctgttcatagatgggaagcttccttataactgatgcagagaaaaattagtccttcaaatactgctgtattttcaggaaaaaaaaaaaaaggggtgtttctattgaaactgtactaaatttttgcctacaatttaccttgttaaatattgtagataaattgctaatactaatagccaaatagataacactaatgctttgttta

SEQ ID NO: 433441 - DNA, 5957 bp, Homo sapiens
taaagactttttaacatgatctgattcaccagtcaatgagctttcatcaattttaagatcgttgccttgaataagtatgccgtcagctggaagaagatcaccatatttcacttgagcaatatctccaacagtaatgtcagctacaggtactcatgtaatggaaggctctggaagaatggtagttacagctgtaggtgtaaattctcaaactggaattatctttaccttacttggagctggaggtgaagaggaagagaagaaagatgagaagaaaaaggaaaagaaaaataagaaacaagatggagctattgagaatcgcaacaaagcaaaagcccaggatggtgcagccatggaaatgcagccattgaagagtgaagaaggtggagatggtgatgaaaaagataaaaagaaagcaaatttgccaaaaaaggaaaaatctgttttacaagggaaacttacaaaactggctgttcagattggcaaagcaggtctgttgatgtctgccatcacagttatcattctagtattatattttgtcattgacaccttctgggttcagaaaagaccatggcttgctgagtgcacaccaatttatatacaatactttgtgaagttcttcattattggagttacagttttagtggtcgcagtgccagaaggtcttccacttgcagtcacgatctcactggcttattcagtcaaaaaaatgatgaaagataataacttagtaaggcatctggatgcttgtgaaaccatgggaaatgctacagctatttgttcagataaaacaggaactttgacaatgaacagaatgacagtcgttcaagcttacataaatgaaaaacattataaaaaggttcctgaaccagaagctattccaccaaatattttgtcctatcttgtaacaggaatttctgtgaattgtgcttatacatcaaaaatattgccaccagagaaagagggtggattacctcgtcacgttggtaataaaactgaatgtgccttgttgggacttcttttggatttaaaacgggattatcaggatgttagaaatgaaataccagaagaagcactgtacaaagtctacaccttcaattctgttaggaagtccatgagtactgtcctgaaaaattcagatggaagttatcgaatattcagcaagggtgcatctgagataattctgaaaaagtgtttcaaaatcttgagtgctaatggtgaggcaaaagtattcagaccaagggaccgtgatgatattgtaaaaactgtgattgaaccgatggcatcagaaggcttgagaaccatatgtcttgcattcagagattttccagcaggagaaccagaaccagagtgggataatgaaaatgatattgtcaccggccttacatgcattgctgttgtggggattgaagatcctgtgagacctgaggtgccagatgcaattaaaaagtgtcagagggctggaattactgtgcggatggtcactggtgataatattaatactgctcgggccattgctaccaaatgtggtattttacatcctggggaagattttctgtgcctagaaggtaaagattttaacagaagaatacgaaatgaaaaaggagagattgagcaagagaggatagacaagatttggccaaaacttcgagtacttgcaagatcatctcctactgataagcatacactggttaaaggtataattgacagcactgtctcagaccaacgccaggttgtagctgtaactggtgatggtacaaatgatggcccagcactaaagaaagcagatgttggatttgcaatgggtattgctggaactgatgtagctaaagaagcatccgatattattctcacagatgacaactttacaagcattgttaaagcagttatgtggggacgaaatgtctatgacagcatctcaaaattccttcagttccaacttactgttaatgtagtagcagtgattgttgcttttacgggcgcctgcattactcaagactcaccgcttaaggctgtgcagatgctgtgggtaaacctcataatggatacactcgcttccctggctctggcaacggaaccacccactgagtctctcttgcttcggaaaccttatggtagaaataagcctctcatctcacgtacaatgatgaagaatattttgggtcatgcattctatcaacttgtagtagtctttacactcttatttgctggagaaaagttttttgacattgatagtggaagaaatgctcctttgcatgctcctccttcagaacattatactattgtttttaatacctttgtgctgatgcaacttttcaacgaaataaatgcccggaaaattcatggtgaaagaaatgtattcgaaggaatctttaacaatgccatcttctgcacaattgttttaggcacttttgtggtacagataataattgtgcagtttggtggaaaacctttcagttgttcagaactttcaatagaacagtggctatggtcaatattcctaggaatgggaacattactctggggccagcttatttcaacaattccaactagccgtttaaaattcctcaaagaagctggtcatggaacacaaaaggaagaaatacctgaggaggaattagcagaggatgttgaagagattgatcacgctgaaagggagttgcggcgtggccaaatcttgtggtttagaggtctgaacagaatccaaacacagattcgagtggtgaatgcatttcgtagttctttatatgaagggttagaaaaaccggaatcaagaagttcgattcacaactttatgacacatcctgagtttaggatagaagattcagagcctcatatcccccttattgatgacactgatgccgaagatgatgctcctacaaaacgtaactccagtcctccaccctctcccaacaaaaataacaatgctgttgacagtggaattcaccttacaatagaaatgaacaagtctgctacctcttcatccccaggaagcccactacatagtttggaaacatcactctgattgtaagctgaatgttaacacactagctgcattgtaaagaaacaaattgaaactgggtcttttcacatattgtgatggacaagctagtattcttgtctttggacttcaacagaagacacacttgtacgaatgtagatttatttttttaaaaaaaaaaaagcaaagctttctgccagactgagggtgctttttggggggtgggagaaatgaactgacagataaacagtaactcagcgtaagtgacctgtggatcatcagtagtacccaagcatggtcctgaacagtgtattagcagagctttagtttatctcagtcctggatgggagagagagggaggagtaaaactgggcaagacaaagagccctggatcgttgaattgatagtttaatttctgctgttggctgttaataatttggattatttatgtttataaatgatacagatctgtttacaaggtttgtagatactttttttgttcctgttcatagatgggaagcttccttataactgatgcagagaaaaattagtccttcaaatactgctgtattttcaggaaaaaaaaaaaaaggggtgtttctattgaaactgtactaaatttttgcctacaatttaccttgttaaatattgtagataaattgctaatactaatagccaaatagataacactaatgctttgtttaaaaaaacgaaaaaaacaaaacaaaacaaaaaaacatgagcagtggtgttctaatgaagttatgacatctgtcctaattagtttcttaaatacatttactacttaatggttttgaagcaactgtttaatttttaaaatttttgaaaacttgctaataaccttttgttcagaatttagtagattgtttaatgcaggacatcaactacataatgaaagatgcttgaaatgcttttgttatttcaggcaaatcaaattaaatcagactatcaaactacaagagaaccttagtcttttttgtttttgtctaaacatgttagtttagtgatgtcttggtgaactgtgagtgaactgtattgatttttctaatctttagagaccttcacacagcatgagggctgttggcattttgaaaaaggttaataagtagaagcatacatgttttccttttgtttttgaaacttgtttgtaaacataaataaatatgcccttttattaaataaattcatggcaatgtttttttaaaagacatttcagcttctttactcagttctgcatatacagtgcatcagtctgttctctttgaccacaattggaatacatttcaagatggtaacagccccatgaagtaccgctttaattccttgctggtaatctaatagaatcagattaagaaaattaacacaattttaccatttgacatactcttcattgaatttagtttgtctaaaatagtctcacaggtaaaaaacataacaacaatgaccaccattgtctttgatacatttattttaattcttaagtggccaaataacagattaggtaaaatgagattacatgaaaaggttctaaaatgatatatttagatgcaataattaaccatatgctagaatgcccacctctaagccaattggattctttagctctctttttctttccttcatctaccttcttctcttttttgcctctgtctttaccctttagaaactggcatgtgttagggcccagatttcaccagatacacaatcctcaggctgacataaagtttacgaggactgctactataactgagagtgctgaccaagcaaagaaacatttagttgatggtgcttgatatttttggtgggtgggggaaatctttttctcaccatcaaatctttgcagtaatcctctgcaggtcttagaaacacattggctctgtcagcatttgtaattgtacatttattcatcaggtatttatagtgaatcatactgtaaaaaagaggtagcatgatatgctggaaagcatattagactaggagtcaagacctggtttctagtcttggttttgccattaatgtgctgcatgatcttgggaaaatcatttaccctaaataagggtggtggactatcttgaagaaccctttcaactctaaaaattgaccctatcaactggagagcccacaaggcatagggaatagagaaaagggaaatgttttcagttttcttttttattttggttatgcttaaatatgaatgtaattaccaaaagatttagaagtgcatgtgctttggaggatttgtattgagcttttacagtattcatttttcaactcaaggcaatggctttctacaccaactctaatccataaacgggtcttatgacatctatgaagtagtagcaagacatgcttagtgtgtatttctctctttgagacactgtaatttctaccagaaatttccagagcattatgtaggtagaaaaaaatgcaagcaagctgttaaagatcttggatcccattatatagtatgtatagctgaaatctgtaattcaatcactttttctcttttatcctctaaccaaaaaattgtttaattttgcatcccaaatgtttttaatctttgtatattttttaaaaatccttttctcctcatcattgccttttttgtggttgtaaatagacttacttgcactttgaagatgagttactccttgtcatcttacaaatatgtgatatggtaattttcataacagatgtcagttttgaaccaagaattggtgatttgtttataagaaaaaaactggcttcatttctgtgaaattgctctttgaaaatttctttttacacgtgtaagccaactgagataccgtgatggtgttgatttctttcaatgatgcttaccatctattttagccactgagccttttattatttgtctatttgtaaagtttatttgtcttaactcatttaataaatatactgtttatctgtttctgaa

SEQ ID NO: 433442 - DNA, 6714 bp, Homo sapiens
cggatgtgtatatctcatgattgatatggagaaactagtcatgggccaaaggtcaagatacttctctgggaaatgttgctgctgatgctgctttacaaagtcatacaatgagtgtttggtttaagaaagattttcatacttaaaagattttcatcttggaaatacatcaagtgaaaattaaattcttttgggaaacattttccttctgatatattatacttgtaatgggcgacatggcaaacaactcagttgcttacagtggtgtgaaaaactctttgaaggaagctaatcatgatggagactttggaattacgctcgcagagctgcgggctctcatggagctcaggtccacagatgcattacgaaaaatacaggaaagctatggagatgtctatggaatttgcaccaaattgaaaacatctcccaatgaaggtttaagtggaaaccctgcagatttagaaagaagagaagcagtgtttggaaagaattttatacctcctaaaaagccaaaaacctttcttcaattagtatgggaagcattacaagatgtcactttaattatattagaaattgcagccatagtatcattgggcctttctttttatcagcctccagaaggggataatgcactttgtggagaagtttctgttggggaggaagaaggtgaaggtgaaactggttggattgaaggagctgcaatcctcttgtctgtagtgtgtgtggtgttagtaacagctttcaatgactggagtaaggaaaaacagtttagaggtttgcagagccgaattgaacaagaacagaagttcactgtcatcaggggtggtcaggtcattcagatacctgtagctgacattactgttggagatattgctcaagtgaaatatggtgatcttcttccagctgacggcatacttattcaaggcaacgatcttaaaattgatgaaagctcattgactggtgaatcagatcatgttaaaaagtctttagataaggatcccttacttctatcaggtactcatgtaatggaaggctctggaagaatggtagttacagctgtaggtgtaaattctcaaactggaattatctttaccttacttggagctggaggtgaagaggaagagaagaaagatgagaagaaaaaggaaaagaaaaataagaaacaagatggagctattgagaatcgcaacaaagcaaaagcccaggatggtgcagccatggaaatgcagccattgaagagtgaagaaggtggagatggtgatgaaaaagataaaaagaaagcaaatttgccaaaaaaggaaaaatctgttttacaagggaaacttacaaaactggctgttcagattggcaaagcaggtctgttgatgtctgccatcacagttatcattctagtattatattttgtcattgacaccttctgggttcagaaaagaccatggcttgctgagtgcacaccaatttatatacaatactttgtgaagttcttcattattggagttacagttttagtggtcgcagtgccagaaggtcttccacttgcagtcacgatctcactggcttattcagtcaaaaaaatgatgaaagataataacttagtaaggcatctggatgcttgtgaaaccatgggaaatgctacagctatttgttcagataaaacaggaactttgacaatgaacagaatgacagtcgttcaagcttacataaatgaaaaacattataaaaaggttcctgaaccagaagctattccaccaaatattttgtcctatcttgtaacaggaatttctgtgaattgtgcttatacatcaaaaatattgccaccagagaaagagggtggattacctcgtcacgttggtaataaaactgaatgtgccttgttgggacttcttttggatttaaaacgggattatcaggatgttagaaatgaaataccagaagaagcactgtacaaagtctacaccttcaattctgttaggaagtccatgagtactgtcctgaaaaattcagatggaagttatcgaatattcagcaagggtgcatctgagataattctgaaaaagtgtttcaaaatcttgagtgctaatggtgaggcaaaagtattcagaccaagggaccgtgatgatattgtaaaaactgtgattgaaccgatggcatcagaaggcttgagaaccatatgtcttgcattcagagattttccagcaggagaaccagaaccagagtgggataatgaaaatgatattgtcaccggccttacatgcattgctgttgtggggattgaagatcctgtgagacctgaggtgccagatgcaattaaaaagtgtcagagggctggaattactgtgcggatggtcactggtgataatattaatactgctcgggccattgctaccaaatgtggtattttacatcctggggaagattttctgtgcctagaaggtaaagattttaacagaagaatacgaaatgaaaaaggagagattgagcaagagaggatagacaagatttggccaaaacttcgagtacttgcaagatcatctcctactgataagcatacactggttaaaggtataattgacagcactgtctcagaccaacgccaggttgtagctgtaactggtgatggtacaaatgatggcccagcactaaagaaagcagatgttggatttgcaatgggtattgctggaactgatgtagctaaagaagcatccgatattattctcacagatgacaactttacaagcattgttaaagcagttatgtggggacgaaatgtctatgacagcatctcaaaattccttcagttccaacttactgttaatgtagtagcagtgattgttgcttttacgggcgcctgcattactcaagactcaccgcttaaggctgtgcagatgctgtgggtaaacctcataatggatacactcgcttccctggctctggcaacggaaccacccactgagtctctcttgcttcggaaaccttatggtagaaataagcctctcatctcacgtacaatgatgaagaatattttgggtcatgcattctatcaacttgtagtagtctttacactcttatttgctggagaaaagttttttgacattgatagtggaagaaatgctcctttgcatgctcctccttcagaacattatactattgtttttaatacctttgtgctgatgcaacttttcaacgaaataaatgcccggaaaattcatggtgaaagaaatgtattcgaaggaatctttaacaatgccatcttctgcacaattgttttaggcacttttgtggtacagcttatttcaacaattccaactagccgtttaaaattcctcaaagaagctggtcatggaacacaaaaggaagaaatacctgaggaggaattagcagaggatgttgaagagattgatcacgctgaaagggagttgcggcgtggccaaatcttgtggtttagaggtctgaacagaatccaaacacagattcgagtggtgaatgcatttcgtagttctttatatgaagggttagaaaaaccggaatcaagaagttcgattcacaactttatgacacatcctgagtttaggatagaagattcagagcctcatatcccccttattgatgacactgatgccgaagatgatgctcctacaaaacgtaactccagtcctccaccctctcccaacaaaaataacaatgctgttgacagtggaattcaccttacaatagaaatgaacaagtctgctacctcttcatccccaggaagcccactacatagtttggaaacatcactctgattgtaagctgaatgttaacacactagctgcattgtaaagaaacaaattgaaactgggtcttttcacatattgtgatggacaagctagtattcttgtctttggacttcaacagaagacacacttgtacgaatgtagatttatttttttaaaaaaaaaaaagcaaagctttctgccagactgagggtgctttttggggggtgggagaaatgaactgacagataaacagtaactcagcgtaagtgacctgtggatcatcagtagtacccaagcatggtcctgaacagtgtattagcagagctttagtttatctcagtcctggatgggagagagagggaggagtaaaactgggcaagacaaagagccctggatcgttgaattgatagtttaatttctgctgttggctgttaataatttggattatttatgtttataaatgatacagatctgtttacaaggtttgtagatactttttttgttcctgttcatagatgggaagcttccttataactgatgcagagaaaaattagtccttcaaatactgctgtattttcaggaaaaaaaaaaaaaggggtgtttctattgaaactgtactaaatttttgcctacaatttaccttgttaaatattgtagataaattgctaatactaatagccaaatagataacactaatgctttgtttaaaaaaacgaaaaaaacaaaacaaaacaaaaaaacatgagcagtggtgttctaatgaagttatgacatctgtcctaattagtttcttaaatacatttactacttaatggttttgaagcaactgtttaatttttaaaatttttgaaaacttgctaataaccttttgttcagaatttagtagattgtttaatgcaggacatcaactacataatgaaagatgcttgaaatgcttttgttatttcaggcaaatcaaattaaatcagactatcaaactacaagagaaccttagtcttttttgtttttgtctaaacatgttagtttagtgatgtcttggtgaactgtgagtgaactgtattgatttttctaatctttagagaccttcacacagcatgagggctgttggcattttgaaaaaggttaataagtagaagcatacatgttttccttttgtttttgaaacttgtttgtaaacataaataaatatgcccttttattaaataaattcatggcaatgtttttttaaaagacatttcagcttctttactcagttctgcatatacagtgcatcagtctgttctctttgaccacaattggaatacatttcaagatggtaacagccccatgaagtaccgctttaattccttgctggtaatctaatagaatcagattaagaaaattaacacaattttaccatttgacatactcttcattgaatttagtttgtctaaaatagtctcacaggtaaaaaacataacaacaatgaccaccattgtctttgatacatttattttaattcttaagtggccaaataacagattaggtaaaatgagattacatgaaaaggttctaaaatgatatatttagatgcaataattaaccatatgctagaatgcccacctctaagccaattggattctttagctctctttttctttccttcatctaccttcttctcttttttgcctctgtctttaccctttagaaactggcatgtgttagggcccagatttcaccagatacacaatcctcaggctgacataaagtttacgaggactgctactataactgagagtgctgaccaagcaaagaaacatttagttgatggtgcttgatatttttggtgggtgggggaaatctttttctcaccatcaaatctttgcagtaatcctctgcaggtcttagaaacacattggctctgtcagcatttgtaattgtacatttattcatcaggtatttatagtgaatcatactgtaaaaaagaggtagcatgatatgctggaaagcatattagactaggagtcaagacctggtttctagtcttggttttgccattaatgtgctgcatgatcttgggaaaatcatttaccctaaataagggtggtggactatcttgaagaaccctttcaactctaaaaattgaccctatcaactggagagcccacaaggcatagggaatagagaaaagggaaatgttttcagttttcttttttattttggttatgcttaaatatgaatgtaattaccaaaagatttagaagtgcatgtgctttggaggatttgtattgagcttttacagtattcatttttcaactcaaggcaatggctttctacaccaactctaatccataaacgggtcttatgacatctatgaagtagtagcaagacatgcttagtgtgtatttctctctttgagacactgtaatttctaccagaaatttccagagcattatgtaggtagaaaaaaatgcaagcaagctgttaaagatcttggatcccattatatagtatgtatagctgaaatctgtaattcaatcactttttctcttttatcctctaaccaaaaaattgtttaattttgcatcccaaatgtttttaatctttgtatattttttaaaaatccttttctcctcatcattgccttttttgtggttgtaaatagacttacttgcactttgaagatgagttactccttgtcatcttacaaatatgtgatatggtaattttcataacagatgtcagttttgaaccaagaattggtgatttgtttataagaaaaaaactggcttcatttctgtgaaattgctctttgaaaatttctttttacacgtgtaagccaactgagataccgtgatggtgttgatttctttcaatgatgcttaccatctattttagccactgagccttttattatttgtctatttgtaaagtttatttgtcttaactcatttaataaatatactgtttatctgtttctgaa

SEQ ID NO: 433443 - DNA, 7279 bp, Homo sapiens
cggatgtgtatatctcatgattgatatggagaaactagtcatgggccaaaggtcaagatacttctctgggaaatgttgctgctgatgctgctttacaaagtcatacaatgagtgtttggtttaagaaagattttcatacttaaaagattttcatcttggaaatacatcaagtgaaaattaaattcttttgggaaacattttccttctgatatattatacttgtaatgggcgacatggcaaacaactcagttgcttacagtggtgtgaaaaactctttgaaggaagctaatcatgatggagactttggaattacgctcgcagagctgcgggctctcatggagctcaggtccacagatgcattacgaaaaatacaggaaagctatggagatgtctatggaatttgcaccaaattgaaaacatctcccaatgaaggtttaagtggaaaccctgcagatttagaaagaagagaagcagtgtttggaaagaattttatacctcctaaaaagccaaaaacctttcttcaattagtatgggaagcattacaagatgtcactttaattatattagaaattgcagccatagtatcattgggcctttctttttatcagcctccagaaggggataatgcactttgtggagaagtttctgttggggaggaagaaggtgaaggtgaaactggttggattgaaggagctgcaatcctcttgtctgtagtgtgtgtggtgttagtaacagctttcaatgactggagtaaggaaaaacagtttagaggtttgcagagccgaattgaacaagaacagaagttcactgtcatcaggggtggtcaggtcattcagatacctgtagctgacattactgttggagatattgctcaagtgaaatatggtgatcttcttccagctgacggcatacttattcaaggcaacgatcttaaaattgatgaaagctcattgactggtgaatcagatcatgttaaaaagtctttagataaggatcccttacttctatcaggtactcatgtaatggaaggctctggaagaatggtagttacagctgtaggtgtaaattctcaaactggaattatctttaccttacttggagctggaggtgaagaggaagagaagaaagatgagaagaaaaaggaaaagaaaaataagaaacaagatggagctattgagaatcgcaacaaagcaaaagcccaggatggtgcagccatggaaatgcagccattgaagagtgaagaaggtggagatggtgatgaaaaagataaaaagaaagcaaatttgccaaaaaaggaaaaatctgttttacaagggaaacttacaaaactggctgttcagattggcaaagcaggtctgttgatgtctgccatcacagttatcattctagtattatattttgtcattgacaccttctgggttcagaaaagaccatggcttgctgagtgcacaccaatttatatacaatactttgtgaagttcttcattattggagttacagttttagtggtcgcagtgccagaaggtcttccacttgcagtcacgatctcactggcttattcagtcaaaaaaatgatgaaagataataacttagtaaggcatctggatgcttgtgaaaccatgggaaatgctacagctatttgttcagataaaacaggaactttgacaatgaacagaatgacagtcgttcaagcttacataaatgaaaaacattataaaaaggttcctgaaccagaagctattccaccaaatattttgtcctatcttgtaacaggaatttctgtgaattgtgcttatacatcaaaaatattgccaccagagaaagagggtggattacctcgtcacgttggtaataaaactgaatgtgccttgttgggacttcttttggatttaaaacgggattatcaggatgttagaaatgaaataccagaagaagcactgtacaaagtctacaccttcaattctgttaggaagtccatgagtactgtcctgaaaaattcagatggaagttatcgaatattcagcaagggtgcatctgagataattctgaaaaagtgtttcaaaatcttgagtgctaatggtgaggcaaaagtattcagaccaagggaccgtgatgatattgtaaaaactgtgattgaaccgatggcatcagaaggcttgagaaccatatgtcttgcattcagagattttccagcaggagaaccagaaccagagtgggataatgaaaatgatattgtcaccggccttacatgcattgctgttgtggggattgaagatcctgtgagacctgaggtgccagatgcaattaaaaagtgtcagagggctggaattactgtgcggatggtcactggtgataatattaatactgctcgggccattgctaccaaatgtggtattttacatcctggggaagattttctgtgcctagaaggtaaagattttaacagaagaatacgaaatgaaaaaggagagattgagcaagagaggatagacaagatttggccaaaacttcgagtacttgcaagatcatctcctactgataagcatacactggttaaaggtataattgacagcactgtctcagaccaacgccaggttgtagctgtaactggtgatggtacaaatgatggcccagcactaaagaaagcagatgttggatttgcaatgggtattgctggaactgatgtagctaaagaagcatccgatattattctcacagatgacaactttacaagcattgttaaagcagttatgtggggacgaaatgtctatgacagcatctcaaaattccttcagttccaacttactgttaatgtagtagcagtgattgttgcttttacgggcgcctgcattactcaagactcaccgcttaaggctgtgcagatgctgtgggtaaacctcataatggatacactcgcttccctggctctggcaacggaaccacccactgagtctctcttgcttcggaaaccttatggtagaaataagcctctcatctcacgtacaatgatgaagaatattttgggtcatgcattctatcaacttgtagtagtctttacactcttatttgctggtaagaattcagtgtctaataaagcttcagttaattgtttcttttccaagctaatcatccaagatgttataatgttacaaattttcaagagcctaaattctactcctgacttcccatttatctttaatttcttcttaatcagtgagtgcttagtaaatttgggaggacaataagctagatagtagaataaacaggagaataaacagtcctgatgtcttaccctggctctccactaatttagatatgtgatcctgagattatcaccatagttttgggagcttctgtttccttgcctataaaacaagagagttgtactagataatcccaggtttctctagctccttccatgctgccatttcagatcaaataaaaggtctagctaagttgtaatttgtatacctccttgaaatctaatttggtatgataattacaaaatagtcatttttcattctttcaggagaaaagttttttgacattgatagtggaagaaatgctcctttgcatgctcctccttcagaacattatactattgtttttaatacctttgtgctgatgcaacttttcaacgaaataaatgcccggaaaattcatggtgaaagaaatgtattcgaaggaatctttaacaatgccatcttctgcacaattgttttaggcacttttgtggtacagataataattgtgcagtttggtggaaaacctttcagttgttcagaactttcaatagaacagtggctatggtcaatattcctaggaatgggaacattactctggggccagcttatttcaacaattccaactagccgtttaaaattcctcaaagaagctggtcatggaacacaaaaggaagaaatacctgaggaggaattagcagaggatgttgaagagattgatcacgctgaaagggagttgcggcgtggccaaatcttgtggtttagaggtctgaacagaatccaaacacagattcgagtggtgaatgcatttcgtagttctttatatgaagggttagaaaaaccggaatcaagaagttcgattcacaactttatgacacatcctgagtttaggatagaagattcagagcctcatatcccccttattgatgacactgatgccgaagatgatgctcctacaaaacgtaactccagtcctccaccctctcccaacaaaaataacaatgctgttgacagtggaattcaccttacaatagaaatgaacaagtctgctacctcttcatccccaggaagcccactacatagtttggaaacatcactctgattgtaagctgaatgttaacacactagctgcattgtaaagaaacaaattgaaactgggtcttttcacatattgtgatggacaagctagtattcttgtctttggacttcaacagaagacacacttgtacgaatgtagatttatttttttaaaaaaaaaaaagcaaagctttctgccagactgagggtgctttttggggggtgggagaaatgaactgacagataaacagtaactcagcgtaagtgacctgtggatcatcagtagtacccaagcatggtcctgaacagtgtattagcagagctttagtttatctcagtcctggatgggagagagagggaggagtaaaactgggcaagacaaagagccctggatcgttgaattgatagtttaatttctgctgttggctgttaataatttggattatttatgtttataaatgatacagatctgtttacaaggtttgtagatactttttttgttcctgttcatagatgggaagcttccttataactgatgcagagaaaaattagtccttcaaatactgctgtattttcaggaaaaaaaaaaaaaggggtgtttctattgaaactgtactaaatttttgcctacaatttaccttgttaaatattgtagataaattgctaatactaatagccaaatagataacactaatgctttgtttaaaaaaacgaaaaaaacaaaacaaaacaaaaaaacatgagcagtggtgttctaatgaagttatgacatctgtcctaattagtttcttaaatacatttactacttaatggttttgaagcaactgtttaatttttaaaatttttgaaaacttgctaataaccttttgttcagaatttagtagattgtttaatgcaggacatcaactacataatgaaagatgcttgaaatgcttttgttatttcaggcaaatcaaattaaatcagactatcaaactacaagagaaccttagtcttttttgtttttgtctaaacatgttagtttagtgatgtcttggtgaactgtgagtgaactgtattgatttttctaatctttagagaccttcacacagcatgagggctgttggcattttgaaaaaggttaataagtagaagcatacatgttttccttttgtttttgaaacttgtttgtaaacataaataaatatgcccttttattaaataaattcatggcaatgtttttttaaaagacatttcagcttctttactcagttctgcatatacagtgcatcagtctgttctctttgaccacaattggaatacatttcaagatggtaacagccccatgaagtaccgctttaattccttgctggtaatctaatagaatcagattaagaaaattaacacaattttaccatttgacatactcttcattgaatttagtttgtctaaaatagtctcacaggtaaaaaacataacaacaatgaccaccattgtctttgatacatttattttaattcttaagtggccaaataacagattaggtaaaatgagattacatgaaaaggttctaaaatgatatatttagatgcaataattaaccatatgctagaatgcccacctctaagccaattggattctttagctctctttttctttccttcatctaccttcttctcttttttgcctctgtctttaccctttagaaactggcatgtgttagggcccagatttcaccagatacacaatcctcaggctgacataaagtttacgaggactgctactataactgagagtgctgaccaagcaaagaaacatttagttgatggtgcttgatatttttggtgggtgggggaaatctttttctcaccatcaaatctttgcagtaatcctctgcaggtcttagaaacacattggctctgtcagcatttgtaattgtacatttattcatcaggtatttatagtgaatcatactgtaaaaaagaggtagcatgatatgctggaaagcatattagactaggagtcaagacctggtttctagtcttggttttgccattaatgtgctgcatgatcttgggaaaatcatttaccctaaataagggtggtggactatcttgaagaaccctttcaactctaaaaattgaccctatcaactggagagcccacaaggcatagggaatagagaaaagggaaatgttttcagttttcttttttattttggttatgcttaaatatgaatgtaattaccaaaagatttagaagtgcatgtgctttggaggatttgtattgagcttttacagtattcatttttcaactcaaggcaatggctttctacaccaactctaatccataaacgggtcttatgacatctatgaagtagtagcaagacatgcttagtgtgtatttctctctttgagacactgtaatttctaccagaaatttccagagcattatgtaggtagaaaaaaatgcaagcaagctgttaaagatcttggatcccattatatagtatgtatagctgaaatctgtaattcaatcactttttctcttttatcctctaaccaaaaaattgtttaattttgcatcccaaatgtttttaatctttgtatattttttaaaaatccttttctcctcatcattgccttttttgtggttgtaaatagacttacttgcactttgaagatgagttactccttgtcatcttacaaatatgtgatatggtaattttcataacagatgtcagttttgaaccaagaattggtgatttgtttataagaaaaaaactggcttcatttctgtgaaattgctctttgaaaatttctttttacacgtgtaagccaactgagataccgtgatggtgttgatttctttcaatgatgcttaccatctattttagccactgagccttttattatttgtctatttgtaaagtttatttgtcttaactcatttaataaatatactgtttatctgtttctgaa

SEQ ID NO: 433444 - DNA, 5005 bp, Homo sapiens
tgctgggcctgccccacagtattcgctaagatagatctgggtccatgcccaagaattcacgtttctaacaagttcccaggagtttctgattgttctgtggaccacactttgagagctactgataaatatgccagatagctcattaggatttaagaaactatgtttgggcatattttaactttgataaacacttatagattgagcaagagaggatagacaagatttggccaaaacttcgagtacttgcaagatcatctcctactgataagcatacactggttaaaggtataattgacagcactgtctcagaccaacgccaggttgtagctgtaactggtgatggtacaaatgatggcccagcactaaagaaagcagatgttggatttgcaatgggtattgctggaactgatgtagctaaagaagcatccgatattattctcacagatgacaactttacaagcattgttaaagcagttatgtggggacgaaatgtctatgacagcatctcaaaattccttcagttccaacttactgttaatgtagtagcagtgattgttgcttttacgggcgcctgcattactcaagactcaccgcttaaggctgtgcagatgctgtgggtaaacctcataatggatacactcgcttccctggctctggcaacggaaccacccactgagtctctcttgcttcggaaaccttatggtagaaataagcctctcatctcacgtacaatgatgaagaatattttgggtcatgcattctatcaacttgtagtagtctttacactcttatttgctggtaagaattcagtgtctaataaagcttcagttaattgtttcttttccaagctaatcatccaagatgttataatgttacaaattttcaagagcctaaattctactcctgacttcccatttatctttaatttcttcttaatcagtgagtgcttagtaaatttgggaggacaataagctagatagtagaataaacaggagaataaacagtcctgatgtcttaccctggctctccactaatttagatatgtgatcctgagattatcaccatagttttgggagcttctgtttccttgcctataaaacaagagagttgtactagataatcccaggtttctctagctccttccatgctgccatttcagatcaaataaaaggtctagctaagttgtaatttgtatacctccttgaaatctaatttggtatgataattacaaaatagtcatttttcattctttcaggagaaaagttttttgacattgatagtggaagaaatgctcctttgcatgctcctccttcagaacattatactattgtttttaatacctttgtgctgatgcaacttttcaacgaaataaatgcccggaaaattcatggtgaaagaaatgtattcgaaggaatctttaacaatgccatcttctgcacaattgttttaggcacttttgtggtacagataataattgtgcagtttggtggaaaacctttcagttgttcagaactttcaatagaacagtggctatggtcaatattcctaggaatgggaacattactctggggccagcttatttcaacaattccaactagccgtttaaaattcctcaaagaagctggtcatggaacacaaaaggaagaaatacctgaggaggaattagcagaggatgttgaagagattgatcacgctgaaagggagttgcggcgtggccaaatcttgtggtttagaggtctgaacagaatccaaacacagattcgagtggtgaatgcatttcgtagttctttatatgaagggttagaaaaaccggaatcaagaagttcgattcacaactttatgacacatcctgagtttaggatagaagattcagagcctcatatcccccttattgatgacactgatgccgaagatgatgctcctacaaaacgtaactccagtcctccaccctctcccaacaaaaataacaatgctgttgacagtggaattcaccttacaatagaaatgaacaagtctgctacctcttcatccccaggaagcccactacatagtttggaaacatcactctgattgtaagctgaatgttaacacactagctgcattgtaaagaaacaaattgaaactgggtcttttcacatattgtgatggacaagctagtattcttgtctttggacttcaacagaagacacacttgtacgaatgtagatttatttttttaaaaaaaaaaaagcaaagctttctgccagactgagggtgctttttggggggtgggagaaatgaactgacagataaacagtaactcagcgtaagtgacctgtggatcatcagtagtacccaagcatggtcctgaacagtgtattagcagagctttagtttatctcagtcctggatgggagagagagggaggagtaaaactgggcaagacaaagagccctggatcgttgaattgatagtttaatttctgctgttggctgttaataatttggattatttatgtttataaatgatacagatctgtttacaaggtttgtagatactttttttgttcctgttcatagatgggaagcttccttataactgatgcagagaaaaattagtccttcaaatactgctgtattttcaggaaaaaaaaaaaaaggggtgtttctattgaaactgtactaaatttttgcctacaatttaccttgttaaatattgtagataaattgctaatactaatagccaaatagataacactaatgctttgtttaaaaaaacgaaaaaaacaaaacaaaacaaaaaaacatgagcagtggtgttctaatgaagttatgacatctgtcctaattagtttcttaaatacatttactacttaatggttttgaagcaactgtttaatttttaaaatttttgaaaacttgctaataaccttttgttcagaatttagtagattgtttaatgcaggacatcaactacataatgaaagatgcttgaaatgcttttgttatttcaggcaaatcaaattaaatcagactatcaaactacaagagaaccttagtcttttttgtttttgtctaaacatgttagtttagtgatgtcttggtgaactgtgagtgaactgtattgatttttctaatctttagagaccttcacacagcatgagggctgttggcattttgaaaaaggttaataagtagaagcatacatgttttccttttgtttttgaaacttgtttgtaaacataaataaatatgcccttttattaaataaattcatggcaatgtttttttaaaagacatttcagcttctttactcagttctgcatatacagtgcatcagtctgttctctttgaccacaattggaatacatttcaagatggtaacagccccatgaagtaccgctttaattccttgctggtaatctaatagaatcagattaagaaaattaacacaattttaccatttgacatactcttcattgaatttagtttgtctaaaatagtctcacaggtaaaaaacataacaacaatgaccaccattgtctttgatacatttattttaattcttaagtggccaaataacagattaggtaaaatgagattacatgaaaaggttctaaaatgatatatttagatgcaataattaaccatatgctagaatgcccacctctaagccaattggattctttagctctctttttctttccttcatctaccttcttctcttttttgcctctgtctttaccctttagaaactggcatgtgttagggcccagatttcaccagatacacaatcctcaggctgacataaagtttacgaggactgctactataactgagagtgctgaccaagcaaagaaacatttagttgatggtgcttgatatttttggtgggtgggggaaatctttttctcaccatcaaatctttgcagtaatcctctgcaggtcttagaaacacattggctctgtcagcatttgtaattgtacatttattcatcaggtatttatagtgaatcatactgtaaaaaagaggtagcatgatatgctggaaagcatattagactaggagtcaagacctggtttctagtcttggttttgccattaatgtgctgcatgatcttgggaaaatcatttaccctaaataagggtggtggactatcttgaagaaccctttcaactctaaaaattgaccctatcaactggagagcccacaaggcatagggaatagagaaaagggaaatgttttcagttttcttttttattttggttatgcttaaatatgaatgtaattaccaaaagatttagaagtgcatgtgctttggaggatttgtattgagcttttacagtattcatttttcaactcaaggcaatggctttctacaccaactctaatccataaacgggtcttatgacatctatgaagtagtagcaagacatgcttagtgtgtatttctctctttgagacactgtaatttctaccagaaatttccagagcattatgtaggtagaaaaaaatgcaagcaagctgttaaagatcttggatcccattatatagtatgtatagctgaaatctgtaattcaatcactttttctcttttatcctctaaccaaaaaattgtttaattttgcatcccaaatgtttttaatctttgtatattttttaaaaatccttttctcctcatcattgccttttttgtggttgtaaatagacttacttgcactttgaagatgagttactccttgtcatcttacaaatatgtgatatggtaattttcataacagatgtcagttttgaaccaagaattggtgatttgtttataagaaaaaaactggcttcatttctgtgaaattgctctttgaaaatttctttttacacgtgtaagccaactgagataccgtgatggtgttgatttctttcaatgatgcttaccatctattttagccactgagccttttattatttgtctatttgtaaagtttatttgtcttaactcatttaataaatatactgtttatctgtttctgaa

SEQ ID NO: 433445 - DNA, 7433 bp, Homo sapiens
cggatgtgtatatctcatgattgatatggagaaactagtcatgggccaaaggtcaagatacttctctgggaaatgttgctgctgatgctgctttacaaagtcatacaatgagtgtttggtttaagaaagattttcatacttaaaagattttcatcttggaaatacatcaagtgaaaattaaattcttttgggaaacattttccttctgatatattatacttgtaatgggcgacatggcaaacaactcagttgcttacagtggtgtgaaaaactctttgaaggaagctaatcatgatggagactttggaattacgctcgcagagctgcgggctctcatggagctcaggtccacagatgcattacgaaaaatacaggaaagctatggagatgtctatggaatttgcaccaaattgaaaacatctcccaatgaaggtttaagtggaaaccctgcagatttagaaagaagagaagcagtgtttggaaagaattttatacctcctaaaaagccaaaaacctttcttcaattagtatgggaagcattacaagatgtcactttaattatattagaaattgcagccatagtatcattgggcctttctttttatcagcctccagaaggggataatgcactttgtggagaagtttctgttggggaggaagaaggtgaaggtgaaactggttggattgaaggagctgcaatcctcttgtctgtagtgtgtgtggtgttagtaacagctttcaatgactggagtaaggaaaaacagtttagaggtttgcagagccgaattgaacaagaacagaagttcactgtcatcaggggtggtcaggtcattcagatacctgtagctgacattactgttggagatattgctcaagtgaaatatggtgatcttcttccagctgacggcatacttattcaaggcaacgatcttaaaattgatgaaagctcattgactggtgaatcagatcatgttaaaaagtctttagataaggatcccttacttctatcaggtactcatgtaatggaaggctctggaagaatggtagttacagctgtaggtgtaaattctcaaactggaattatctttaccttacttggagctggaggtgaagaggaagagaagaaagatgagaagaaaaaggaaaagaaaaataagaaacaagatggagctattgagaatcgcaacaaagcaaaagcccaggatggtgcagccatggaaatgcagccattgaagagtgaagaaggtggagatggtgatgaaaaagataaaaagaaagcaaatttgccaaaaaaggaaaaatctgttttacaagggaaacttacaaaactggctgttcagattggcaaagcaggtctgttgatgtctgccatcacagttatcattctagtattatattttgtcattgacaccttctgggttcagaaaagaccatggcttgctgagtgcacaccaatttatatacaatactttgtgaagttcttcattattggagttacagttttagtggtcgcagtgccagaaggtcttccacttgcagtcacgatctcactggcttattcagtcaaaaaaatgatgaaagataataacttagtaaggcatctggatgcttgtgaaaccatgggaaatgctacagctatttgttcagataaaacaggaactttgacaatgaacagaatgacagtcgttcaagcttacataaatgaaaaacattataaaaaggttcctgaaccagaagctattccaccaaatattttgtcctatcttgtaacaggaatttctgtgaattgtgcttatacatcaaaaatattgccaccagagaaagagggtggattacctcgtcacgttggtaataaaactgaatgtgccttgttgggacttcttttggatttaaaacgggattatcaggatgttagaaatgaaataccagaagaagcactgtacaaagtctacaccttcaattctgttaggaagtccatgagtactgtcctgaaaaattcagatggaagttatcgaatattcagcaagggtgcatctgagataattctgaaaaagtgtttcaaaatcttgagtgctaatggtgaggcaaaagtattcagaccaagggaccgtgatgatattgtaaaaactgtgattgaaccgatggcatcagaaggcttgagaaccatatgtcttgcattcagagattttccagcaggagaaccagaaccagagtgggataatgaaaatgatattgtcaccggccttacatgcattgctgttgtggggattgaagatcctgtgagacctgaggtgccagatgcaattaaaaagtgtcagagggctggaattactgtgcggatggtcactggtgataatattaatactgctcgggccattgctaccaaatgtggtattttacatcctggggaagattttctgtgcctagaaggtaaagattttaacagaagaatacgaaatgaaaaaggagagattgagcaagagaggatagacaagatttggccaaaacttcgagtacttgcaagatcatctcctactgataagcatacactggttaaaggtataattgacagcactgtctcagaccaacgccaggttgtagctgtaactggtgatggtacaaatgatggcccagcactaaagaaagcagatgttggatttgcaatgggtattgctggaactgatgtagctaaagaagcatccgatattattctcacagatgacaactttacaagcattgttaaagcagttatgtggggacgaaatgtctatgacagcatctcaaaattccttcagttccaacttactgttaatgtagtagcagtgattgttgcttttacgggcgcctgcattactcaagactcaccgcttaaggctgtgcagatgctgtgggtaaacctcataatggatacactcgcttccctggctctggcaacggaaccacccactgagtctctcttgcttcggaaaccttatggtagaaataagcctctcatctcacgtacaatgatgaagaatattttgggtcatgcattctatcaacttgtagtagtctttacactcttatttgctggtaagaattcagtgtctaataaagcttcagttaattgtttcttttccaagctaatcatccaagatgttataatgttacaaattttcaagagcctaaattctactcctgacttcccatttatctttaatttcttcttaatcagtgagtgcttagtaaatttgggaggacaataagctagatagtagaataaacaggagaataaacagtcctgatgtcttaccctggctctccactaatttagatatgtgatcctgagattatcaccatagttttgggagcttctgtttccttgcctataaaacaagagagttgtactagataatcccaggtttctctagctccttccatgctgccatttcagatcaaataaaaggtctagctaagttgtaatttgtatacctccttgaaatctaatttggtatgataattacaaaatagtcatttttcattctttcaggagaaaagttttttgacattgatagtggaagaaatgctcctttgcatgctcctccttcagaacattatactattgtttttaatacctttgtgctgatgcaacttttcaacgaaataaatgcccggaaaattcatggtgaaagaaatgtattcgaaggaatctttaacaatgccatcttctgcacaattgttttaggcacttttgtggtacagataataattgtgcagtttggtggaaaacctttcagttgttcagaactttcaatagaacagtggctatggtcaatattcctaggaatgggaacattactctggggccagcttatttcaacaattccaactagccgtttaaaattcctcaaagaagctggtcatggaacacaaaaggaagaaatacctgaggaggaattagcagaggatgttgaagagattgatcacgctgaaagggagttgcggcgtggccaaatcttgtggtttagaggtctgaacagaatccaaacacagatggatgtagtgaatgctttccagagtggaagttccattcagggggctctaaggcggcaaccctccatcgccagccagcatcatgatgtaacaaatatttctacccctacacatgtagtgttttcctcttctactgcttctactactgtggggtattcgagtggtgaatgcatttcgtagttctttatatgaagggttagaaaaaccggaatcaagaagttcgattcacaactttatgacacatcctgagtttaggatagaagattcagagcctcatatcccccttattgatgacactgatgccgaagatgatgctcctacaaaacgtaactccagtcctccaccctctcccaacaaaaataacaatgctgttgacagtggaattcaccttacaatagaaatgaacaagtctgctacctcttcatccccaggaagcccactacatagtttggaaacatcactctgattgtaagctgaatgttaacacactagctgcattgtaaagaaacaaattgaaactgggtcttttcacatattgtgatggacaagctagtattcttgtctttggacttcaacagaagacacacttgtacgaatgtagatttatttttttaaaaaaaaaaaagcaaagctttctgccagactgagggtgctttttggggggtgggagaaatgaactgacagataaacagtaactcagcgtaagtgacctgtggatcatcagtagtacccaagcatggtcctgaacagtgtattagcagagctttagtttatctcagtcctggatgggagagagagggaggagtaaaactgggcaagacaaagagccctggatcgttgaattgatagtttaatttctgctgttggctgttaataatttggattatttatgtttataaatgatacagatctgtttacaaggtttgtagatactttttttgttcctgttcatagatgggaagcttccttataactgatgcagagaaaaattagtccttcaaatactgctgtattttcaggaaaaaaaaaaaaaggggtgtttctattgaaactgtactaaatttttgcctacaatttaccttgttaaatattgtagataaattgctaatactaatagccaaatagataacactaatgctttgtttaaaaaaacgaaaaaaacaaaacaaaacaaaaaaacatgagcagtggtgttctaatgaagttatgacatctgtcctaattagtttcttaaatacatttactacttaatggttttgaagcaactgtttaatttttaaaatttttgaaaacttgctaataaccttttgttcagaatttagtagattgtttaatgcaggacatcaactacataatgaaagatgcttgaaatgcttttgttatttcaggcaaatcaaattaaatcagactatcaaactacaagagaaccttagtcttttttgtttttgtctaaacatgttagtttagtgatgtcttggtgaactgtgagtgaactgtattgatttttctaatctttagagaccttcacacagcatgagggctgttggcattttgaaaaaggttaataagtagaagcatacatgttttccttttgtttttgaaacttgtttgtaaacataaataaatatgcccttttattaaataaattcatggcaatgtttttttaaaagacatttcagcttctttactcagttctgcatatacagtgcatcagtctgttctctttgaccacaattggaatacatttcaagatggtaacagccccatgaagtaccgctttaattccttgctggtaatctaatagaatcagattaagaaaattaacacaattttaccatttgacatactcttcattgaatttagtttgtctaaaatagtctcacaggtaaaaaacataacaacaatgaccaccattgtctttgatacatttattttaattcttaagtggccaaataacagattaggtaaaatgagattacatgaaaaggttctaaaatgatatatttagatgcaataattaaccatatgctagaatgcccacctctaagccaattggattctttagctctctttttctttccttcatctaccttcttctcttttttgcctctgtctttaccctttagaaactggcatgtgttagggcccagatttcaccagatacacaatcctcaggctgacataaagtttacgaggactgctactataactgagagtgctgaccaagcaaagaaacatttagttgatggtgcttgatatttttggtgggtgggggaaatctttttctcaccatcaaatctttgcagtaatcctctgcaggtcttagaaacacattggctctgtcagcatttgtaattgtacatttattcatcaggtatttatagtgaatcatactgtaaaaaagaggtagcatgatatgctggaaagcatattagactaggagtcaagacctggtttctagtcttggttttgccattaatgtgctgcatgatcttgggaaaatcatttaccctaaataagggtggtggactatcttgaagaaccctttcaactctaaaaattgaccctatcaactggagagcccacaaggcatagggaatagagaaaagggaaatgttttcagttttcttttttattttggttatgcttaaatatgaatgtaattaccaaaagatttagaagtgcatgtgctttggaggatttgtattgagcttttacagtattcatttttcaactcaaggcaatggctttctacaccaactctaatccataaacgggtcttatgacatctatgaagtagtagcaagacatgcttagtgtgtatttctctctttgagacactgtaatttctaccagaaatttccagagcattatgtaggtagaaaaaaatgcaagcaagctgttaaagatcttggatcccattatatagtatgtatagctgaaatctgtaattcaatcactttttctcttttatcctctaaccaaaaaattgtttaattttgcatcccaaatgtttttaatctttgtatattttttaaaaatccttttctcctcatcattgccttttttgtggttgtaaatagacttacttgcactttgaagatgagttactccttgtcatcttacaaatatgtgatatggtaattttcataacagatgtcagttttgaaccaagaattggtgatttgtttataagaaaaaaactggcttcatttctgtgaaattgctctttgaaaatttctttttacacgtgtaagccaactgagataccgtgatggtgttgatttctttcaatgatgcttaccatctattttagccactgagccttttattatttgtctatttgtaaagtttatttgtcttaactcatttaataaatatactgtttatctgtttctgaa

SEQ ID NO: 433446 - DNA, 3371 bp, Homo sapiens
cgtgcagcagggtggatggactcggagttacgtttttgtatggagcatcatctatcggcatcagtgtcatcaatcagggggatatagaggctctgaatcttctatcctaaactcaggatgtgtcatagctttgtcctttcttaacagtagttctttatatgaagggttagaaaaaccggaatcaagaagttcgattcacaactttatgacacatcctgagtttaggatagaagattcagagcctcatatcccccttattgatgacactgatgccgaagatgatgctcctacaaaacgtaactccagtcctccaccctctcccaacaaaaataacaatgctgttgacagtggaattcaccttacaatagaaatgaacaagtctgctacctcttcatccccaggaagcccactacatagtttggaaacatcactctgattgtaagctgaatgttaacacactagctgcattgtaaagaaacaaattgaaactgggtcttttcacatattgtgatggacaagctagtattcttgtctttggacttcaacagaagacacacttgtacgaatgtagatttatttttttaaaaaaaaaaaagcaaagctttctgccagactgagggtgctttttggggggtgggagaaatgaactgacagataaacagtaactcagcgtaagtgacctgtggatcatcagtagtacccaagcatggtcctgaacagtgtattagcagagctttagtttatctcagtcctggatgggagagagagggaggagtaaaactgggcaagacaaagagccctggatcgttgaattgatagtttaatttctgctgttggctgttaataatttggattatttatgtttataaatgatacagatctgtttacaaggtttgtagatactttttttgttcctgttcatagatgggaagcttccttataactgatgcagagaaaaattagtccttcaaatactgctgtattttcaggaaaaaaaaaaaaaggggtgtttctattgaaactgtactaaatttttgcctacaatttaccttgttaaatattgtagataaattgctaatactaatagccaaatagataacactaatgctttgtttaaaaaaacgaaaaaaacaaaacaaaacaaaaaaacatgagcagtggtgttctaatgaagttatgacatctgtcctaattagtttcttaaatacatttactacttaatggttttgaagcaactgtttaatttttaaaatttttgaaaacttgctaataaccttttgttcagaatttagtagattgtttaatgcaggacatcaactacataatgaaagatgcttgaaatgcttttgttatttcaggcaaatcaaattaaatcagactatcaaactacaagagaaccttagtcttttttgtttttgtctaaacatgttagtttagtgatgtcttggtgaactgtgagtgaactgtattgatttttctaatctttagagaccttcacacagcatgagggctgttggcattttgaaaaaggttaataagtagaagcatacatgttttccttttgtttttgaaacttgtttgtaaacataaataaatatgcccttttattaaataaattcatggcaatgtttttttaaaagacatttcagcttctttactcagttctgcatatacagtgcatcagtctgttctctttgaccacaattggaatacatttcaagatggtaacagccccatgaagtaccgctttaattccttgctggtaatctaatagaatcagattaagaaaattaacacaattttaccatttgacatactcttcattgaatttagtttgtctaaaatagtctcacaggtaaaaaacataacaacaatgaccaccattgtctttgatacatttattttaattcttaagtggccaaataacagattaggtaaaatgagattacatgaaaaggttctaaaatgatatatttagatgcaataattaaccatatgctagaatgcccacctctaagccaattggattctttagctctctttttctttccttcatctaccttcttctcttttttgcctctgtctttaccctttagaaactggcatgtgttagggcccagatttcaccagatacacaatcctcaggctgacataaagtttacgaggactgctactataactgagagtgctgaccaagcaaagaaacatttagttgatggtgcttgatatttttggtgggtgggggaaatctttttctcaccatcaaatctttgcagtaatcctctgcaggtcttagaaacacattggctctgtcagcatttgtaattgtacatttattcatcaggtatttatagtgaatcatactgtaaaaaagaggtagcatgatatgctggaaagcatattagactaggagtcaagacctggtttctagtcttggttttgccattaatgtgctgcatgatcttgggaaaatcatttaccctaaataagggtggtggactatcttgaagaaccctttcaactctaaaaattgaccctatcaactggagagcccacaaggcatagggaatagagaaaagggaaatgttttcagttttcttttttattttggttatgcttaaatatgaatgtaattaccaaaagatttagaagtgcatgtgctttggaggatttgtattgagcttttacagtattcatttttcaactcaaggcaatggctttctacaccaactctaatccataaacgggtcttatgacatctatgaagtagtagcaagacatgcttagtgtgtatttctctctttgagacactgtaatttctaccagaaatttccagagcattatgtaggtagaaaaaaatgcaagcaagctgttaaagatcttggatcccattatatagtatgtatagctgaaatctgtaattcaatcactttttctcttttatcctctaaccaaaaaattgtttaattttgcatcccaaatgtttttaatctttgtatattttttaaaaatccttttctcctcatcattgccttttttgtggttgtaaatagacttacttgcactttgaagatgagttactccttgtcatcttacaaatatgtgatatggtaattttcataacagatgtcagttttgaaccaagaattggtgatttgtttataagaaaaaaactggcttcatttctgtgaaattgctctttgaaaatttctttttacacgtgtaagccaactgagataccgtgatggtgttgatttctttcaatgatgcttaccatctattttagccactgagccttttattatttgtctatttgtaaagtttatttgtcttaactcatttaataaatatactgtttatctgtttctgaa

SEQ ID NO: 433447 - DNA, 6974 bp, Homo sapiens
cggatgtgtatatctcatgattgatatggagaaactagtcatgggccaaaggtcaagatacttctctgggaaatgttgctgctgatgctgctttacaaagtcatacaatgagtgtttggtttaagaaagattttcatacttaaaagattttcatcttggaaatacatcaagtgaaaattaaattcttttgggaaacattttccttctgatatattatacttgtaatgggcgacatggcaaacaactcagttgcttacagtggtgtgaaaaactctttgaaggaagctaatcatgatggagactttggaattacgctcgcagagctgcgggctctcatggagctcaggtccacagatgcattacgaaaaatacaggaaagctatggagatgtctatggaatttgcaccaaattgaaaacatctcccaatgaaggtttaagtggaaaccctgcagatttagaaagaagagaagcagtgtttggaaagaattttatacctcctaaaaagccaaaaacctttcttcaattagtatgggaagcattacaagatgtcactttaattatattagaaattgcagccatagtatcattgggcctttctttttatcagcctccagaaggggataatgcactttgtggagaagtttctgttggggaggaagaaggtgaaggtgaaactggttggattgaaggagctgcaatcctcttgtctgtagtgtgtgtggtgttagtaacagctttcaatgactggagtaaggaaaaacagtttagaggtttgcagagccgaattgaacaagaacagaagttcactgtcatcaggggtggtcaggtcattcagatacctgtagctgacattactgttggagatattgctcaagtgaaatatggtgatcttcttccagctgacggcatacttattcaaggcaacgatcttaaaattgatgaaagctcattgactggtgaatcagatcatgttaaaaagtctttagataaggatcccttacttctatcaggtactcatgtaatggaaggctctggaagaatggtagttacagctgtaggtgtaaattctcaaactggaattatctttaccttacttggagctggaggtgaagaggaagagaagaaagatgagaagaaaaaggaaaagaaaaataagaaacaagatggagctattgagaatcgcaacaaagcaaaagcccaggatggtgcagccatggaaatgcagccattgaagagtgaagaaggtggagatggtgatgaaaaagataaaaagaaagcaaatttgccaaaaaaggaaaaatctgttttacaagggaaacttacaaaactggctgttcagattggcaaagcaggtctgttgatgtctgccatcacagttatcattctagtattatattttgtcattgacaccttctgggttcagaaaagaccatggcttgctgagtgcacaccaatttatatacaatactttgtgaagttcttcattattggagttacagttttagtggtcgcagtgccagaaggtcttccacttgcagtcacgatctcactggcttattcagtcaaaaaaatgatgaaagataataacttagtaaggcatctggatgcttgtgaaaccatgggaaatgctacagctatttgttcagataaaacaggaactttgacaatgaacagaatgacagtcgttcaagcttacataaatgaaaaacattataaaaaggttcctgaaccagaagctattccaccaaatattttgtcctatcttgtaacaggaatttctgtgaattgtgcttatacatcaaaaatattgccaccagagaaagagggtggattacctcgtcacgttggtaataaaactgaatgtgccttgttgggacttcttttggatttaaaacgggattatcaggatgttagaaatgaaataccagaagaagcactgtacaaagtctacaccttcaattctgttaggaagtccatgagtactgtcctgaaaaattcagatggaagttatcgaatattcagcaagggtgcatctgagataattctgaaaaagtgtttcaaaatcttgagtgctaatggtgaggcaaaagtattcagaccaagggaccgtgatgatattgtaaaaactgtgattgaaccgatggcatcagaaggcttgagaaccatatgtcttgcattcagagattttccagcaggagaaccagaaccagagtgggataatgaaaatgatattgtcaccggccttacatgcattgctgttgtggggattgaagatcctgtgagacctgaggtgccagatgcaattaaaaagtgtcagagggctggaattactgtgcggatggtcactggtgataatattaatactgctcgggccattgctaccaaatgtggtattttacatcctggggaagattttctgtgcctagaaggtaaagattttaacagaagaatacgaaatgaaaaaggagagattgagcaagagaggatagacaagatttggccaaaacttcgagtacttgcaagatcatctcctactgataagcatacactggttaaaggtataattgacagcactgtctcagaccaacgccaggttgtagctgtaactggtgatggtacaaatgatggcccagcactaaagaaagcagatgttggatttgcaatgggtattgctggaactgatgtagctaaagaagcatccgatattattctcacagatgacaactttacaagcattgttaaagcagttatgtggggacgaaatgtctatgacagcatctcaaaattccttcagttccaacttactgttaatgtagtagcagtgattgttgcttttacgggcgcctgcattactcaagactcaccgcttaaggctgtgcagatgctgtgggtaaacctcataatggatacactcgcttccctggctctggcaacggaaccacccactgagtctctcttgcttcggaaaccttatggtagaaataagcctctcatctcacgtacaatgatgaagaatattttgggtcatgcattctatcaacttgtagtagtctttacactcttatttgctggtaagaattcagtgtctaataaagcttcagttaattgtttcttttccaagctaatcatccaagatgttataatgttacaaattttcaagagcctaaattctactcctgacttcccatttatctttaatttcttcttaatcagtgagtgcttagtaaatttgggaggacaataagctagatagtagaataaacaggagaataaacagtcctgatgtcttaccctggctctccactaatttagatatgtgatcctgagattatcaccatagttttgggagcttctgtttccttgcctataaaacaagagagttgtactagataatcccaggtttctctagctccttccatgctgccatttcagatcaaataaaaggtctagctaagttgtaatttgtatacctccttgaaatctaatttggtatgataattacaaaatagtcatttttcattctttcaggagaaaagttttttgacattgatagtggaagaaatgctcctttgcatgctcctccttcagaacattatactattgtttttaatacctttgtgctgatgcaacttttcaacgaaataaatgcccggaaaattcatggtgaaagaaatgtattcgaaggaatctttaacaatgccatcttctgcacaattgttttaggcacttttgtggtacagataataattgtgcagtttggtggaaaacctttcagttgttcagaactttcaatagaacagtggctatggtcaatattcctaggaatgggaacattactctggggccagcttatttcaacaattccaactagccgtttaaaattcctcaaagaagctggtcatggaacacaaaaggaagaaatacctgaggaggaattagcagaggatgttgaagagattgatcacgctgaaagggagttgcggcgtggccaaatcttgtggtttagaggtctgaacagaatccaaacacagattcgagtggtgaatgcatttcgtagttctttatatgaagggttagaaaaaccggaatcaagaagttcgattcacaactttatgacacatcctgagtttaggatagaagattcagagcctcatatcccccttattgatgacactgatgccgaagatgatgctcctacaaaacgtaactccagtcctccaccctctcccaacaaaaataacaatgctgttgacaagataaacagtaactcagcgtaagtgacctgtggatcatcagtagtacccaagcatggtcctgaacagtgtattagcagagctttagtttatctcagtcctggatgggagagagagggaggagtaaaactgggcaagacaaagagccctggatcgttgaattgatagtttaatttctgctgttggctgttaataatttggattatttatgtttataaatgatacagatctgtttacaaggtttgtagatactttttttgttcctgttcatagatgggaagcttccttataactgatgcagagaaaaattagtccttcaaatactgctgtattttcaggaaaaaaaaaaaaaggggtgtttctattgaaactgtactaaatttttgcctacaatttaccttgttaaatattgtagataaattgctaatactaatagccaaatagataacactaatgctttgtttaaaaaaacgaaaaaaacaaaacaaaacaaaaaaacatgagcagtggtgttctaatgaagttatgacatctgtcctaattagtttcttaaatacatttactacttaatggttttgaagcaactgtttaatttttaaaatttttgaaaacttgctaataaccttttgttcagaatttagtagattgtttaatgcaggacatcaactacataatgaaagatgcttgaaatgcttttgttatttcaggcaaatcaaattaaatcagactatcaaactacaagagaaccttagtcttttttgtttttgtctaaacatgttagtttagtgatgtcttggtgaactgtgagtgaactgtattgatttttctaatctttagagaccttcacacagcatgagggctgttggcattttgaaaaaggttaataagtagaagcatacatgttttccttttgtttttgaaacttgtttgtaaacataaataaatatgcccttttattaaataaattcatggcaatgtttttttaaaagacatttcagcttctttactcagttctgcatatacagtgcatcagtctgttctctttgaccacaattggaatacatttcaagatggtaacagccccatgaagtaccgctttaattccttgctggtaatctaatagaatcagattaagaaaattaacacaattttaccatttgacatactcttcattgaatttagtttgtctaaaatagtctcacaggtaaaaaacataacaacaatgaccaccattgtctttgatacatttattttaattcttaagtggccaaataacagattaggtaaaatgagattacatgaaaaggttctaaaatgatatatttagatgcaataattaaccatatgctagaatgcccacctctaagccaattggattctttagctctctttttctttccttcatctaccttcttctcttttttgcctctgtctttaccctttagaaactggcatgtgttagggcccagatttcaccagatacacaatcctcaggctgacataaagtttacgaggactgctactataactgagagtgctgaccaagcaaagaaacatttagttgatggtgcttgatatttttggtgggtgggggaaatctttttctcaccatcaaatctttgcagtaatcctctgcaggtcttagaaacacattggctctgtcagcatttgtaattgtacatttattcatcaggtatttatagtgaatcatactgtaaaaaagaggtagcatgatatgctggaaagcatattagactaggagtcaagacctggtttctagtcttggttttgccattaatgtgctgcatgatcttgggaaaatcatttaccctaaataagggtggtggactatcttgaagaaccctttcaactctaaaaattgaccctatcaactggagagcccacaaggcatagggaatagagaaaagggaaatgttttcagttttcttttttattttggttatgcttaaatatgaatgtaattaccaaaagatttagaagtgcatgtgctttggaggatttgtattgagcttttacagtattcatttttcaactcaaggcaatggctttctacaccaactctaatccataaacgggtcttatgacatctatgaagtagtagcaagacatgcttagtgtgtatttctctctttgagacactgtaatttctaccagaaatttccagagcattatgtaggtagaaaaaaatgcaagcaagctgttaaagatcttggatcccattatatagtatgtatagctgaaatctgtaattcaatcactttttctcttttatcctctaaccaaaaaattgtttaattttgcatcccaaatgtttttaatctttgtatattttttaaaaatccttttctcctcatcattgccttttttgtggttgtaaatagacttacttgcactttgaagatgagttactccttgtcatcttacaaatatgtgatatggtaattttcataacagatgtcagttttgaaccaagaattggtgatttgtttataagaaaaaaactggcttcatttctgtgaaattgctctttgaaaatttctttttacacgtgtaagccaactgagataccgtgatggtgttgatttctttcaatgatgcttaccatctattttagccactgagccttttattatttgtctatttgtaaagtttatttgtcttaactcatttaataaatatactgtttatctgtttctgaa

SEQ ID NO: 433448 - DNA, 4295 bp, Homo sapiens
cggatgtgtatatctcatgattgatatggagaaactagtcatgggccaaaggtcaagatacttctctgggaaatgttgctgctgatgctgctttacaaagtcatacaatgagtgtttggtttaagaaagattttcatacttaaaagattttcatcttggaaatacatcaagtgaaaattaaattcttttgggaaacattttccttctgatatattatacttgtaatgggcgacatggcaaacaactcagttgcttacagtggtgtgaaaaactctttgaaggaagctaatcatgatggagactttggaattacgctcgcagagctgcgggctctcatggagctcaggtccacagatgcattacgaaaaatacaggaaagctatggagatgtctatggaatttgcaccaaattgaaaacatctcccaatgaaggtttaagtggaaaccctgcagatttagaaagaagagaagcagtgtttggaaagaattttatacctcctaaaaagccaaaaacctttcttcaattagtatgggaagcattacaagatgtcactttaattatattagaaattgcagccatagtatcattgggcctttctttttatcagcctccagaaggggataatgcactttgtggagaagtttctgttggggaggaagaaggtgaaggtgaaactggttggattgaaggagctgcaatcctcttgtctgtagtgtgtgtggtgttagtaacagctttcaatgactggagtaaggaaaaacagtttagaggtttgcagagccgaattgaacaagaacagaagttcactgtcatcaggggtggtcaggtcattcagatacctgtagctgacattactgttggagatattgctcaagtgaaatatggtgatcttcttccagctgacggcatacttattcaaggcaacgatcttaaaattgatgaaagctcattgactggtgaatcagatcatgttaaaaagtctttagataaggatcccttacttctatcaggtactcatgtaatggaaggctctggaagaatggtagttacagctgtaggtgtaaattctcaaactggaattatctttaccttacttggagctggaggtgaagaggaagagaagaaagatgagaagaaaaaggaaaagaaaaataagaaacaagatggagctattgagaatcgcaacaaagcaaaagcccaggatggtgcagccatggaaatgcagccattgaagagtgaagaaggtggagatggtgatgaaaaagataaaaagaaagcaaatttgccaaaaaaggaaaaatctgttttacaagggaaacttacaaaactggctgttcagattggcaaagcaggtctgttgatgtctgccatcacagttatcattctagtattatattttgtcattgacaccttctgggttcagaaaagaccatggcttgctgagtgcacaccaatttatatacaatactttgtgaagttcttcattattggagttacagttttagtggtcgcagtgccagaaggtcttccacttgcagtcacgatctcactggcttattcagtcaaaaaaatgatgaaagataataacttagtaaggcatctggatgcttgtgaaaccatgggaaatgctacagctatttgttcagataaaacaggaactttgacaatgaacagaatgacagtcgttcaagcttacataaatgaaaaacattataaaaaggttcctgaaccagaagctattccaccaaatattttgtcctatcttgtaacaggaatttctgtgaattgtgcttatacatcaaaaatattgccaccagagaaagagggtggattacctcgtcacgttggtaataaaactgaatgtgccttgttgggacttcttttggatttaaaacgggattatcaggatgttagaaatgaaataccagaagaagcactgtacaaagtctacaccttcaattctgttaggaagtccatgagtactgtcctgaaaaattcagatggaagttatcgaatattcagcaagggtgcatctgagataattctgaaaaagtgtttcaaaatcttgagtgctaatggtgaggcaaaagtattcagaccaagggaccgtgatgatattgtaaaaactgtgattgaaccgatggcatcagaaggcttgagaaccatatgtcttgcattcagagattttccagcaggagaaccagaaccagagtgggataatgaaaatgatattgtcaccggccttacatgcattgctgttgtggggattgaagatcctgtgagacctgaggtgccagatgcaattaaaaagtgtcagagggctggaattactgtgcggatggtcactggtgataatattaatactgctcgggccattgctaccaaatgtggtattttacatcctggggaagattttctgtgcctagaaggtaaagattttaacagaagaatacgaaatgaaaaaggagagattgagcaagagaggatagacaagatttggccaaaacttcgagtacttgcaagatcatctcctactgataagcatacactggttaaaggtataattgacagcactgtctcagaccaacgccaggttgtagctgtaactggtgatggtacaaatgatggcccagcactaaagaaagcagatgttggatttgcaatgggtattgctggaactgatgtagctaaagaagcatccgatattattctcacagatgacaactttacaagcattgttaaagcagttatgtggggacgaaatgtctatgacagcatctcaaaattccttcagttccaacttactgttaatgtagtagcagtgattgttgcttttacgggcgcctgcattactcaagactcaccgcttaaggctgtgcagatgctgtgggtaaacctcataatggatacactcgcttccctggctctggcaacggaaccacccactgagtctctcttgcttcggaaaccttatggtagaaataagcctctcatctcacgtacaatgatgaagaatattttgggtcatgcattctatcaacttgtagtagtctttacactcttatttgctggagaaaagttttttgacattgatagtggaagaaatgctcctttgcatgctcctccttcagaacattatactattgtttttaatacctttgtgctgatgcaacttttcaacgaaataaatgcccggaaaattcatggtgaaagaaatgtattcgaaggaatctttaacaatgccatcttctgcacaattgttttaggcacttttgtggtacagataataattgtgcagtttggtggaaaacctttcagttgttcagaactttcaatagaacagtggctatggtcaatattcctaggaatgggaacattactctggggccagcttatttcaacaattccaactagccgtttaaaattcctcaaagaagctggtcatggaacacaaaaggaagaaatacctgaggaggaattagcagaggatgttgaagagattgatcacgctgaaagggagttgcggcgtggccaaatcttgtggtttagaggtctgaacagaatccaaacacagattcgagtggtgaatgcatttcgtagttctttatatgaagggttagaaaaaccggaatcaagaagttcgattcacaactttatgacacatcctgagtttaggatagaagattcagagcctcatatcccccttattgatgacactgatgccgaagatgatgctcctacaaaacgtaactccagtcctccaccctctcccaacaaaaataacaatgctgttgacagtggaattcaccttacaatagaaatgaacaagtctgctacctcttcatccccaggaagcccactacatagtttggaaacatcactctgattgtaagctgaatgttaacacactagctgcattgtaaagaaacaaattgaaactgggtcttttcacatattgtgatggacaagctagtattcttgtctttggacttcaacagaagacacacttgtacgaatgtagatttatttttttaaaaaaaaaaaagcaaagctttctgccagactgagggggccaagggggggggggggaaatgtatgggcgattaacgggtacccagggaaagaccggggggcaccgaggtcccagcgaggcccgacaggtgttcgccagctctataccaccgcgtgcgaaagaggggaaaggcgcaacaaaccgcggttcaaagagcgggagggaacaagaagcgttacacaaacataagggaacaatagatacgaacacctgaagagcgct

SEQ ID NO: 433449 - DNA, 4202 bp, Homo sapiens
  misc_feature (3340)..(3340): n is a, c, g, or t
cggatgtgtatatctcatgattgatatggagaaactagtcatgggccaaaggtcaagatacttctctgggaaatgttgctgctgatgctgctttacaaagtcatacaatgagtgtttggtttaagaaagattttcatacttaaaagattttcatcttggaaatacatcaagtgaaaattaaattcttttgggaaacattttccttctgatatattatacttgtaatgggcgacatggcaaacaactcagttgcttacagtggtgtgaaaaactctttgaaggaagctaatcatgatggagactttggaattacgctcgcagagctgcgggctctcatggagctcaggtccacagatgcattacgaaaaatacaggaaagctatggagatgtctatggaatttgcaccaaattgaaaacatctcccaatgaaggtttaagtggaaaccctgcagatttagaaagaagagaagcagtgtttggaaagaattttatacctcctaaaaagccaaaaacctttcttcaattagtatgggaagcattacaagatgtcactttaattatattagaaattgcagccatagtatcattgggcctttctttttatcagcctccagaaggggataatgcactttgtggagaagtttctgttggggaggaagaaggtgaaggtgaaactggttggattgaaggagctgcaatcctcttgtctgtagtgtgtgtggtgttagtaacagctttcaatgactggagtaaggaaaaacagtttagaggtttgcagagccgaattgaacaagaacagaagttcactgtcatcaggggtggtcaggtcattcagatacctgtagctgacattactgttggagatattgctcaagtgaaatatggtgatcttcttccagctgacggcatacttattcaaggcaacgatcttaaaattgatgaaagctcattgactggtgaatcagatcatgttaaaaagtctttagataaggatcccttacttctatcaggtactcatgtaatggaaggctctggaagaatggtagttacagctgtaggtgtaaattctcaaactggaattatctttaccttacttggagctggaggtgaagaggaagagaagaaagatgagaagaaaaaggaaaagaaaaataagaaacaagatggagctattgagaatcgcaacaaagcaaaagcccaggatggtgcagccatggaaatgcagccattgaagagtgaagaaggtggagatggtgatgaaaaagataaaaagaaagcaaatttgccaaaaaaggaaaaatctgttttacaagggaaacttacaaaactggctgttcagattggcaaagcaggtctgttgatgtctgccatcacagttatcattctagtattatattttgtcattgacaccttctgggttcagaaaagaccatggcttgctgagtgcacaccaatttatatacaatactttgtgaagttcttcattattggagttacagttttagtggtcgcagtgccagaaggtcttccacttgcagtcacgatctcactggcttattcagtcaaaaaaatgatgaaagataataacttagtaaggcatctggatgcttgtgaaaccatgggaaatgctacagctatttgttcagataaaacaggaactttgacaatgaacagaatgacagtcgttcaagcttacataaatgaaaaacattataaaaaggttcctgaaccagaagctattccaccaaatattttgtcctatcttgtaacaggaatttctgtgaattgtgcttatacatcaaaaatattgccaccagagaaagagggtggattacctcgtcacgttggtaataaaactgaatgtgccttgttgggacttcttttggatttaaaacgggattatcaggatgttagaaatgaaataccagaagaagcactgtacaaagtctacaccttcaattctgttaggaagtccatgagtactgtcctgaaaaattcagatggaagttatcgaatattcagcaagggtgcatctgagataattctgaaaaagtgtttcaaaatcttgagtgctaatggtgaggcaaaagtattcagaccaagggaccgtgatgatattgtaaaaactgtgattgaaccgatggcatcagaaggcttgagaaccatatgtcttgcattcagagattttccagcaggagaaccagaaccagagtgggataatgaaaatgatattgtcaccggccttacatgcattgctgttgtggggattgaagatcctgtgagacctgaggtgccagatgcaattaaaaagtgtcagagggctggaattactgtgcggatggtcactggtgataatattaatactgctcgggccattgctaccaaatgtggtattttacatcctggggaagattttctgtgcctagaaggtaaagattttaacagaagaatacgaaatgaaaaaggagagattgagcacagagaggatacgaccaagatttggcgccaataaatttcgagattaactggcaagagatcatatcgctacatgattaagcatataacctgggttacaagggctaaacttgagcaggacacggctcacagacccacaggccaggttgtaccatcgaacaggtgagtgggtcaacatgtgatgggcccagccttcaaaagaacaattttggacaacgacacgagaattggcggacagattgaagttgatacaagaaacagcagacggaattatataacaacacaaagaacccatatacagataagtatagaaggatgttcgtgttgtgcgacaagtgcttaaagagcagatgcgagattaagaaacaataacgagtagaaagctagcagagagggtgctaagaagcgcaatatgatcagtcaacgagagcacagtgcggtgtgatgttcttttgtctgctttgatctctgatacgacgagttaagataataggtatacgaggaaatgctcgatcggcgactccgttcccgtgtcctctcggcggcgacggagaaggaggtagagaaggagagaagaggaaagaagaagggagaagggcgagaaagaaagatgagagaaggaggaaagaagagacgaggaggaagagagaagagagaggagaggaagggagcgaaggaaggaggagagaaagaaggacagtagataggaagagaaagataggaggaagagaagaggaagaagagaagaggagagaaatggagacgaagaaggagagaggagagaggacgggagagagagagagagagaaagagagagatagagagagagagagagagagagagaggaggagagagagagagagngagacctttcaactctaaaaattgaccctatcaactggagagcccacaaggcatagggaatagagaaaagggaaatgttttcagttttcttttttattttggttatgcttaaatatgaatgtaattaccaaaagatttagaagtgcatgtgctttggaggatttgtattgagcttttacagtattcatttttcaactcaaggcaatggctttctacaccaactctaatccataaacgggtcttatgacatctatgaagtagtagcaagacatgcttagtgtgtatttctctctttgagacactgtaatttctaccagaaatttccagagcattatgtaggtagaaaaaaatgcaagcaagctgttaaagatcttggatcccattatatagtatgtatagctgaaatctgtaattcaatcactttttctcttttatcctctaaccaaaaaattgtttaattttgcatcccaaatgtttttaatctttgtatattttttaaaaatccttttctcctcatcattgccttttttgtggttgtaaatagacttacttgcactttgaagatgagttactccttgtcatcttacaaatatgtgatatggtaattttcataacagatgtcagttttgaaccaagaattggtgatttgtttataagaaaaaaactggcttcatttctgtgaaattgctctttgaaaatttctttttacacgtgtaagccaactgagataccgtgatggtgttgatttctttcaatgatgcttaccatctattttagccactgagccttttattatttgtctatttgtaaagtttatttgtcttaactcatttaataaatatactgtttatctgtttctgaa

SEQ ID NO: 433450 - DNA, 3315 bp, Homo sapiens
cggatgtgtatatctcatgattgatatggagaaactagtcatgggccaaaggtcaagatacttctctgggaaatgttgctgctgatgctgctttacaaagtcatacaatgagtgtttggtttaagaaagattttcatacttaaaagattttcatcttggaaatacatcaagtgaaaattaaattcttttgggaaacattttccttctgatatattatacttgtaatgggcgacatggcaaacaactcagttgcttacagtggtgtgaaaaactctttgaaggaagctaatcatgatggagactttggaattacgctcgcagagctgcgggctctcatggagctcaggtccacagatgcattacgaaaaatacaggaaagctatggagatgtctatggaatttgcaccaaattgaaaacatctcccaatgaaggtttaagtggaaaccctgcagatttagaaagaagagaagcagtgtttggaaagaattttatacctcctaaaaagccaaaaacctttcttcaattagtatgggaagcattacaagatgtcactttaattatattagaaattgcagccatagtatcattgggcctttctttttatcagcctccagaaggggataatgcactttgtggagaagtttctgttggggaggaagaaggtgaaggtgaaactggttggattgaaggagctgcaatcctcttgtctgtagtgtgtgtggtgttagtaacagctttcaatgactggagtaaggaaaaacagtttagaggtttgcagagccgaattgaacaagaacagaagttcactgtcatcaggggtggtcaggtcattcagatacctgtagctgacattactgttggagatattgctcaagtgaaatatggtgatcttcttccagctgacggcatacttattcaaggcaacgatcttaaaattgatgaaagctcattgactggtgaatcagatcatgttaaaaagtctttagataaggatcccttacttctatcaggtactcatgtaatggaaggctctggaagaatggtagttacagctgtaggtgtaaattctcaaactggaattatctttaccttacttggagctggaggtgaagaggaagagaagaaagatgagaagaaaaaggaaaagaaaaataagaaacaagatggagctattgagaatcgcaacaaagcaaaagcccaggatggtgcagccatggaaatgcagccattgaagagtgaagaaggtggagatggtgatgaaaaagataaaaagaaagcaaatttgccaaaaaaggaaaaatctgttttacaagggaaacttacaaaactggctgttcagattggcaaagcaggtctgttgatgtctgccatcacagttatcattctagtattatattttgtcattgacaccttctgggttcagaaaagaccatggcttgctgagtgcacaccaatttatatacaatactttgtgaagttcttcattattggagttacagttttagtggtcgcagtgccagaaggtcttccacttgcagtcacgatctcactggcttattcagtcaaaaaaatgatgaaagataataacttagtaaggcatctggatgcttgtgaaaccatgggaaatgctacagctatttgttcagataaaacaggaactttgacaatgaacagaatgacagtcgttcaagcttacataaatgaaaaacattataaaaaggttcctgaaccagaagctattccaccaaatattttgtcctatcttgtaacaggaatttctgtgaattgtgcttatacatcaaaaatattgccaccagagaaagagggtggattacctcgtcacgttggtaataaaactgaatgtgccttgttgggacttcttttggatttaaaacgggattatcaggatgttagaaatgaaataccagaagaagcactgtacaaagtctacaccttcaattctgttaggaagtccatgagtactgtcctgaaaaattcagatggaagttatcgaatattcagcaagggtgcatctgagataattctgaaaaagtgtttcaaaatcttgagtgctaatggtgaggcaaaagtattcagaccaagggaccgtgatgatattgtaaaaactgtgattgaaccgatggcatcagaaggcttgagaaccatatgtcttgcattcagagattttccagcaggagaaccagaaccagagtgggataatgaaaatgatattgtcaccggccttacatgcattgctgttgtggggattgaagatcctgtgagacctgaggtgccagatgcaattaaaaagtgtcagagggctggaattactgtgcggatggtcactggtgataatattaatactgctcgggccattgctaccaaatgtggtattttacatcctggggaagattttctgtgcctagaaggtaaagattttaacagaagaatacgaaatgaaaaaggagagattgagcaagagaggatagacaagatttggccaaaacttcgagtacttgcaagatcatctcctactgataagcatacactggttaaaggtataattgacagcactgtctcagaccaacgccaggttgtagctgtaactggtgatggtacaaatgatggcccagcactaaagaaagcagatgttggatttgcaatgggtattgctggaactgatgtagctaaagaagcatccgatattattctcacagatgacaactttacaagcattgttaaagcagttatgtggggacgaaatgtctatgacagcatctcaaaattccttcagttccaacttactgttaatgtagtagcagtgattgttgcttttacgggcgcctgcattactcaagactcaccgcttaaggctgtgcagatgctgtgggtaaacctcataatggatacactcgcttccctggctctggcaacggaaccacccactgagtctctcttgcttcggaaaccttatggtagaaataagcctctcatctcacgtacaatgatgaagaatattttgggtcatgcattctatcaacttgtagtagtctttacactcttatttgctggtaagaattcagtgtctaataaagcttcagttaattgtttcttttccaagctaatcatccaagatgttataatgttacaaattttcaagagcgactcagtgggtggttccgttgccagagccagggaagcgagtgtatccattatgaggtttacccacagcatctcacagccttaagcgggagtcctagaaaagatatgtttcctaatagacattcacaactactcaggggctcagccagtct

SEQ ID NO: 433451 - DNA, 2806 bp, Homo sapiens
cggatgtgtatatctcatgattgatatggagaaactagtcatgggccaaaggtcaagatacttctctgggaaatgttgctgctgatgctgctttacaaagtcatacaatgagtgtttggtttaagaaagattttcatacttaaaagattttcatcttggaaatacatcaagtgaaaattaaattcttttgggaaacattttccttctgatatattatacttgtaatgggcgacatggcaaacaactcagttgcttacagtggtgtgaaaaactctttgaaggaagctaatcatgatggagactttggaattacgctcgcagagctgcgggctctcatggagctcaggtccacagatgcattacgaaaaatacaggaaagctatggagatgtctatggaatttgcaccaaattgaaaacatctcccaatgaaggtttaagtggaaaccctgcagatttagaaagaagagaagcagtgtttggaaagaattttatacctcctaaaaagccaaaaacctttcttcaattagtatgggaagcattacaagatgtcactttaattatattagaaattgcagccatagtatcattgggcctttctttttatcagcctccagaaggggataatgcactttgtggagaagtttctgttggggaggaagaaggtgaaggtgaaactggttggattgaaggagctgcaatcctcttgtctgtagtgtgtgtggtgttagtaacagctttcaatgactggagtaaggaaaaacagtttagaggtttgcagagccgaattgaacaagaacagaagttcactgtcatcaggggtggtcaggtcattcagatacctgtagctgacattactgttggagatattgctcaagtgaaatatggtgatcttcttccagctgacggcatacttattcaaggcaacgatcttaaaattgatgaaagctcattgactggtgaatcagatcatgttaaaaagtctttagataaggatcccttacttctatcaggtactcatgtaatggaaggctctggaagaatggtagttacagctgtaggtgtaaattctcaaactggaattatctttaccttacttggagctggaggtgaagaggaagagaagaaagatgagaagaaaaaggaaaagaaaaataagaaacaagatggagctattgagaatcgcaacaaagcaaaagcccaggatggtgcagccatggaaatgcagccattgaagagtgaagaaggtggagatggtgatgaaaaagataaaaagaaagcaaatttgccaaaaaaggaaaaatctgttttacaagggaaacttacaaaactggctgttcagattggcaaagcaggtctgttgatgtctgccatcacagttatcattctagtattatattttgtcattgacaccttctgggttcagaaaagaccatggcttgctgagtgcacaccaatttatatacaatactttgtgaagttcttcattattggagttacagttttagtggtcgcagtgccagaaggtcttccacttgcagtcacgatctcactggcttattcagtcaaaaaaatgatgaaagataataacttagtaaggcatctggatgcttgtgaaaccatgggaaatgctacagctatttgttcagataaaacaggaactttgacaatgaacagaatgacagtcgttcaagcttacataaatgaaaaacattataaaaaggttcctgaaccagaagctattccaccaaatattttgtcctatcttgtaacaggaatttctgtgaattgtgcttatacatcaaaaatattgccaccagagaaagagggtggattacctcgtcacgttggtaataaaactgaatgtgccttgttgggacttcttttggatttaaaacgggattatcaggatgttagaaatgaaataccagaagaagcactgtacaaagtctacaccttcaattctgttaggaagtccatgagtactgtcctgaaaaattcagatggaagttatcgaatattcagcaagggtgcatctgagataattctgaaaaagtgtttcaaaatcttgagtgctaatggtgaggcaaaagtattcagaccaagggaccgtgatgatattgtaaaaactgtgattgaaccgatggcatcagaaggcttgagaaccatatgtcttgcattcagagattttccagcaggagaaccagaaccagagtgggataatgaaaatgatattgtcaccggccttacatgcattgctgttgtggggattgaagatcctgtgagacctgaggtgccagatgcaattaaaaagtgtcagagggctggaattactgtgcggatggtcactggtgataatattaatactgctcgggccattgctaccaaatgtggtattttacatcctggggaagattttctgtgcctagaaggtaaagattttaacagaagaatacgaaatgaaaaaggagaggtaaagatttattattattttgtttttggttgacagatgtttaatatattaggaatttaactcaacaaacacatattgaatatgcactgtgttaggcaccatgcatgaaataaatgcagtctataccttaggaagcaaaatactagtgttctaagggataaaagagagaagtaataaattggtactaaagggagtaagcatttcttgctatgaatgctatataaaagtagcagcagtgaatctaggccaatttcagaagtacagtatgtataagggagtaatgggagatgagttggaaaggctgatatggagcatattttagggggccccaaact

SEQ ID NO: 433452 - DNA, 325 bp, Homo sapiens
tgagattaagaattacagaagcagggaacttgaaagtgacatagagttcttatggaatactttgaatttaataaagtatttattgctataagtaaaattgataaacataattaacacaaaaatatgatttagacgtactatatgtatgttgtcatcaattcaggaatctttttgataagcattttctttctttccaaatagtttgtggagaagtttctgttggggaggaagaaggtgaaggtgaaactggttggattgaaggagctgcaatcctcttgtctgtagtgtgtgtggtgttagtaacagctttcaatgactggagtaa

SEQ ID NO: 433453 - DNA, 301 bp, Homo sapiens
aagaccctgacttaaaaatatatatatatatttatatatatatttatatatttatatttatatatattttttcctaaatgttgaggctgttaaaaacaatattactgaagtttgaaatttggtggtagcaaggagatctatcagtatttttaaaaacaaactatgtttttggttataggtactcatgtaatggaaggctctggaagaatggtagttacagctgtaggtgtaaattctcaaactggaattatctttaccttacttggagctggaggtgaagaggaagagaagaaagatgaga

SEQ ID NO: 433454 - DNA, 568 bp, Homo sapiens
ttttggtggacattctccgttcaagaagctaagacgggttatagtaaattttaaatagatttcaacataaatggttgataacaaagtcagcttcaggtatgcatgttagatgacgtgagactaaccacccatcccgcgggcacccctcgttccaccttgtatgtggctttctgcgttttctccagagcgcacaagggctggtgagaagatgctggaagtgtggcaactcagggtgtttggttgcccaaaagcatgtctggtgtggctttcccagctacctggtgtcatgagactgatcactgagtctcatgatttggtcattgaaacaaccagaaaggtctctgacttctctgtcccctcttctcttcctacgggtcggactcgggaacatcaataggaggtgctcctgtaccctggccacagcccaatcctgccactgctgacatctggggagactttaccaaatctacagggtaaggagggccatgttctgcggaggggctggggccagggccgttgctctacaaacctggtattgttccacatgcctgccttctggtgttaggat

SEQ ID NO: 433455 - DNA, 2066 bp, Homo sapiens
agcggagggagtcgcaccgcttccgtccgtcggacagaggaacggtggaagtcgccggaagttcggtgggctccaggcgtcgcgatggaggagagcgggtacgagtcggtgctctgtgtcaagcctgacgtccacgtctaccgcatccctccgcgggctaccaaccgtggctacagggctgcggagtggcagctggaccagccatcatggagtggccggctgaggatcactgcaaagggacagatggcctacatcaagctggaggacaggacgtcaggggagctctttgctcaggccccggtggatcagtttcctggcacagctgtggagagtgtgacggattccagcaggtacttcgtgatccgcatcgaagatggaaatgggcgacgggcgtttattggaattggcttcggggaccgaggtgatgcctttgacttcaatgttgcattgcaggaccatttcaagtgggtgaaacagcagtgtgaatttgcaaaacaagcccagaacccagaccaaggccctaaactggacctgggcttcaaggagggccagaccatcaagctcaacatcgcaaacatgaagaagaaggaaggagcagctgggaatccccgagtccggcctgccagcacaggagggctgagcctgcttccccctcccccaggggggaaaacctccaccctgatccctccccctggggagcagttggctgtggggggatccctcgtccagccagcagttgctcccagttcaggaggtgctcctgtaccctggccacagcccaatcctgccactgctgacatctggggagactttaccaaatctacaggatcaacttccagccagacccagccaggcacaggctgggtccagttctgacctgagcacggtttttcctcatgtgacttctgggaaggcgctccctcatctgggccaaaggaaggaggacgaagccctcctcagctggcctgtgtttggggcatgaatctctcctctcctccttgtctggctctgttgacaaaccgggcatgtttggcagtaaattggcaccgtgtcacactgtttcctgggattcaagtatgcaaccagaacacaggagaagaaaagctccaggatccctgtccccatctgtcctcttgatgtgagagagactctgagacttcttccatcgcaatgacctgtattaaacacaagccccccaagcaaaagaagaggttgagtttgctgccaggattcagatcagcccttcccagggtctgcaggtgtcacatgatcacagttcagcgggaggctttccgtacccacactggctgtagccacttcagtccatctgccctccagaggaggggtttcttcctgatttttagcaggtttagaggctgcagcttgagctacaatcaggagggaaattggaaggattagcagcttttaaaaatgtttaaatattttgctttgctaatgtgctgatccgcactaactcatctttgcaaaaggaactgctccctcggcgtgccccagctggggcctctgaagggattcctcactgtgggcagctgccctgagcttcaggcagcagtgttcatctctggccagttgtctggtttccatgtattctaggccaggtaggcaacacagagccaaggcgggtgctggaagccagacggaacagtgttggggcaggaaggtggatgctgttgtcatggagctgtgggagttggcactctgtctgctggtggccctctcggctcacatgttcacagtgcagctcctggcagacttgggttttctctttggtggtttctaaagtgccttatctgcaaacaacttcttttctccttcaggaactgtgaatggctagaagaaggagctcagtaaactagaagtccagggttgcttggtttactggtttataagaaatctgaaagcacctctgacattccttttattaactcacctctcagttgaaagatttcttctttgaaaggtcaagaccgtgaactgaaaaaagtgttggcctttttgcgggaccagatttttaagataaaataaatatttttacttctgtcaaa

SEQ ID NO: 433456 - DNA, 2053 bp, Homo sapiens
  misc_feature (17)..(17): n is a, c, g, or t
aaagcaggctggtacgncccggggtgtaaaggtggaagtcgccggaagttcggtgggctccaggcgtcgcgatggaggagagcgggtacgagtcggtgctctgtgtcaagcctgacgtccacgtctaccgcatccctccgcgggctaccaaccgtggctacagggctgcggagtggcagctggaccagccatcatggagtggccggctgaggatcactgcaaagggacagatggcctacatcaagctggaggacaggacgtcaggggagctctttgctcaggccccggtggatcagtttcctggcacagctgtggagagtgtgacggattccagcaggtacttcgtgatccgcatcgaagatggaaatgggcgacgggcgtttattggaattggcttcggggaccgaggtgatgcctttgacttcaatgttgcattgcaggaccatttcaagtgggtgaaacagcagtgtgaatttgcaaaacaagcccagaacccagaccaaggccctaaactggacctgggcttcaaggagggccagaccatcaagctcaacatcgcaaacatgaagaagaaggaaggagcagctgggaatccccgagtccggcctgccagcacaggagggctgagcctgcttccccctcccccaggggggaaaacctccaccctgatccctccccctggggagcagttggctgtggggggatccctcgtccagccagcagttgctcccagttcaggaggtgctcctgtaccctggccacagcccaatcctgccactgctgacatctggggagactttaccaaatctacaggatcaacttccagccagacccagccaggcacaggctgggtccagttctgacctgagcacggtttttcctcatgtgacttctgggaaggcgctccctcatctgggccaaaggaaggaggacgaagccctcctcagctggcctgtgtttggggcatgaatctctcctctcctccttgtctggctctgttgacaaaccgggcatgtttggcagtaaattggcaccgtgtcacactgtttcctgggattcaagtatgcaaccagaacacaggagaagaaaagctccaggatccctgtccccatctgtcctcttgatgtgagagagactctgagacttcttccatcgcaatgacctgtattaaacacaagccccccaagcaaaagaagaggttgagtttgctgccaggattcagatcagcccttcccagggtctgcaggtgtcacatgatcacagttcagcgggaggctttccgtacccacactggctgtagccacttcagtccatctgccctccagaggaggggtttcttcctgatttttagcaggtttagaggctgcagcttgagctacaatcaggagggaaattggaaggattagcagcttttaaaaatgtttaaatattttgctttgctaatgtgctgatccgcactaactcatctttgcaaaaggaactgctccctcggcgtgccccagctggggcctctgaagggattcctcactgtgggcagctgccctgagcttcaggcagcagtgttcatctctggccagttgtctggtttccatgtattctaggccaggtaggcaacacagagccaaggcgggtgctggaagccagacggaacagtgttggggcaggaaggtggatgctgttgtcatggagctgtgggagttggcactctgtctgctggtggccctctcggctcacatgttcacagtgcagctcctggcagacttgggttttctctttggtggtttctaaagtgccttatctgcaaacaacttcttttctccttcaggaactgtgaatggctagaagaaggagctcagtaaactagaagtccagggttgcttggtttactggtttataagaaatctgaaagcacctctgacattccttttattaactcacctctcagttgaaagatttcttctttgaaaggtcaagaccgtgaactgaaaaaagtgttggcctttttgcgggaccagatttttaagataaaataaatatttttacttctgtcaaa

SEQ ID NO: 433457 - DNA, 1855 bp, Homo sapiens
agcggagggagtcgcaccgcttccgtccgtcggacagaggaacggtggaagtcgccggaagttcggtgggctccaggcgtcgcgatggaggagagcgggtacgagtcggtgctctgtgtcaagcctgacgtccacgtctaccgcatccctccgcgggctaccaaccgtggctacagggctgcggagtggcagctggaccagccatcatggagtggccggctgaggatcactgcaaagggacagatggcctacatcaagctggaggacaggacgtcaggggagctctttgctcaggccccggtggatcagtttcctggcacagctgtggagagtgtgacggattccagcaggtacttcgtgatccgcatcgaagatggaaatgggcgacgggcgtttattggaattggcttcggggaccgaggtgatgcctttgacttcaatgttgcattgcaggaccatttcaagtgggtgaaacagcagtgtgaatttgcaaaacaagcccagaacccagaccaaggccctaaactggacctgggcttcaaggagggccagaccatcaagctcaacatcgcaaacatgaagaagaaggaaggagcagctgggaatccccgagtccggcctgccagcacaggagggctgagcctgcttccccctcccccaggggggaaaacctccaccctgatccctccccctggggagcagttggctgtggggggatccctcgtccagccagcagttgctcccagttcaggaggtgctcctgtaccctggccacagcccaatcctgccactgctgacatctggggagactttaccaaatctacaggatcaacttccagccagacccagccaggcacaggctgggtccagttctgacctgagcacggtttttcctcatgtgacttctgggaaggcgctccctcatctgggccaaaggaaggaggacgaagccctcctcagctggcctgtgtttggggcatgaatctctcctctcctccttgtctggctctgttgacaaaccgggcatgtttggcagtaaattggcaccgtgtcacatgatcacagttcagcgggaggctttccgtacccacactggctgtagccacttcagtccatctgccctccagaggaggggtttcttcctgatttttagcaggtttagaggctgcagcttgagctacaatcaggagggaaattggaaggattagcagcttttaaaaatgtttaaatattttgctttgctaatgtgctgatccgcactaactcatctttgcaaaaggaactgctccctcggcgtgccccagctggggcctctgaagggattcctcactgtgggcagctgccctgagcttcaggcagcagtgttcatctctggccagttgtctggtttccatgtattctaggccaggtaggcaacacagagccaaggcgggtgctggaagccagacggaacagtgttggggcaggaaggtggatgctgttgtcatggagctgtgggagttggcactctgtctgctggtggccctctcggctcacatgttcacagtgcagctcctggcagacttgggttttctctttggtggtttctaaagtgccttatctgcaaacaacttcttttctccttcaggaactgtgaatggctagaagaaggagctcagtaaactagaagtccagggttgcttggtttactggtttataagaaatctgaaagcacctctgacattccttttattaactcacctctcagttgaaagatttcttctttgaaaggtcaagaccgtgaactgaaaaaagtgttggcctttttgcgggaccagatttttaagataaaataaatatttttacttctgtcaaa

SEQ ID NO: 433458 - DNA, 4689 bp, Homo sapiens
  misc_feature (17)..(17): n is a, c, g, or t
  misc_feature (1668)..(1668): n is a, c, g, or t
  misc_feature (1732)..(1732): n is a, c, g, or t
  misc_feature (2676)..(2676): n is a, c, g, or t
  misc_feature (3129)..(3129): n is a, c, g, or t
aaagcaggctggtacgncccggggtgtaaaggtggaagtcgccggaagttcggtgggctccaggcgtcgcgatggaggagagcgggtacgagtcggtgctctgtgtcaagcctgacgtccacgtctaccgcatccctccgcgggctaccaaccgtggctacagggctgcggagtggcagctggaccagccatcatggagtggccggctgaggatcactgcaaagggacagatggcctacatcaagctggaggacaggacgtcaggggagctctttgctcaggccccggtggatcagtttcctggcacagctgtggagagtgtgacggattccagcaggtacttcgtgatccgcatcgaagatggaaatgggcgacgggcgtttattggaattggcttcggggaccgaggtgatgcctttgacttcaatgttgcattgcaggaccatttcaagtgggtgaaacagcagtgtgaatttgcaaaacaagcccagaacccagaccaaggccctaaactggacctgggcttcaaggagggccagaccatcaagctcaacatcgcagtgagttctacccttgcttggctgtggtgacgtgatacttgtggccacccagccccagagcccattgctcttcttacagttcagctccttcagttcagcagatgtttagtgagcatctgccttgtgccaggtcctgcatcggggtgaacaagagacctctgttctcatggagctcagagttgagctgagacaggcaggtaaaaatgtgataacaacatggcaggaaaggttccatgactaagggatgccctgggtgccgtgggctcctagaggaagggtgtgcagcccatagttgtgggaaccaaggaaggcttcctggaagaagggacctgtaggcaagggaagagtgatcaaagagtggttcacacagaggaacagcaggtgcaaagcctctgaactgagaaggagcatcagtcatttgctgccagaggtggtgtttctgtcctagctattagagtgcatcaggagggacctgtgtgctcatcccaggctgtgtcttgaataaggaagatttgggagagttctggcaggagggcgttgaggtgggcgctgggagtcctgggcagcttgtgctgatggtgttgtcctggctcctgtgtcttcgttctgagctgctctgcctctggcttccctcccgtcagctcctgttcataggaacaggttgggctgggctgggctgggctgggttgcctaaagttggcctttacctggctgcaagggtggagaggggagatgaggtcagagtcatgattgcggggacccaaggaccaagtggattggtttttgtttttgctaggaatactgtgttgagatggatttgttttttcaagaagctttgtaactctaaaataatgcttttcctctttacttactctttctcctcttttctgcttcgtgctggtgatgatttgggatccttgaagttggccagctggcccttaagagagaaatgcaagtccaatccagtggactggttgggatgtgattctttctctcgcttggaggaaactaacatttaatgagcatcagctgagggccaggtagtggtttttttttgttttgttttgttttttgttttgttttgttgttttttttttttaggcatttntcatgtgaattaaacatcctctccctttcctccatgagatgaggaaatggaggcttagggaggnttggggacttgcccagggtcacagagctagaaataactggcacagctgtgctcacactgaggtctttgaggtcttttgacttcagggctggacttacgattttattaagctgctgctttccttacaagtagggaacacattatcttcatctgtgtaacttgtgctgctttctggctcatgcttggtgctcagttttttttttaaagcattttcttgaagtataatgtgcatgtaaaaaagtgtacaaatcataaatgcagaactctgtgaaatttaaaaaatctaatctataggctgggagtggtggctcacgcctgtaatcccagcactttgggaggctgaggtgggcggatcacctgaggtcgggagtccgagaccagcctgaccaacatggacaaaccctgtctctactaaaaatacaaaattagccgggcatggtggtccatggctgtaatcccagctactccgggggctgaggcaggagaattggcttgaacctgggaggtggaggttgcagtgagctgagatcgagccattcattgcactccagcctggacaacaagagcgaaactctggctcaaaaaacaaaacaaaacaaaacacccaatttataaacttgcaccttgctcaagatgcaaaagattgtcagcactctggaaacacctctcctggcccctcccagtaactgccctgagtaaccccatcctgacttcacataccctagattttgtttgttcttaactttcatgaattgaatcatacacctaatcttgatttggaatgatttctttcttttactcaatgtaatttttgtgagagtcatccatggtgttgcgtgtagtttgttcattctcattgttgtggcatgtaccattgtgagaattcacccgatttatttatgttttactgatgatggacatttgggtagtttccagtttggggcnattacaaataatgctgctgtagatgtttgagttcatgtttttggtgcatatatgtatgatttctgttggtttatatctaggagtggaactgcggagtcataagtttaagttcctatgttgagctttataatcctttcaaataatttttcaaagtagttttaccagtttacacttaagccagcagcgcgtgaatggttacttcatatcgtagtcaatacttgataatctacattttagccattctggtgagcgtgtaatggtatatcattatagctttgatctgcatttccctgatgaatgaagtgggggtgctgggttttaaaatggaccttatttgtgagagattcagaatgatgatgcactaagtatagctcatagcaatggaggtgctaggtaggaccatcttttggttacacagatgttgggggtctggggtcaccttggccctccttntggggttttctggtagcattgggactccagcagaacgggctgatttgcattcctcttccctctttagaacatgaagaagaaggaaggagcagctgggaatccccgagtccggcctgccagcacaggagggctgagcctgcttccccctcccccaggggggaaaacctccaccctgatccctccccctggggagcagttggctgtggggggatccctcgtccagccagcagttgctcccagttcaggaggtgctcctgtaccctggccacagcccaatcctgccactgctgacatctggggagactttaccaaatctacaggatcaacttccagccagacccagccaggcacaggctgggtccagttctgacctgagcacggtttttcctcatgtgacttctgggaaggcgctccctcatctgggccaaaggaaggaggacgaagccctcctcagctggcctgtgtttggggcatgaatctctcctctcctccttgtctggctctgttgacaaaccgggcatgtttggcagtaaattggcaccgtgtcacactgtttcctgggattcaagtatgcaaccagaacacaggagaagaaaagctccaggatccctgtccccatctgtcctcttgatgtgagagagactctgagacttcttccatcgcaatgacctgtattaaacacaagccccccaagcaaaagaagaggttgagtttgctgccaggattcagatcagcccttcccagggtctgcaggtgtcacatgatcacagttcagcgggaggctttccgtacccacactggctgtagccacttcagtccatctgccctccagaggaggggtttcttcctgatttttagcaggtttagaggctgcagcttgagctacaatcaggagggaaattggaaggattagcagcttttaaaaatgtttaaatattttgctttgctaatgtgctgatccgcactaactcatctttgcaaaaggaactgctccctcggcgtgccccagctggggcctctgaagggattcctcactgtgggcagctgccctgagcttcaggcagcagtgttcatctctggccagttgtctggtttccatgtattctaggccaggtaggcaacacagagccaaggcgggtgctggaagccagacggaacagtgttggggcaggaaggtggatgctgttgtcatggagctgtgggagttggcactctgtctgctggtggccctctcggctcacatgttcacagtgcagctcctggcagacttgggttttctctttggtggtttctaaagtgccttatctgcaaacaacttcttttctccttcaggaactgtgaatggctagaagaaggagctcagtaaactagaagtccagggttgcttggtttactggtttataagaaatctgaaagcacctctgacattccttttattaactcacctctcagttgaaagatttcttctttgaaaggtcaagaccgtgaactgaaaaaagtgttggcctttttgcgggaccagatttttaagataaaataaatatttttacttctgtcaaa

SEQ ID NO: 433459 - DNA, 1975 bp, Homo sapiens
  misc_feature (17)..(17): n is a, c, g, or t
aaagcaggctggtacgncccggggtgtaaaggtggaagtcgccggaagttcggtgggctccaggcgtcgcgatggaggagagcggggctgcggagtggcagctggaccagccatcatggagtggccggctgaggatcactgcaaagggacagatggcctacatcaagctggaggacaggacgtcaggggagctctttgctcaggccccggtggatcagtttcctggcacagctgtggagagtgtgacggattccagcaggtacttcgtgatccgcatcgaagatggaaatgggcgacgggcgtttattggaattggcttcggggaccgaggtgatgcctttgacttcaatgttgcattgcaggaccatttcaagtgggtgaaacagcagtgtgaatttgcaaaacaagcccagaacccagaccaaggccctaaactggacctgggcttcaaggagggccagaccatcaagctcaacatcgcaaacatgaagaagaaggaaggagcagctgggaatccccgagtccggcctgccagcacaggagggctgagcctgcttccccctcccccaggggggaaaacctccaccctgatccctccccctggggagcagttggctgtggggggatccctcgtccagccagcagttgctcccagttcaggaggtgctcctgtaccctggccacagcccaatcctgccactgctgacatctggggagactttaccaaatctacaggatcaacttccagccagacccagccaggcacaggctgggtccagttctgacctgagcacggtttttcctcatgtgacttctgggaaggcgctccctcatctgggccaaaggaaggaggacgaagccctcctcagctggcctgtgtttggggcatgaatctctcctctcctccttgtctggctctgttgacaaaccgggcatgtttggcagtaaattggcaccgtgtcacactgtttcctgggattcaagtatgcaaccagaacacaggagaagaaaagctccaggatccctgtccccatctgtcctcttgatgtgagagagactctgagacttcttccatcgcaatgacctgtattaaacacaagccccccaagcaaaagaagaggttgagtttgctgccaggattcagatcagcccttcccagggtctgcaggtgtcacatgatcacagttcagcgggaggctttccgtacccacactggctgtagccacttcagtccatctgccctccagaggaggggtttcttcctgatttttagcaggtttagaggctgcagcttgagctacaatcaggagggaaattggaaggattagcagcttttaaaaatgtttaaatattttgctttgctaatgtgctgatccgcactaactcatctttgcaaaaggaactgctccctcggcgtgccccagctggggcctctgaagggattcctcactgtgggcagctgccctgagcttcaggcagcagtgttcatctctggccagttgtctggtttccatgtattctaggccaggtaggcaacacagagccaaggcgggtgctggaagccagacggaacagtgttggggcaggaaggtggatgctgttgtcatggagctgtgggagttggcactctgtctgctggtggccctctcggctcacatgttcacagtgcagctcctggcagacttgggttttctctttggtggtttctaaagtgccttatctgcaaacaacttcttttctccttcaggaactgtgaatggctagaagaaggagctcagtaaactagaagtccagggttgcttggtttactggtttataagaaatctgaaagcacctctgacattccttttattaactcacctctcagttgaaagatttcttctttgaaaggtcaagaccgtgaactgaaaaaagtgttggcctttttgcgggaccagatttttaagataaaataaatatttttacttctgtcaaa

SEQ ID NO: 433460 - DNA, 1990 bp, Homo sapiens
agcggagggagtcgcaccgcttccgtccgtcggacagaggaacggtggaagtcgccggaagttcggtgggctccaggcgtcgcgatggaggagagcgggtacgagtcggtgctctgtgtcaagcctgacgtccacgtctaccgcatccctccgcgggctaccaaccgtggctacagggctgcggagtggcagctggaccagccatcatggagtggccggctgaggatcactgcaaagggacagatggcctacatcaagctggaggacaggacgtcaggggagctctttgctcaggccccggtggatcagtttcctggcacagctgtggagagtgtgacggattccagcaggtacttcgtgatccgcatcgaagatggaaatgggcgacgggcgtttattggaattggcttcggggaccgaggtgatgcctttgacttcaatgttgcattgcaggaccatttcaagtgggtgaaacagcagtgtgaatttgcaaaacaagcccagaacccagaccaaggccctaaactggacctgggcttcaaggagggccagaccatcaagctcaacatcgcaaacatgaagaagaaggaaggagcagctgggaatccccgagtccggcctgccagcacaggagggctgagcctgcttccccctcccccaggggggaaaacctccaccctgatccctccccctggggagcagttggctgtggggggatccctcgtccagccagcagttgctcccagttcagatcaacttccagccagacccagccaggcacaggctgggtccagttctgacctgagcacggtttttcctcatgtgacttctgggaaggcgctccctcatctgggccaaaggaaggaggacgaagccctcctcagctggcctgtgtttggggcatgaatctctcctctcctccttgtctggctctgttgacaaaccgggcatgtttggcagtaaattggcaccgtgtcacactgtttcctgggattcaagtatgcaaccagaacacaggagaagaaaagctccaggatccctgtccccatctgtcctcttgatgtgagagagactctgagacttcttccatcgcaatgacctgtattaaacacaagccccccaagcaaaagaagaggttgagtttgctgccaggattcagatcagcccttcccagggtctgcaggtgtcacatgatcacagttcagcgggaggctttccgtacccacactggctgtagccacttcagtccatctgccctccagaggaggggtttcttcctgatttttagcaggtttagaggctgcagcttgagctacaatcaggagggaaattggaaggattagcagcttttaaaaatgtttaaatattttgctttgctaatgtgctgatccgcactaactcatctttgcaaaaggaactgctccctcggcgtgccccagctggggcctctgaagggattcctcactgtgggcagctgccctgagcttcaggcagcagtgttcatctctggccagttgtctggtttccatgtattctaggccaggtaggcaacacagagccaaggcgggtgctggaagccagacggaacagtgttggggcaggaaggtggatgctgttgtcatggagctgtgggagttggcactctgtctgctggtggccctctcggctcacatgttcacagtgcagctcctggcagacttgggttttctctttggtggtttctaaagtgccttatctgcaaacaacttcttttctccttcaggaactgtgaatggctagaagaaggagctcagtaaactagaagtccagggttgcttggtttactggtttataagaaatctgaaagcacctctgacattccttttattaactcacctctcagttgaaagatttcttctttgaaaggtcaagaccgtgaactgaaaaaagtgttggcctttttgcgggaccagatttttaagataaaataaatatttttacttctgtcaaa

SEQ ID NO: 433461 - DNA, 2012 bp, Homo sapiens
agcggagggagtcgcaccgcttccgtccgtcggacagaggaacggtggaagtcgccggaagttcggtgggctccaggcgtcgcgatggaggagagcgggtacgagtcggtgctctgtgtcaagcctgacgtccacgtctaccgcatccctccgcgggctaccaaccgtggctacagggctgcggagtggcagctggaccagccatcatggagtggccggctgaggatcactgcaaagggacagatggcctacatcaagctggaggacaggacgtcaggggagctctttgctcaggccccggtggatcagtttcctggcacagctgtggagagtgtgacggattccagcaggtacttcgtgatccgcatcgaagatggaaatgggcgacgggcgtttattggaattggcttcggggaccgaggtgatgcctttgacttcaatgttgcattgcaggaccatttcaagtgggtgaaacagcagtgtgaatttgcaaaacaagcccagaacccagaccaaggccctaaactggacctgggcttcaaggagggccagaccatcaagctcaacatcgcaaacatgaagaagaaggaaggagcagctgggaatccccgagtccggcctgccagcacaggagggctgagcctgcttccccctcccccaggggggaaaacctccaccctgatccctccccctggggagcagttggctgtggggggatccctcgtccagccagcagttgctcccagttcaggaggtgctcctgtaccctggccacagcccaatcctgccactgctgacatctggggagactttaccaaatctacaggatcaacttccagccagacccagccaggcacaggctgggtccagttctgacctgagcacggtttttcctcatgtgacttctgggaaggcgctccctcatctgggccaaaggaaggaggacgaagccctcctcagctggcctgtgtttggggcatgaatctctcctctcctccttgtctggctctgttgacaaaccgggcatgtttggcagtaaattggcaccgtgtcacactgtttcctgggattcaagtatgcaaccagaacacaggagaagaaaagctccaggatccctgtccccatctgtcctcttgatgtgagagagactctgagacttcttccatcgcaatgacctgtattaaacacaagccccccaagcaaaagaagaggttgagtttgctgccaggattcagatcagcccttcccagggtctgcaggtgtcacatgatcacagttcagcgggaggctttccgtacccacactggctgtagccacttcagtccatctgccctccagaggaggggtttcttcctgatttttagcaggtttagaggctgcagcttgagctacaatcaggagggaaattggaaggattagcagcttttaaaaatgtttaaatattttgctttgctaatgtgctgatccgcactaactcatctttgcaatgtgggcagctgccctgagcttcaggcagcagtgttcatctctggccagttgtctggtttccatgtattctaggccaggtaggcaacacagagccaaggcgggtgctggaagccagacggaacagtgttggggcaggaaggtggatgctgttgtcatggagctgtgggagttggcactctgtctgctggtggccctctcggctcacatgttcacagtgcagctcctggcagacttgggttttctctttggtggtttctaaagtgccttatctgcaaacaacttcttttctccttcaggaactgtgaatggctagaagaaggagctcagtaaactagaagtccagggttgcttggtttactggtttataagaaatctgaaagcacctctgacattccttttattaactcacctctcagttgaaagatttcttctttgaaaggtcaagaccgtgaactgaaaaaagtgttggcctttttgcgggaccagatttttaagataaaataaatatttttacttctgtcaaa

SEQ ID NO: 433462 - DNA, 2507 bp, Homo sapiens
agcggagggagtcgcaccgcttccgtccgtcggacagaggaacggtggaagtcgccggaagttcggtgggctccaggcgtcgcgatggaggagagcgggtacgagtcggtgctctgtgtcaagcctgacgtccacgtctaccgcatccctccgcgggctaccaaccgtggctacagggctgcggagtggcagctggaccagccatcatggagtggccggctgaggatcactgcaaagggacagatggcctacatcaagctggaggacaggacgtcaggggagctctttgctcaggccccggtggatcagtttcctggcacagctgtggagagtgtgacggattccagcaggtacttcgtgatccgcatcgaagatggaaatgggcgacgggcgtttattggaattggcttcggggaccgaggtgatgcctttgacttcaatgttgcattgcaggaccatttcaagtgggtgaaacagcagtgtgaatttgcaaaacaagcccagaacccagaccaaggccctaaactggacctgggcttcaaggagggccagaccatcaagctcaacatcgcaaacatgaagaagaaggaaggagcagctgggaatccccgagtccggcctgccagcacaggagggctgagcctgcttccccctcccccaggggggaaaacctccaccctgatccctccccctggggagcagttggctgtggggggatccctcgtccagccagcagttgctcccagttcaggaggtgctcctgtaccctggccacagcccaatcctgccactgctgacatctggggagactttaccaaatctacaggatcaacttccagccagacccagccaggcacaggctgggtccagttctgacctgagcacggtttttcctcatgtgacttctgggaaggcgctccctcatctgggccaaaggaaggaggacgaagccctcctcagctggcctgtgtttggggcatgaatctctcctctcctccttgtctggctctgttgacaaaccgggcatgtttggcagtaaattggcaccgtgtcacactgtttcctgggattcaagtatgcaaccagaacacaggagaagaaaagctccaggatccctgtccccatctgtcctcttgatgtgagagagactctgagacttcttccatcgcaatgacctgtattaaacacaagccccccaagcaaaagaagaggttgagtttgctgccaggattcagatcagcccttcccagggtctgcaggtgtcacatgatcacagttcagcgggaggctttccgtacccacactggctgtagccacttcagtccatctgccctccagaggaggggtttcttcctgatttttagcaggtttagaggctgcagcttgagctacaatcaggagggaaattggaaggattagcagcttttaaaaatgtttaaatattttgctttgctaatgtgctgatccgcactaactcatctttgcaaaaggaactgctccctcggcgtgccccagctggggcctctgaagggattcctcactgtgggcagctgccctgagcttcaggcagcagtgttcatctctggccagttgtctggtttccatgtattctaggccaggtaggcaacacagagccaaggcgggtgctggaagccagacggaacagtgttggggcaggaaggtggatgctgttgtcatggagctgtgggagttggcactctgtctgctggtggccctctcggctcacatgttcacagtgcagctcctggcagacttgggttttctctttggtggtttctaaagtgccttatctgcaaacaacttcttttctccttcaggaactgtgaatggctagaagaaggagctcagtaaactagaagtccagggttgcttggtttactggtttataagaaatctgaaagcacctctgacattccttttattaactcacctctcagttgaaagatttcttctttgaaaggtcaagaccgtgaactgaaaaaagtgttggcctttttgcgggaccagatttttaagataaaataaatatttttacttctgtcaaattgtatgtgaaagatgaatgtgtttctggccgcgtggctgttaaactcttcagggtgccacagctagactcacggccacttctctcaccactgaccaagtgtccagattgaaagttcagggctggggtgtgaggctggccaaagtgaggaaatgcaaccttgttgtctaaggcaatcggtaccttctctcctgtgttctctaggatagtacagtcttttcatcatcctttggttgatgtgaaagtagttgcttgaatcactttgtgtggggcttaattctcttgtggcgtctcatgatacaggccgttctagagagcctggccccttgctttccgtcttccaccaaacctaccggcagagcatctccctaagtagtaaaggggtgcagatacccagaggtcaaaagtaaaattggcacccggctgttagaccccatttctt

SEQ ID NO: 433463 - DNA, 3683 bp, Homo sapiens
  misc_feature (662)..(662): n is a, c, g, or t
  misc_feature (726)..(726): n is a, c, g, or t
  misc_feature (1670)..(1670): n is a, c, g, or t
  misc_feature (2123)..(2123): n is a, c, g, or t
ccccttccaacatctcatccctccttccaacatctcatcccaggctgtgtcttgaataaggaagatttgggagagttctggcaggagggcgttgaggtgggcgctgggagtcctgggcagcttgtgctgatggtgttgtcctggctcctgtgtcttcgttctgagctgctctgcctctggcttccctcccgtcagctcctgttcataggaacaggttgggctgggctgggctgggctgggttgcctaaagttggcctttacctggctgcaagggtggagaggggagatgaggtcagagtcatgattgcggggacccaaggaccaagtggattggtttttgtttttgctaggaatactgtgttgagatggatttgttttttcaagaagctttgtaactctaaaataatgcttttcctctttacttactctttctcctcttttctgcttcgtgctggtgatgatttgggatccttgaagttggccagctggcccttaagagagaaatgcaagtccaatccagtggactggttgggatgtgattctttctctcgcttggaggaaactaacatttaatgagcatcagctgagggccaggtagtggtttttttttgttttgttttgttttttgttttgttttgttgttttttttttttaggcatttntcatgtgaattaaacatcctctccctttcctccatgagatgaggaaatggaggcttagggaggnttggggacttgcccagggtcacagagctagaaataactggcacagctgtgctcacactgaggtctttgaggtcttttgacttcagggctggacttacgattttattaagctgctgctttccttacaagtagggaacacattatcttcatctgtgtaacttgtgctgctttctggctcatgcttggtgctcagttttttttttaaagcattttcttgaagtataatgtgcatgtaaaaaagtgtacaaatcataaatgcagaactctgtgaaatttaaaaaatctaatctataggctgggagtggtggctcacgcctgtaatcccagcactttgggaggctgaggtgggcggatcacctgaggtcgggagtccgagaccagcctgaccaacatggacaaaccctgtctctactaaaaatacaaaattagccgggcatggtggtccatggctgtaatcccagctactccgggggctgaggcaggagaattggcttgaacctgggaggtggaggttgcagtgagctgagatcgagccattcattgcactccagcctggacaacaagagcgaaactctggctcaaaaaacaaaacaaaacaaaacacccaatttataaacttgcaccttgctcaagatgcaaaagattgtcagcactctggaaacacctctcctggcccctcccagtaactgccctgagtaaccccatcctgacttcacataccctagattttgtttgttcttaactttcatgaattgaatcatacacctaatcttgatttggaatgatttctttcttttactcaatgtaatttttgtgagagtcatccatggtgttgcgtgtagtttgttcattctcattgttgtggcatgtaccattgtgagaattcacccgatttatttatgttttactgatgatggacatttgggtagtttccagtttggggcnattacaaataatgctgctgtagatgtttgagttcatgtttttggtgcatatatgtatgatttctgttggtttatatctaggagtggaactgcggagtcataagtttaagttcctatgttgagctttataatcctttcaaataatttttcaaagtagttttaccagtttacacttaagccagcagcgcgtgaatggttacttcatatcgtagtcaatacttgataatctacattttagccattctggtgagcgtgtaatggtatatcattatagctttgatctgcatttccctgatgaatgaagtgggggtgctgggttttaaaatggaccttatttgtgagagattcagaatgatgatgcactaagtatagctcatagcaatggaggtgctaggtaggaccatcttttggttacacagatgttgggggtctggggtcaccttggccctccttntggggttttctggtagcattgggactccagcagaacgggctgatttgcattcctcttccctctttagaacatgaagaagaaggaaggagcagctgggaatccccgagtccggcctgccagcacaggagggctgagcctgcttccccctcccccaggggggaaaacctccaccctgatccctccccctggggagcagttggctgtggggggatccctcgtccagccagcagttgctcccagttcaggaggtgctcctgtaccctggccacagcccaatcctgccactgctgacatctggggagactttaccaaatctacaggatcaacttccagccagacccagccaggcacaggctgggtccagttctgacctgagcacggtttttcctcatgtgacttctgggaaggcgctccctcatctgggccaaaggaaggaggacgaagccctcctcagctggcctgtgtttggggcatgaatctctcctctcctccttgtctggctctgttgacaaaccgggcatgtttggcagtaaattggcaccgtgtcacactgtttcctgggattcaagtatgcaaccagaacacaggagaagaaaagctccaggatccctgtccccatctgtcctcttgatgtgagagagactctgagacttcttccatcgcaatgacctgtattaaacacaagccccccaagcaaaagaagaggttgagtttgctgccaggattcagatcagcccttcccagggtctgcaggtgtcacatgatcacagttcagcgggaggctttccgtacccacactggctgtagccacttcagtccatctgccctccagaggaggggtttcttcctgatttttagcaggtttagaggctgcagcttgagctacaatcaggagggaaattggaaggattagcagcttttaaaaatgtttaaatattttgctttgctaatgtgctgatccgcactaactcatctttgcaaaaggaactgctccctcggcgtgccccagctggggcctctgaagggattcctcactgtgggcagctgccctgagcttcaggcagcagtgttcatctctggccagttgtctggtttccatgtattctaggccaggtaggcaacacagagccaaggcgggtgctggaagccagacggaacagtgttggggcaggaaggtggatgctgttgtcatggagctgtgggagttggcactctgtctgctggtggccctctcggctcacatgttcacagtgcagctcctggcagacttgggttttctctttggtggtttctaaagtgccttatctgcaaacaacttcttttctccttcaggaactgtgaatggctagaagaaggagctcagtaaactagaagtccagggttgcttggtttactggtttataagaaatctgaaagcacctctgacattccttttattaactcacctctcagttgaaagatttcttctttgaaaggtcaagaccgtgaactgaaaaaagtgttggcctttttgcgggaccagatttttaagataaaataaatatttttacttctgtcaaa

SEQ ID NO: 433464 - DNA, 1712 bp, Homo sapiens
ttttggtggacattctccgttcaagaagctaagacgggttatagtaaattttaaatagatttcaacataaatggttgataacaaagtcagcttcaggtatgcatgttagatgacgtgagactaaccacccatcccgcgggcacccctcgttccaccttgtatgtggctttctgcgttttctccagagcgcacaagggctggtgagaagatgctggaagtgtggcaactcagggtgtttggttgcccaaaagcatgtctggtgtggctttcccagctacctggtgtcatgagactgatcactgagtctcatgatttggtcattgaaacaaccagaaaggtctctgacttctctgtcccctcttctcttcctacgggtcggactcgggaacatcaataggaggtgctcctgtaccctggccacagcccaatcctgccactgctgacatctggggagactttaccaaatctacaggatcaacttccagccagacccagccaggcacaggctgggtccagttctgacctgagcacggtttttcctcatgtgacttctgggaaggcgctccctcatctgggccaaaggaaggaggacgaagccctcctcagctggcctgtgtttggggcatgaatctctcctctcctccttgtctggctctgttgacaaaccgggcatgtttggcagtaaattggcaccgtgtcacactgtttcctgggattcaagtatgcaaccagaacacaggagaagaaaagctccaggatccctgtccccatctgtcctcttgatgtgagagagactctgagacttcttccatcgcaatgacctgtattaaacacaagccccccaagcaaaagaagaggttgagtttgctgccaggattcagatcagcccttcccagggtctgcaggtgtcacatgatcacagttcagcgggaggctttccgtacccacactggctgtagccacttcagtccatctgccctccagaggaggggtttcttcctgatttttagcaggtttagaggctgcagcttgagctacaatcaggagggaaattggaaggattagcagcttttaaaaatgtttaaatattttgctttgctaatgtgctgatccgcactaactcatctttgcaaaaggaactgctccctcggcgtgccccagctggggcctctgaagggattcctcactgtgggcagctgccctgagcttcaggcagcagtgttcatctctggccagttgtctggtttccatgtattctaggccaggtaggcaacacagagccaaggcgggtgctggaagccagacggaacagtgttggggcaggaaggtggatgctgttgtcatggagctgtgggagttggcactctgtctgctggtggccctctcggctcacatgttcacagtgcagctcctggcagacttgggttttctctttggtggtttctaaagtgccttatctgcaaacaacttcttttctccttcaggaactgtgaatggctagaagaaggagctcagtaaactagaagtccagggttgcttggtttactggtttataagaaatctgaaagcacctctgacattccttttattaactcacctctcagttgaaagatttcttctttgaaaggtcaagaccgtgaactgaaaaaagtgttggcctttttgcgggaccagatttttaagataaaataaatatttttacttctgtcaaa

SEQ ID NO: 433465 - DNA, 1299 bp, Homo sapiens
cgaaccgccagtgactgtgcgagctccgatacggacggggagaggaaaagggagccttggatcaacttccagccagacccagccaggcacaggctgggtccagttctgacctgagcacggtttttcctcatgtgacttctgggaaggcgctccctcatctgggccaaaggaaggaggacgaagccctcctcagctggcctgtgtttggggcatgaatctctcctctcctccttgtctggctctgttgacaaaccgggcatgtttggcagtaaattggcaccgtgtcacactgtttcctgggattcaagtatgcaaccagaacacaggagaagaaaagctccaggatccctgtccccatctgtcctcttgatgtgagagagactctgagacttcttccatcgcaatgacctgtattaaacacaagccccccaagcaaaagaagaggttgagtttgctgccaggattcagatcagcccttcccagggtctgcaggtgtcacatgatcacagttcagcgggaggctttccgtacccacactggctgtagccacttcagtccatctgccctccagaggaggggtttcttcctgatttttagcaggtttagaggctgcagcttgagctacaatcaggagggaaattggaaggattagcagcttttaaaaatgtttaaatattttgctttgctaatgtgctgatccgcactaactcatctttgcaaaaggaactgctccctcggcgtgccccagctggggcctctgaagggattcctcactgtgggcagctgccctgagcttcaggcagcagtgttcatctctggccagttgtctggtttccatgtattctaggccaggtaggcaacacagagccaaggcgggtgctggaagccagacggaacagtgttggggcaggaaggtggatgctgttgtcatggagctgtgggagttggcactctgtctgctggtggccctctcggctcacatgttcacagtgcagctcctggcagacttgggttttctctttggtggtttctaaagtgccttatctgcaaacaacttcttttctccttcaggaactgtgaatggctagaagaaggagctcagtaaactagaagtccagggttgcttggtttactggtttataagaaatctgaaagcacctctgacattccttttattaactcacctctcagttgaaagatttcttctttgaaaggtcaagaccgtgaactgaaaaaagtgttggcctttttgcgggaccagatttttaagataaaataaatatttttacttctgtcaaa

SEQ ID NO: 433466 - DNA, 1294 bp, Homo sapiens
agcagcgcggcccggcgcgcgcgccggtgccgggcgcaagggggggtaggtacacatcaacttccagccagacccagccaggcacaggctgggtccagttctgacctgagcacggtttttcctcatgtgacttctgggaaggcgctccctcatctgggccaaaggaaggaggacgaagccctcctcagctggcctgtgtttggggcatgaatctctcctctcctccttgtctggctctgttgacaaaccgggcatgtttggcagtaaattggcaccgtgtcacactgtttcctgggattcaagtatgcaaccagaacacaggagaagaaaagctccaggatccctgtccccatctgtcctcttgatgtgagagagactctgagacttcttccatcgcaatgacctgtattaaacacaagccccccaagcaaaagaagaggttgagtttgctgccaggattcagatcagcccttcccagggtctgcaggtgtcacatgatcacagttcagcgggaggctttccgtacccacactggctgtagccacttcagtccatctgccctccagaggaggggtttcttcctgatttttagcaggtttagaggctgcagcttgagctacaatcaggagggaaattggaaggattagcagcttttaaaaatgtttaaatattttgctttgctaatgtgctgatccgcactaactcatctttgcaaaaggaactgctccctcggcgtgccccagctggggcctctgaagggattcctcactgtgggcagctgccctgagcttcaggcagcagtgttcatctctggccagttgtctggtttccatgtattctaggccaggtaggcaacacagagccaaggcgggtgctggaagccagacggaacagtgttggggcaggaaggtggatgctgttgtcatggagctgtgggagttggcactctgtctgctggtggccctctcggctcacatgttcacagtgcagctcctggcagacttgggttttctctttggtggtttctaaagtgccttatctgcaaacaacttcttttctccttcaggaactgtgaatggctagaagaaggagctcagtaaactagaagtccagggttgcttggtttactggtttataagaaatctgaaagcacctctgacattccttttattaactcacctctcagttgaaagatttcttctttgaaaggtcaagaccgtgaactgaaaaaagtgttggcctttttgcgggaccagatttttaagataaaataaatatttttacttctgtcaaa

SEQ ID NO: 433467 - DNA, 974 bp, Homo sapiens
  misc_feature (14)..(14): n is a, c, g, or t
  misc_feature (66)..(66): n is a, c, g, or t
tttactgagctccntcttctagccattcacagttcctgaaggagaaaagaagttgtttgcagatangcactttagaaaccaccaaagagaaaacacaagccccccaagcaaaagaagaggttgagtttgctgccaggattcagatcagcccttcccagggtctgcaggtgtcacatgatcacagttcagcgggaggctttccgtacccacactggctgtagccacttcagtccatctgccctccagaggaggggtttcttcctgatttttagcaggtttagaggctgcagcttgagctacaatcaggagggaaattggaaggattagcagcttttaaaaatgtttaaatattttgctttgctaatgtgctgatccgcactaactcatctttgcaaaaggaactgctccctcggcgtgccccagctggggcctctgaagggattcctcactgtgggcagctgccctgagcttcaggcagcagtgttcatctctggccagttgtctggtttccatgtattctaggccaggtaggcaacacagagccaaggcgggtgctggaagccagacggaacagtgttggggcaggaaggtggatgctgttgtcatggagctgtgggagttggcactctgtctgctggtggccctctcggctcacatgttcacagtgcagctcctggcagacttgggttttctctttggtggtttctaaagtgccttatctgcaaacaacttcttttctccttcaggaactgtgaatggctagaagaaggagctcagtaaactagaagtccagggttgcttggtttactggtttataagaaatctgaaagcacctctgacattccttttattaactcacctctcagttgaaagatttcttctttgaaaggtcaagaccgtgaactgaaaaaagtgttggcctttttgcgggaccagatttttaagataaaataaatatttttacttctgtcaaa

SEQ ID NO: 433468 - DNA, 846 bp, Homo sapiens
  misc_feature (14)..(14): n is a, c, g, or t
  misc_feature (66)..(66): n is a, c, g, or t
tttactgagctccntcttctagccattcacagttcctgaaggagaaaagaagttgtttgcagatanggctttccgtacccacactggctgtagccacttcagtccatctgccctccagaggaggggtttcttcctgatttttagcaggtttagaggctgcagcttgagctacaatcaggagggaaattggaaggattagcagcttttaaaaatgtttaaatattttgctttgctaatgtgctgatccgcactaactcatctttgcaaaaggaactgctccctcggcgtgccccagctggggcctctgaagggattcctcactgtgggcagctgccctgagcttcaggcagcagtgttcatctctggccagttgtctggtttccatgtattctaggccaggtaggcaacacagagccaaggcgggtgctggaagccagacggaacagtgttggggcaggaaggtggatgctgttgtcatggagctgtgggagttggcactctgtctgctggtggccctctcggctcacatgttcacagtgcagctcctggcagacttgggttttctctttggtggtttctaaagtgccttatctgcaaacaacttcttttctccttcaggaactgtgaatggctagaagaaggagctcagtaaactagaagtccagggttgcttggtttactggtttataagaaatctgaaagcacctctgacattccttttattaactcacctctcagttgaaagatttcttctttgaaaggtcaagaccgtgaactgaaaaaagtgttggcctttttgcgggaccagatttttaagataaaataaatatttttacttctgtcaaa

SEQ ID NO: 433469 - DNA, 941 bp, Homo sapiens
agcggagggagtcgcaccgcttccgtccgtcggacagaggaacggtggaagtcgccggaagttcggtgggctccaggcgtcgcgatggaggagagcgggtacgagtcggtgctctgtgtcaagcctgacgtccacgtctaccgcatccctccgcgggctaccaaccgtggctacagggctgcggagtggcagctggaccagccatcatggagtggccggctgaggatcactgcaaagggacagatggcctacatcaagctggaggacaggacgtcaggggagctctttgctcaggccccggtggatcagtttcctggcacagctgtggagagtgtgacggattccagcaggtacttcgtgatccgcatcgaagatggaaatgggcgacgggcgtttattggaattggcttcggggaccgaggtgatgcctttgacttcaatgttgcattgcaggaccatttcaagtgggtgaaacagcagtgtgaatttgcaaaacaagcccagaacccagaccaaggccctaaactggacctgggcttcaaggagggccagaccatcaagctcaacatcgcaaacatgaagaagaaggaaggagcagctgggaatccccgagtccggcctgccagcacaggagggctgagcctgcttccccctcccccaggggggaaaacctccaccctgatccctccccctggggagcagttggctgtggggggatccctcgtccagccagcagttgctcccagttcagtccagtcagagggtctggactggcaagccatctgcactggtgctctgggggttccaattacgttattcggaaacagcgagagtggcattgacggcgggtcctagatagagaggcccatcgcaagggagggcaccacgagggggagaacactgtgcgcgaaagggagagccgaatcgatacaaaaacatcc

SEQ ID NO: 433470 - DNA, 1078 bp, Homo sapiens
  misc_feature (17)..(17): n is a, c, g, or t
aaagcaggctggtacgncccggggtgtaaaggtggaagtcgccggaagttcggtgggctccaggcgtcgcgatggaggagagcgggtacgagtcggtgctctgtgtcaagcctgacgtccacgtctaccgcatccctccgcgggctaccaaccgtggctacaggtgactacccaccgccagaccaggctagctccaatttaaccctttctccgccacccggacacacccactgcgggaaccgaggacagccctggccagttttggggcgagggggagctaatgctgctgcttcttccagttccaggcccgagcagggaggcggatccagagtttcgcccgtctcagttcgacgcacgggactcctggcggcggggagggcgttaaagccgtatctagcgcttagggaccccggtgggctgccgggtaccctaaacttggtcgggggtggtgatgtcacagacgcttctctttcagcgctaaccggtggccttgaagggatcctcgaaaagccttaagcggggaggtgccctatcacagacggaaatccccgagaggaggggagggagcccagagccggctgaaaggaccggtcccggggagctttaaggtgacggtcgaagcccagggaccccttcctacccagatcccttcgcacgaatttcacccttgatcacagcctggagcagttgggaggaccccttctatatttctctggtctctacctgagacgaataaacacacacgcttgtaaacatactgagtatctctgcaaaggaacacaggaaactgccctaggggaggggaaccgcccttggaaggaaacttcctttcccttttgtgctgtttgcgttttactactctttgtatgcgttatctatcaaaacgacgaaaaatattaaaagaaaaaagatacacttcatacagacaacctggcctatggctattttgtgccactgagtggtggtggggagtgctcgtatttgcgggggcctgggtggctcttgaaggcgatggttgtccaagtttttcggaaatacaggattggtctgcaccccaagaatgatggaacgtccacat

SEQ ID NO: 433471 - DNA, 766 bp, Homo sapiens
  misc_feature (17)..(17): n is a, c, g, or t
aaagcaggctggtacgncccggggtgtaaaggtggaagtcgccggaagttcggtgggctccaggcgtcgcgatggaggagagcgggtacgagtcggtgctctgtgtcaagcctgacgtccacgtctaccgcatccctccgcgggctaccaaccgtggctacagcgctaaccggtggccttgaagggatcctcgaaaagccttaagcggggaggtgccctatcacagacggaaatccccgagaggaggggagggagcccagagccggctgaaaggaccggtcccggggagctttaaggtgacggtcgaagcccagggaccccttcctacccagatcccttcgcacgaatttcacccttgatcacagcctggagcagttgggaggaccccttctatatttctctggtctctacctgagacgaataaacacacacgcttgtaaacatactgagtatctctgcaaaggaacacaggaaactgccctaggggaggggaaccgcccttggaaggaaacttcctttcccttttgtgctgtttgcgttttactactctttgtatgcgttatctatcaaaacgacgaaaaatattaaaagaaaaaagatacacttcatacagacaacctggcctatggctattttgtgccactgagtggtggtggggagtgctcgtatttgcgggggcctgggtggctcttgaaggcgatggttgtccaagtttttcggaaatacaggattggtctgcaccccaagaatgatggaacgtccacat

SEQ ID NO: 433472 - DNA, 1364 bp, Homo sapiens
aactgtcaggtgacgcttccggcgcagaaaaatggcagccgccgctccggactcacgtgtgagtgaggaagaaaacctgaaaaagaccccaaagaagaagatgaaaatggtaactggagccgtagcgtcggtgctggaagacgaggccacagacacttctgatagtgaaggaagctgtggatcggaaaaggaccacttttattctgatgatgacgcaatagaagctgacagtgagggtgatgctgagccctgtgacaaagaaaatgaaaatgatggagaatcaagtgttgggactaatatgggctgggcagatgctatggctaaagtcctcaacaagaaaactcctgaaagtaaacctactattctggtcaaaaataagaagctggaaaaggaaaaagaaaagttaaagcaagaaagactagagaaaataaaacagcgtgataagaggctggagtgggaaatgatgtgcagagtaaagccagatgttgtccaagacaaagagacagagagaaatcttcagagaattgcaacaaggggtgtggtgcaattatttaatgctgttcagaaacatcaaaagaatgttgatgaaaaggttaaggaagctggaagttctatgagaaagcgtgctaagttgatatcaactgtttccaagaaagatttcatcagtgttttgagagggatggatggaagtacaaatgagactgcttcaagcaggaagaaaccaaaagccaaacagactgaagtgaaatcagaagaaggcccaggttggacgatcctacgtgatgatttcatgatgggagcatctatgaaagactgggacaaggaaagtgatgggccagatgacagcagaccagaatctgcaagtgactctgatacataaagcatcataggaaatacaattgcagtcgttttattttttctagaaaaatatgtcatcctctgatagttggggaattataaggataccatttgtaagaaagccaaaagacttttgccagatttcatatttccccttttcatgtacactttatatatacttcattaaaattatattttaaacccttgtataattttaagcattgttcctcagaacatttgtaaaaggatatatttctgcttgaccagcgagatgtgcattttgccaggatcatattggtcatgtctattggtgtattatttcagtatcaccaatgttttcagaaatacagtactaattcatcattaaactctttgaagttaatatttttctgccttctaacttatagactcaactatgtatctgtagtttttgggaatggttggtgttttttgctttgtgttgggaagttattgagaaaacctatataataaaatttaaaattata

SEQ ID NO: 433473 - DNA, 383 bp, Homo sapiens
aactgtcaggtgacgcttccggcgcagaaaaatggcagccgccgctccggactcacgtgtgagtgaggaagaaaacctgaaaaagaccccaaagaagaagatgaaaatggtaactggagccgtagcgtcggtgctggaagacgaggccacagacacttctgatagtgaaggaagctgtggatcggaaaaggaccacttttattctgatgatgacgcaatagaagctgacagtgagggtgatgctgagccctgtgacaaagaaaatgaaaatgatggagaatcaagtgttgggactaatatgggctgggcagatgctatggctaaagtcctcaacaagaaaactcctgaaagtaaacctactattctggtcaaaaataagaagc

SEQ ID NO: 433474 - DNA, 548 bp, Homo sapiens
aactgtcaggtgacgcttccggcgcagaaaaatggcagccgccgctccggactcacgtgtgagtgaggaagaaaacctgaaaaagaccccaaagaagaagatgaaaatggtaactggagccgtagcgtcggtgctggaagacgaggccacagacacttctgatagtgaaggaagctgtggatcggaaaaggaccacttttattctgatgatgacgcaatagaagctgacagtgagggtgatgctgagccctgtgacaaagaaaatgaaaatgatggagaatcaagtgttgggactaatatgggctgggcagatgctatggctaaagtcctcaacaagaaaactcctgaaagtaaacctactattctggtcaaaaataagaagctggaaaaggaaaaagaaaagttaaagcaagaaagactagagaaaataaaacaggtatgttccaccagttctcttgtagattagattgtttgtctaggctagctcttatcttgaccgaactgtttcttgcagtgtttgaccaattaacgttccagtttttaacttg

SEQ ID NO: 433475 - DNA, 1219 bp, Homo sapiens
ctattacggtgttcttgtgttgtgataagggtggagaggttaaaggaccacttttattctgatgatgacgcaatagaagctgacagtgagggtgatgctgagccctgtgacaaagaaaatgaaaatgatggagaatcaagtgttgggactaatatgggctgggcagatgctatggctaaagtcctcaacaagaaaactcctgaaagtaaacctactattctggtcaaaaataagaagctggaaaaggaaaaagaaaagttaaagcaagaaagactagagaaaataaaacagcgtgataagaggctggagtgggaaatgatgtgcagagtaaagccagatgttgtccaagacaaagagacagagagaaatcttcagagaattgcaacaaggggtgtggtgcaattatttaatgctgttcagaaacatcaaaagaatgttgatgaaaaggttaaggaagctggaagttctatgagaaagcgtgctaagttgatatcaactgtttccaagaaagatttcatcagtgttttgagagggatggatggaagtacaaatgagactgcttcaagcaggaagaaaccaaaagccaaacagactgaagtgaaatcagaagaaggcccaggttggacgatcctacgtgatgatttcatgatgggagcatctatgaaagactgggacaaggaaagtgatgggccagatgacagcagaccagaatctgcaagtgactctgatacataaagcatcataggaaatacaattgcagtcgttttattttttctagaaaaatatgtcatcctctgatagttggggaattataaggataccatttgtaagaaagccaaaagacttttgccagatttcatatttccccttttcatgtacactttatatatacttcattaaaattatattttaaacccttgtataattttaagcattgttcctcagaacatttgtaaaaggatatatttctgcttgaccagcgagatgtgcattttgccaggatcatattggtcatgtctattggtgtattatttcagtatcaccaatgttttcagaaatacagtactaattcatcattaaactctttgaagttaatatttttctgccttctaacttatagactcaactatgtatctgtagtttttgggaatggttggtgttttttgctttgtgttgggaagttattgagaaaacctatataataaaatttaaaattata

SEQ ID NO: 433476 - DNA, 1064 bp, Homo sapiens
aactgtcaggtgacgcttccggcgcagaaaaatggcagccgccgctccggactcacgtgtgagtgaggaagaaaacctgaaaaagaccccaaagaagaagatgaaaatggtaactggagccgtagcgtcggtgctggaagacgaggccacagacacttctgatagtgaaggaagctgtggatcggaaaaggaccacttttattctgatgatgacgcaatagaagctgacagtgagggtgatgctgagccctgtgacaaagaaaatgaaaatgatggagaatcaagtgttgggactaatatgggctgggcagatgctatggctaaagtcctcaacaagaaaactcctgaaagtaaacctactattctggtcaaaaataagaagctggaaaaggaaaaagaaaagttaaagcaagaaagactagagaaaataaaacagcgtgataagaggctggagtgggaaatgatgtgcagagtaaagccagatgttgtccaagacaaagagacagagagaaatcttcagagaattgcaacaaggggtgtggtgcaattatttaatgctgttcagaaacatcaaaagaatgttgatgaaaaggttaaggaagctggaagttctatgagaaagcgtgctaagttgatatcaactgtttccaagaaagatttcatcagtgttttgagagggatggatggaagtacaaatgagactgcttcaagcaggaagaaaccaaaagccaaacagactgaagtgaaatcagaagaaggcccaggttggacgatcctacgtgatgatttcatgatgggagcatctatgaaagactgggacaaggaaagtgatgggccagatgacagcagaccagaatctgcaagtgactctgatacataaagcatcataggaaatacaattgcagtcgttttattttttctagaaaaatatgtcatcctctgatagttggggaattataaggataccatttgtaagaaagccaaaagacttttgccagatttcatatttccccttttcatgtacactttatatatacttcattaaaattatattttaaaccctt

SEQ ID NO: 433477 - DNA, 972 bp, Homo sapiens
agcggccgctcgcgatctagacccacgcgtccgaaataaaacagcgtgataagaggctggagtgggaaatgatgtgcagagtaaagccagatgttgtccaagacaaagagacagagagaaatcttcagagaattgcaacaaggggtgtggtgcaattatttaatgctgttcagaaacatcaaaagaatgttgatgaaaaggttaaggaagctggaagttctatgagaaagcgtgctaagttgatatcaactgtttccaagaaagatttcatcagtgttttgagagggatggatggaagtacaaatgagactgcttcaagcaggaagaaaccaaaagccaaacagactgaagtgaaatcagaagaaggcccaggttggacgatcctacgtgatgatttcatgatgggagcatctatgaaagactgggacaaggaaagtgatgggccagatgacagcagaccagaatctgcaagtgactctgatacataaagcatcataggaaatacaattgcagtcgttttattttttctagaaaaatatgtcatcctctgatagttggggaattataaggataccatttgtaagaaagccaaaagacttttgccagatttcatatttccccttttcatgtacactttatatatacttcattaaaattatattttaaacccttgtataattttaagcattgttcctcagaacatttgtaaaaggatatatttctgcttgaccagcgagatgtgcattttgccaggatcatattggtcatgtctattggtgtattatttcagtatcaccaatgttttcagaaatacagtactaattcatcattaaactctttgaagttaatatttttctgccttctaacttatagactcaactatgtatctgtagtttttgggaatggttggtgttttttgctttgtgttgggaagttattgagaaaacctatataataaaatttaaaattata

SEQ ID NO: 433478 - DNA, 431 bp, Homo sapiens
ttaaaaactaagcattgaaaagtttgttttgtagcttgtacctttttgtttccttatgatggaattgacttttgaatattttgattctataattttccttagactgaagtgaaatcagaagaaggcccaggttggacgatcctacgtgatgatttcatgatgggagcatctatgaaagactgggacaaggaaagtgatgggccagatgacagcagaccagaatctgcaagtgactctgatacataaagcatcataggaaatacaattgcagtcgttttattttttctagaaaaatatgtcatcctctgatagttggggaattataaggataccatttgtaagaaagccaaaagacttttgccagatttcatatttccccttttcatgtacactttatatatacttcattaaaattatattttaaacccttg

SEQ ID NO: 433479 - DNA, 1017 bp, Homo sapiens
tatttttaaagcatttcagtttatgttgctgaaacctgagagcgcccccctgagctagactcagtaatcattagacacatttttggataagcaaactgaatcagagaaggtgagtggcaaagcccatgtagctggtggcattactagaacttagcactgtgatgcacaaaggcttaactgggtttggcagcaagggtctcatggatactctttaagatgtaggcccagatctcttagtagtgaatccctgatgttccctctcttggggctctggtttagcaaggacagcgaggatactttcctctctccctcctccttactcctctctactaaggattaaggagccacctcttcctccttaaggcctttgggagagatgggtctcctggtattagaaaggagagcagacgcctagagttctgacctcttgggcctcccctaaacaaaaagcatagccccttcactaccctagtaacaagtatgacctgttgcctgttgaggtcaggtgtacctgtgtgtctctctctgtgatgtatgtgggcttggtgtccacatcaatgtgcgtgaatactcctacccacagactgctactgtgccaatatagaggttcataagaaagataaaagagaaccagcagaaccccaggttctgcctctccttcctccctttgcccagataaaggtgtacagtgtttgtggtgaggctgctggacactgctgttttgggctttctagagagaatgcaaacatgcaaaaacagtgtggtagtgtaggcagaacaagatctagaatcagaagacctggagtcgaatctcagctccaacacccactggatgaacgtggacaagctgcttgatctctcagatcctcgatttcttcatctgtaagatggaaacaatatgtgtcttttctaaggggaaagatcaaatgacatcatgtatgtgaaaatgcttagaaatgggtgatgatgatgatgatgatactgattattagggtatctaataaagttggggaaaga

SEQ ID NO: 433480 - DNA, 3240 bp, Homo sapiens
tatttttaaagcatttcagtttatgttgctgaaacctgagagcgcccccctgagctagactcagtaatcattagacacatttttggataagcaaactgaatcagagaaggtgagtggcaaagcccatgtagctggtggcattactagaacttagcactgtgatgcacaaaggcttaactgggtttggcagcaagggtctcatggatactctttaagatgtaggcccagatctcttagtagtgaatccctgatgttccctctcttggggctctggtttagcaaggacagcgaggatactttcctctctccctcctccttactcctctctactaaggattaaggagccacctcttcctccttaaggcctttgggagagatgggtctcctggtattagaaaggagagcagacgcctagagttctgacctcttgggcctcccctaaacaaaaagcatagccccttcactaccctagtaacaagtatgacctgttgcctgttgaggtcaggtgtacctgtgtgtctctctctgtgatgtatgtgggcttggtgtccacatcaatgtgcgtgaatactcctacccacagactgctactgtgccaatatagaggttcataagaaagataaaagagaaccagcagaaccccaggttctgcctctccttcctccctttgcccagataaaggtgtacagtgtttgtggtgaggctgctggacactgctgttttgggctttctagagagaatgcaaacatgcaaaaacagtgtggtagtgtaggcagaacaagatctagaatcagaagacctggagtcgaatctcagctccaacacccactggatgaacgtggacaagctgcttgatctctcagatcctcgatttcttcatctgtaagatggaaacaatatgtgtcttttctaaggggaaagatcaaatgacatcatgtatgtgaaaatgcttagaaatgggtgatgatgatgatgatgatactgattattagggtatctaataaagttggggaaagaacaaaatccccccctcacaccctattgcaccaccagccttctccctccctgctcaattatacccatgttatagggaaggaaatagggaagaaacttgtctaaggtcacatggatgttcgcaacaattgggatgcagaacttgatctgactcccaggccaggtttgattttgatttgcagtggcagagaggactaattttttactaggttctgagccctgtactgaactctggattgccctgtacttggtggtggtatacagttcagcagtttttagcatatacacgaatttgtgcagccataaccactatctaattctagaacatttttatcacccccaaaagaaatcatgtacccatttgcagtcacttgccattccctcttctccccagccctgggaaaccactgacctaccttatatctctatgaatttgcctaatctggacatttcatataaatgcaattgtacatgtggcctttgtttctggcttctttcacttagcatgttttcaaggttcatttgtgctgtagcatttatcagtactttgttcctttttctagctgagtaacgtgtgggtatatcacattttgtttattcatctgttgagggatgtttgggttgtttctactttttgactattgtgattagtgctgctatgaacattgatgtacagatttttgtgtagatatgttttcaattatcttggggcatcttttatttttaatgtcagttttctatttttaaaaaatctagacaggttggcaaatcatttctgtaaagagtcagtaaatattttagcctttgtggtccatgacattaggtatacagattacaatttctgaactctgccattccagtgtgagagcagccatagataatatgtaaacaaatgagcatggctatgttccaataaaacttttaaaaagcaggggacagattgggcctgtggaccatagtataccaacccttaatctaaatgacacattcacatgatacattattctaaaggcacaaaaagcaaaaattctccctcccacctctgtcttccagctacggggttaccttccttgaagcagttaatgttatgagattttgtgtctccttttagacacagttaataatgagcattaaagtggctatatactattccaatgtgttgcagatagtttagtcaacacaaaagaacggacatatctgagggtacaccctaaaagtccttgaggaacagaaccctaaaagagagaacacctgcctaatctgactcctccatcagaataatcttttgaactcctgagatttgcccagtcattttggggccatgtctgatgaaagcttggtgatcccttttgggtcaaaaacaagctctgactgaagagatgcaagattttctcagatgatttgtgtgtcagtcagagttccgccagagaaacacaaccagtaggatatattctgtcttgtctgtcttcatatccatgtatctgtcatctacctagatttaatgcaaggaattggtttatgcagttgtaggggctggctaggcaaatccaaaatccacagggcaggccgtgtggaagggaggtctggaaactctcagacaagacctgacattgcagtccactggtggaatttctccttcttcagggaaacctcagctttcaacggagtggatcagacccaaccatattatccaggataatctcctttacataaagttaactgattgtagatgtaaattacatttacaagataccttcatagcaacacctaggtcagtttttgaataactgggtattatagcatagccaggtcaacacgtaaaattgatcaccacagtccatgtcttgttaacttggcacctgtacacatttccttaaaccatttaatctcccaataaagacaataacaaagtaaaacttctgcctatcatgacacagctaatctgtgtacaactgaaaatatgctcttttcctgggagagaattcacagtccttgactggtgttcacttttatccttgataatccagtaactttaataatattatgtaaatgtagctattttaataaattttatgttagatgacaaggggataagagagggaagaaaaaatacataaacacaaacattcataacaaaacaatgaatactcataataattatagtactaacttctgcaactgttcacatgatgtgttttataactaccggtgttacaaaattactgg

SEQ ID NO: 433481 - DNA, 7254 bp, Homo sapiens
catctcactttacctgatgtgctgcttgtaatctcaacactcgaggtgctatacatgctcacggaaatgggagatgttgcttgcacaaaaattgcaaaagtagaaaagagcatagacatgttagtgtgtctggtttctatggatattcagatgtttggccctgatgcactagctgcggtaaaactcattgaacacccaagttccagtcatcaaatgttatctgaaattaggccacaagctatagagcaagtccaaacccagactcatgtagcatctgccccagcttccagagcagttgtagcgcagcatgttgctccacctccaggaatagtggaaatagatagtgagaagtttgcttgtcagtggctaaatgctcattttgaagtaaatccagattgttctgtttctcgagcagaaatgtattctgaatacctctcgacttgcagtaaattagctcgtggtggaatcctaacatcaactggattttataaatgtcttagaacggtctttccaaatcatacagtgaagagagtggaggattccagtagcaatgggcaggcacatattcatgtggtaggagtaaaacggagggctataccacttcccattcagatgtactatcagcagcaaccagtttctacttctgttgttcgtgttgattctgttcctgatgtatctcctgctccttcacctgcaggaatccctcatggatcacaaaccataggaaaccattttcagaggactcctgttgccaaccaatcttcaaatctgactgcaacacaaatgtcttttcctgtacaaggtgttcatactgtggcacaaactgtttcaagaattccacaaaatccttcacctcatacccaccagcaacaaaatgctccagtgactgtcattcaaagtaaagctccaattccttgtgaagttgttaaggctacagttatccagaattccataccccagacaggagttcctgttagtattgctgttggaggaggacctccacagagttctgttgttcagaatcatagtacagggccacaacctgttacagttgtgaattctcagacattgcttcaccatccatctgtaattccacagcagtctccattacacacagtggtaccaggacagatcccttcaggcactcctgttacagtaattcaacaagctgtcccacagagtcatatgtttggcagagtacagaacataccagcatgtacttctacagtttcacagggtcaacagttaatcaccacatcaccccaacctgtgcaaacttcatctcaacagacatcagctggtagccagtcacaagatactgttatcatagcacccccacagtatgtaacaacttctgcatccaatattgtctcagcaacttcagtacagaattttcaggtagctacaggacaaatggttactattgctggtgtcccaagtccacaagcctcaagggtagggtttcagaacattgcaccaaaacctctcccttctcagcaagtttcatctacagtggtacagcagcctattcaacaaccacagcagccaacccaacaaagcgtagtgattgtaagccagccagctcaacaaggtcaaacttatgcaccagccattcaccaaattgttcttgctaatccagcagctcttccagctggtcagacagttcagctaactggacaacctaacataactccatcttcttcaccatcacctgtcccagctactaataaccaagtccctactgccatgtcgtcgtcctctacccctcaatcacagggaccacctcctactgtcagtcaaatgttatctgtgaaaaggcagcaacagcagcaacattcaccagcacccccaccacagcaggtacaagtacaagttcagcagccccaacaagtacagatgcaagttcaacctcaacagtcgaatgcaggagttggtcagcctgcctctggtgagtcgagtctgattaaacagcttctgcttccgaaacgtggtccttcaacaccaggtggtaagcttattctcccagctccacagattcctccccctaataatgcaagagctcctagccctcaggtggtctatcaggtggccagtaaccaagccgcaggttttggagtgcaggggcaaactccagctcagcagctattggttgggcagcaaaatgttcagttggtcccaagtgcaatgccaccctcagggggagtacaaactgtgcccatttcgaacttacaaatattgccaggtccactgatctcaaatagcccagcaaccattttccaagggacttctggcaaccaggtaaccataacagttgtgccaaatacgagttttgcacctgcaactgtgagtcagggaaatgcaactcagctcattgctccagcaggaattaccatgagcggaacgcagacaggagttggacttccagtacaaacgcttccagccactcaagcatctcctgctggacaatcatcatgtactactgctactcccccattcaaaggtgataaaataatttgccaaaaggaggaggaagcaaaggaagcaacaggtttacatgttcatgaacgtaaaattgaagtcatggagaacccgtcctgccgacgaggagccacaaacaccagcaatggggatacaaaggaaaatgaaatgcatgtgggaagtcttttaaatgggagaaagtacagtgactcaagtctacctccttcaaactcagggaaaattcaaagtgagactaatcagtgctcactaatcagtaatgggccatcattggaattaggtgagaatggagcatctgggaaacagaactcagaacaaatagacatgcaagatatcaaaagtgatttgagaaaaccgctagttaatggaatctgtgattttgataaaggagatggttctcatttaagcaaaaacattccaaatcataaaacttccaatcatgtaggaaatggtgagatatctccaatggaaccacaagggactttagatatcactcagcaagatactgccaaaggtgatcaactagaaagaatttctaatggacctgtattaactttgggtggttcatctgtgagcagtatacaggaggcttcaaatgcggcaacacagcaatttagtggtactgatttgcttaatggacctctagcttcaagtttgaattcagatgtgcctcagcaacgcccaagtgtagttgtctcaccacattctacaacctctgttatacagggacatcaaatcatagcagttcccgactcaggatcaaaagtatcccattctcctgccctatcatctgacgttcggtctacaaatggcacagcagaatgcaaaactgtaaagaggccagcagaggatactgatagggaaacagtcgcaggaattccaaataaagtaggagttagaattgttacaatcagtgaccccaacaatgctggctgcagcgcaacaatggttgctgtgccagcaggagcagatccaagcactgtagctaaagtagcaatagaaagtgctgttcagcaaaagcaacagcatccaccaacatatgtacagaatgtggtcccgcagaacactcctatgccaccttcaccagctgtacaagtgcagggccagcctaacagttctcagccttctccattcagtggatccagtcagcctggagatccaatgagaaaacctggacagaacttcatgtgtctgtggcagtcttgtaaaaagtggtttcagacaccctcacaggttttctaccatgcagcaactgaacatggaggaaaagatgtatatccagggcagtgtctttgggaaggttgtgagccttttcagcgacagcggttttcttttattacccacttgcaggataagcactgttcaaaggatgccctacttgcaggattaaaacaagatgaaccaggacaagcaggaagtcagaagtcttctaccaagcagccaactgtagggggcacaagctcaactcctagagcacaaaaggccattgtgaatcatcccagtgctgcacttatggctctgaggagaggatcaagaaaccttgtctttcgagattttacagatgaaaaagagggaccaataactaaacacatccgactaacagctgccttaatattaaaaaatattggtaaatattcagaatgtggtcgcagattgttaaagagacatgaaaataacttatcagtgctagccattagtaacatggaagcttcctccacccttgccaaatgcctttatgaacttaattttacagttcagagtaaggaacaagaaaaagactcagaaatgctgcagtgaaaaataattccacttacacagtgggggactcaaagtcagccacatttcacatactgttactgaagaaagcaccaagtcttaatggaacaaagaccatagaatgaattattttatctcctcccatgatgctgagaggaagcttcgtattctgatctctgagtgaatccctttgttctctgtttaaaaaaatctaaaaagaaaaaggaaaaaaaaaaagaactgctgtgggattgtcaaccagcttatctgcaggatgtttcagatctgataaatcctgatggaaactggtatgatcagaattcagtaccatccacattggaatatacatggaatattgtaaaacctacatgagcagatgaaatagaagcattaaatatttttatctatatccaaaaaggagcacatttttatatttacaaaaccgtttaagctggtttgaataatttaaaaaagtttcagcacacctatacccccgatctcagagggggccaccaatatctagctatggatcgtgtgttttgtttagaaatcagtagcttggttttcttacttgagccaatatattttcacttatttattatcataaaaatttaccagtctgaatagatcttgtaaatatttgtgaatagaatgaatacctttcatgccactgcagccactggaaatacattctgtggtgtcctagaagcattattggtaggttctaaagttttctagactttcctgtcaattgtaagtaattgtgatatattctatgcagtggatgaatgttctttaaatttgtgtaaatacttctgcaaaggtactgatgctgtaaagtcaaaacagttttgtggaactgtgatttttttttcttttttctttttttttttctttttttttttgtattatacaccttgtagaactcattttgctggctgaaagagtatggaataatatatctcatgtcattttttagaagaaaaactatttgaaggtattttttggttttccttaacatgtatccactgtaaacgtttgtcgtgtacaagctcagagcttggacagaattttttgtatttgtaaattggtttaaatacatggaattttatacaggttttctcctgtgttatatatgcattatgtgcaggtatgatattttcttcactactttttctatcttaatatagtgtggaattttattgtattattcttccattcttaatactgtaccacattcctgctcagaaactgctcacttccttaaattgtcttttttcccccagcgtgaaatgtatccatttataactgcctattgcctgttctattagcatccaaaaatgtggaaggcctcccaaccaccatttctgctgtgtccttaggatgtgcagtaaaaaatatagacctaacagtttatgttatagaatggctttatttactttggtgactgtttatagtttttaaataaaagactgaacattttcttgagtccttcatttctgagtatgcttaagacatcttaaaaatatagagagaattctaaattcagctgaaggcaaggtataacggtcacctacctatttgattatatgttgattgataacatattaaatagagaacaaataagagaggtcctttacatgacaaatttgcatgaaataagcagattaaccaagtatttatttttcatcttgttataatgcagagcaaatgtagagaacagcaaatgattgatgcagttaaagctcaatatgcctttttttactggatactgtacatttggctaaaagcttttattgtttgatgttgtgtttcttgactgtttattcagaatcacagtgtatccaaatcttcagcttgaatttggaggcagattcttagagtgaaaaagcctcagtttccatattaaaaatgttttaaatattttgattgaattagtaccaatgtaaaatctagtttcttcctgaaggaggatccctggcgctgtcctgccatgtctcaaaggaatgtttgagaaacttcatctaatattagttataaggttgtggaatttatgcttggcccaccttccaagactggcactgcccaacagacaccgctgaaatcatgtgggtatccctaggatggccttcagagccctcaaacttacaagcacctggtagttgacatcatatggggaattttctattcaccgtacttatccaaaaatctcttttaaaaagtaaatttgtgcaacaacgtttatttgaaagataatgtcttctcaaaatcagaaactgcagtggtaattaaattaatagaaaagagaacaaactgcaggtttagaaaaatggttttcatattcaccattcttccacctcattgaattgcatgctgtagttctagcttttctgctataatatgtaaatatgactgtagccttttaagcttcagtctcagcagagaatttcctaaatgcgtttgacctaatgaaactgatcatggcttcccacttaggtttttcttcttatagctttatagaactatataataatatggacttgctgtgtaatggaattaaagtgcttttgcacaataagttctgcaaaaccctctcattcatgaaaaggtgctccttgctagacagaaacttgctgatttacagtattgttatttttgtctaaagttctgtaaatacatgctttaatgttatctttgagaaatctatgtaaataatatagtctacaacatagagactgtataattctgtgttatatatgtgcctagtgctctgttggcactcaataaattttaagtaacaaaattgataatcatatagcgaaggcatatttttcttccaagctcaagtcaggattgtgactatatattaatgagactcagtaatccaacccacacctgagaactcgtctcattactttatagtcatgtcatgtatgtttttttaaccatgaaatgacaataaaatgatttttaaaatgagaa

SEQ ID NO: 433482 - DNA, 5795 bp, Homo sapiens
catctcactttacctgatgtgctgcttgtaatctcaacactcgaggtgctatacatgctcacggaaatgggagatgttgcttgcacaaaaattgcaaaagtagaaaagagcatagacatgttagtgtgtctggtttctatggatattcagatgtttggccctgatgcactagctgcggtaaaactcattgaacacccaagttccagtcatcaaatgttatctgaaattaggccacaagctatagagcaagtccaaacccagactcatgtagcatctgccccagcttccagagcagttgtagcgcagcatgttgctccacctccaggaatagtggaaatagatagtgagaagtttgcttgtcagtggctaaatgctcattttgaagtaaatccagattgttctgtttctcgagcagaaatgtattctgaatacctctcgacttgcagtaaattagctcgtggtggaatcctaacatcaactggattttataaatgtcttagaacggtctttccaaatcatacagtgaagagagtggaggattccagtagcaatgggcaggcacatattcatgtggtaggagtaaaacggagggctataccacttcccattcagatgtactatcagcagcaaccagtttctacttctgttgttcgtgttgattctgttcctgatgtatctcctgctccttcacctgcaggaatccctcatggatcacaaaccataggaaaccattttcagaggactcctgttgccaaccaatcttcaaatctgactgcaacacaaatgtcttttcctgtacaaggtgttcatactgtggcacaaactgtttcaagaattccacaaaatccttcacctcatacccaccagcaacaaaatgctccagtgactgtcattcaaagtaaagctccaattccttgtgaagttgttaaggctacagttatccagaattccataccccagacaggagttcctgttagtattgctgttggaggaggacctccacagagttctgttgttcagaatcatagtacagggccacaacctgttacagttgtgaattctcagacattgcttcaccatccatctgtaattccacagcagtctccattacacacagtggtaccaggacagatcccttcaggcactcctgttacagtaattcaacaagctgtcccacagagtcatatgtttggcagagtacagaacataccagcatgtacttctacagtttcacagggtcaacagttaatcaccacatcaccccaacctgtgcaaacttcatctcaacagacatcagctggtagccagtcacaagatactgttatcatagcacccccacagtatgtaacaacttctgcatccaatattgtctcagcaacttcagtacagaattttcaggtagctacaggacaaatggttactattgctggtgtcccaagtccacaagcctcaagggtagggtttcagaacattgcaccaaaacctctcccttctcagcaagtttcatctacagtggtacagcagcctattcaacaaccacagcagccaacccaacaaagcgtagtgattgtaagccagccagctcaacaaggtcaaacttatgcaccagccattcaccaaattgttcttgctaatccagcagctcttccagctggtcagacagttcagctaactggacaacctaacataactccatcttcttcaccatcacctgtcccagctactaataaccaagtccctactgccatgtcgtcgtcctctacccctcaatcacagggaccacctcctactgtcagtcaaatgttatctgtgaaaaggcagcaacagcagcaacattcaccagcacccccaccacagcaggtacaagtacaagttcagcagccccaacaagtacagatgcaagttcaacctcaacagtcgaatgcaggagttggtcagcctgcctctggtgagtcgagtctgattaaacagcttctgcttccgaaacgtggtccttcaacaccaggtggtaagcttattctcccagctccacagattcctccccctaataatgcaagagctcctagccctcaggtggtctatcaggtggccagtaaccaagccgcaggttttggagtgcaggggcaaactccagctcagcagctattggttgggcagcaaaatgttcagttggtcccaagtgcaatgccaccctcagggggagtacaaactgtgcccatttcgaacttacaaatattgccaggtccactgatctcaaatagcccagcaaccattttccaagggacttctggcaaccaggtaaccataacagttgtgccaaatacgagttttgcacctgcaactgtgagtcagggaaatgcaactcagctcattgctccagcaggaattaccatgagcggaacgcagacaggagttggacttccagtacaaacgcttccagccactcaagcatctcctgctggacaatcatcatgtactactgctactcccccattcaaaggtgataaaataatttgccaaaaggaggaggaagcaaaggaagcaacaggtttacatgttcatgaacgtaaaattgaagtcatggagaacccgtcctgccgacgaggagccacaaacaccagcaatggggatacaaaggaaaatgaaatgcatgtgggaagtcttttaaatgggagaaagtacagtgactcaagtctacctccttcaaactcagggaaaattcaaagtgagactaatcagtgctcactaatcagtaatgggccatcattggaattaggtgagaatggagcatctgggaaacagaactcagaacaaatagacatgcaagatatcaaaagtgatttgagaaaaccgctagttaatggaatctgtgattttgataaaggagatggttctcatttaagcaaaaacattccaaatcataaaacttccaatcatgtaggaaatggtgagatatctccaatggaaccacaagggactttagatatcactcagcaagatactgccaaaggtgatcaactagaaagaatttctaatggacctgtattaactttgggtggttcatctgtgagcagtatacaggaggcttcaaatgcggcaacacagcaatttagtggtactgatttgcttaatggacctctagcttcaagtttgaattcagatgtgcctcagcaacgcccaagtgtagttgtctcaccacattctacaacctctgttatacagggacatcaaatcatagcagttcccgactcaggatcaaaagtatcccattctcctgccctatcatctgacgttcggtctacaaatggcacagcagaatgcaaaactgtaaagaggccagcagaggatactgatagggaaacagtcgcaggaattccaaataaagtaggagttagaattgttacaatcagtgaccccaacaatgctggctgcagcgcaacaatggttgctgtgccagcaggagcagatccaagcactgtagctaaagtagcaatagaaagtgctgttcagcaaaagcaacagcatccaccaacatatgtacagaatgtggtcccgcagaacactcctatgccaccttcaccagctgtacaagtgcagggccagcctaacagttctcagccttctccattcagtggatccagtcagcctggagatccaatgagaaaacctggacagaacttcatgtgtctgtggcagtcttgtaaaaagtggtttcagacaccctcacaggttttctaccatgcagcaactgaacatggaggaaaagatgtatatccagggcagtgtctttgggaaggttgtgagccttttcagcgacagcggttttcttttattacccacttgcaggataagcactgttcaaaggatgccctacttgcaggattaaaacaagatgaaccaggacaagcaggaagtcagaagtcttctaccaagcagccaactgtagggggcacaagctcaactcctagagcacaaaaggccattgtgaatcatcccagtgctgcacttatggctctgaggagaggatcaagaaaccttgtctttcgagattttacagatgaaaaagagggaccaataactaaacacatccgactaacagctgccttaatattaaaaaatattggtaaatattcagaatgtggtcgcagattgttaaagagacatgaaaataacttatcagtgctagccattagtaacatggaagcttcctccacccttgccaaatgcctttatgaacttaattttacagttcagagtaaggaacaagaaaaagactcagaaatgctgcagtgaaaaataattccacttacacagtgggggactcaaagtcagccacatttcacatactgttactgaagaaagcaccaagtcttaatggaacaaagaccatagaatgaattattttatctcctcccatgatgctgagaggaagcttcgtattctgatctctgagtgaatccctttgttctctgtttaaaaaaatctaaaaagaaaaaggaaaaaaaaaaagaactgctgtgggattgtcaaccagcttatctgcaggatgtttcagatctgataaatcctgatggaaactggtatgatcagaattcagtaccatccacattggaatatacatggaatattgtaaaacctacatgagcagatgaaatagaagcattaaatatttttatctatatccaaaaaggagcacatttttatatttacaaaaccgtttaagctggtttgaataatttaaaaaagtttcagcacacctatacccccgatctcagagggggccaccaatatctagctatggatcgtgtgttttgtttagaaatcagtagcttggttttcttacttgagccaatatattttcacttatttattatcataaaaatttaccagtctgaatagatcttgtaaatatttgtgaatagaatgaatacctttcatgccactgcagccactggaaatacattctgtggtgtcctagaagcattattggtaggttctaaagttttctagactttcctgtcaattgtaagtaattgtgatatattctatgcagtggatgaatgttctttaaatttgtgtaaatacttctgcaaaggtactgatgctgtaaagtcaaaacagttttgtggaactgtgatttttttttcttttttctttttttttttctttttttttttgtattatacaccttgtagaactcattttgctggctgaaagagtatggaataatatatctcatgtcattttttagaagaaaaactatttgaaggtattttttggttttccttaacatgtatccactgtaaacgtttgtcgtgtacaagctcagagcttggacagaattttttgtatttgtaaattggtttaaatacatggaattttatacaggttttctcctgtgttatatatgcattatgtgcaggtatgatattttcttcactactttttctatcttaatatagtgtggaattttattgtattattcttccattcttaatactgtaccacattcctgctcagaaactgctcacttccttaaattgtcttttttcccccagcgtgaaatgtatccatttataactgcctattgcctgttctattagcatccaaaaatgtggaaggcctcccaaccaccatttctgctgtgtccttaggatgtgcagtaaaaaatatagacctaacagtttatgttatagaatggctttatttactttggtgactgtttatagtttttaaatgttcagtcttttatttaaagtcgagcggccgcgaatttagtagtagtaggcggctgc

SEQ ID NO: 433483 - DNA, 4742 bp, Homo sapiens
catctcactttacctgatgtgctgcttgtaatctcaacactcgaggtgctatacatgctcacggaaatgggagatgttgcttgcacaaaaattgcaaaagtagaaaagagcatagacatgttagtgtgtctggtttctatggatattcagatgtttggccctgatgcactagctgcggtaaaactcattgaacacccaagttccagtcatcaaatgttatctgaaattaggccacaagctatagagcaagtccaaacccagactcatgtagcatctgccccagcttccagagcagttgtagcgcagcatgttgctccacctccaggaatagtggaaatagatagtgagaagtttgcttgtcagtggctaaatgctcattttgaagtaaatccagattgttctgtttctcgagcagaaatgtattctgaatacctctcgacttgcagtaaattagctcgtggtggaatcctaacatcaactggattttataaatgtcttagaacggtctttccaaatcatacagtgaagagagtggaggattccagtagcaatgggcaggcacatattcatgtggtaggagtaaaacggagggctataccacttcccattcagatgtactatcagcagcaaccagtttctacttctgttgttcgtgttgattctgttcctgatgtatctcctgctccttcacctgcaggaatccctcatggatcacaaaccataggaaaccattttcagaggactcctgttgccaaccaatcttcaaatctgactgcaacacaaatgtcttttcctgtacaaggtgttcatactgtggcacaaactgtttcaagaattccacaaaatccttcacctcatacccaccagcaacaaaatgctccagtgactgtcattcaaagtaaagctccaattccttgtgaagttgttaaggctacagttatccagaattccataccccagacaggagttcctgttagtattgctgttggaggaggacctccacagagttctgttgttcagaatcatagtacagggccacaacctgttacagttgtgaattctcagacattgcttcaccatccatctgtaattccacagcagtctccattacacacagtggtaccaggacagatcccttcaggcactcctgttacagtaattcaacaagctgtcccacagagtcatatgtttggcagagtacagaacataccagcatgtacttctacagtttcacagggtcaacagttaatcaccacatcaccccaacctgtgcaaacttcatctcaacagacatcagctggtagccagtcacaagatactgttatcatagcacccccacagtatgtaacaacttctgcatccaatattgtctcagcaacttcagtacagaattttcaggtagctacaggacaaatggttactattgctggtgtcccaagtccacaagcctcaagggtagggtttcagaacattgcaccaaaacctctcccttctcagcaagtttcatctacagtggtacagcagcctattcaacaaccacagcagccaacccaacaaagcgtagtgattgtaagccagccagctcaacaaggtcaaacttatgcaccagccattcaccaaattgttcttgctaatccagcagctcttccagctggtcagacagttcagctaactggacaacctaacataactccatcttcttcaccatcacctgtcccagctactaataaccaagtccctactgccatgtcgtcgtcctctacccctcaatcacagggaccacctcctactgtcagtcaaatgttatctgtgaaaaggcagcaacagcagcaacattcaccagcacccccaccacagcaggtacaagtacaagttcagcagccccaacaagtacagatgcaagttcaacctcaacagtcgaatgcaggagttggtcagcctgcctctggtgagtcgagtctgattaaacagcttctgcttccgaaacgtggtccttcaacaccaggtggtaagcttattctcccagctccacagattcctccccctaataatgcaagagctcctagccctcaggtggtctatcaggtggccagtaaccaagccgcaggttttggagtgcaggggcaaactccagctcagcagctattggttgggcagcaaaatgttcagttggtcccaagtgcaatgccaccctcagggggagtacaaactgtgcccatttcgaacttacaaatattgccaggtccactgatctcaaatagcccagcaaccattttccaagggacttctggcaaccaggtaaccataacagttgtgccaaatacgagttttgcacctgcaactgtgagtcagggaaatgcaactcagctcattgctccagcaggaattaccatgagcggaacgcagacaggagttggacttccagtacaaacgcttccagccactcaagcatctcctgctggacaatcatcatgtactactgctactcccccattcaaaggtgataaaataatttgccaaaaggaggaggaagcaaaggaagcaacaggtttacatgttcatgaacgtaaaattgaagtcatggagaacccgtcctgccgacgaggagccacaaacaccagcaatggggatacaaaggaaaatgaaatgcatgtgggaagtcttttaaatgggagaaagtacagtgactcaagtctacctccttcaaactcagggaaaattcaaagtgagactaatcagtgctcactaatcagtaatgggccatcattggaattaggtgagaatggagcatctgggaaacagaactcagaacaaatagacatgcaagatatcaaaagtgatttgagaaaaccgctagttaatggaatctgtgattttgataaaggagatggttctcatttaagcaaaaacattccaaatcataaaacttccaatcatgtaggaaatggtgagatatctccaatggaaccacaagggactttagatatcactcagcaagatactgccaaaggtgatcaactagaaagaatttctaatggacctgtattaactttgggtggttcatctgtgagcagtatacaggaggcttcaaatgcggcaacacagcaatttagtggtactgatttgcttaatggacctctagcttcaagtttgaattcagatgtgcctcagcaacgcccaagtgtagttgtctcaccacattctacaacctctgttatacagggacatcaaatcatagcagttcccgactcaggatcaaaagtatcccattctcctgccctatcatctgacgttcggtctacaaatggcacagcagaatgcaaaactgtaaagaggccagcagaggatactgatagggaaacagtcgcaggaattccaaataaagtaggagttagaattgttacaatcagtgaccccaacaatgctggctgcagcgcaacaatggttgctgtgccagcaggagcagatccaagcactgtagctaaagtagcaatagaaagtgctgttcagcaaaagcaacagcatccaccaacatatgtacagaatgtggtcccgcagaacactcctatgccaccttcaccagctgtacaagtgcagggccagcctaacagttctcagccttctccattcagtggatccagtcagcctggagatccaatgagaaaacctggacagaacttcatgtgtctgtggcagtcttgtaaaaagtggtttcagacaccctcacaggttttctaccatgcagcaactgaacatggaggaaaagatgtatatccagggcagtgtctttgggaaggttgtgagccttttcagcgacagcggttttcttttattacccacttgcaggataagcactgttcaaaggatgccctacttgcaggattaaaacaagatgaaccaggacaagcaggaagtcagaagtcttctaccaagcagccaactgtagggggcacaagctcaactcctagagcacaaaaggccattgtgaatcatcccagtgctgcacttatggctctgaggagaggatcaagaaaccttgtctttcgagattttacagatgaaaaagagggaccaataactaaacacatccgactaacagctgccttaatattaaaaaatattggtaaatattcagaatgtggtcgcagattgttaaagagacatgaaaataacttatcagtgctagccattagtaacatggaagcttcctccacccttgccaaatgcctttatgaacttaattttacagttcagagtaaggaacaagaaaaagactcagaaatgctgcagtgaaaaataattccacttacacagtgggggactcaaagtcagccacatttcacatactgttactgaagaaagcaccaagtcttaatggaacaaagaccatagaatgaattattttatctcctcccatgatgctgagaggaagcttcgtattctgatctctgagtgaatccctttgttctctgtttaaaaaaatctaaaaagaaaaaggaaaaaaaaaaagaactgctgtgggattgtcaaccagcttatctgcaggatgtttcagatctgataaatcctgatggaaactggtatgatcagaattcagtaccatccacattggaatatacatggaatattgtaaaacctacatgagcagatgaaatagaagcattaaatatttttatctatatccaaaaaggagcacatttttatatttacaaaaccgttaagactgacctgggccggctcga

SEQ ID NO: 433484 - DNA, 4677 bp, Homo sapiens
catctcactttacctgatgtgctgcttgtaatctcaacactcgaggtgctatacatgctcacggaaatgggagatgttgcttgcacaaaaattgcaaaagtagaaaagagcatagacatgttagtgtgtctggtttctatggatattcagatgtttggccctgatgcactagctgcggtaaaactcattgaacacccaagttccagtcatcaaatgttatctgaaattaggccacaagctatagagcaagtccaaacccagactcatgtagcatctgccccagcttccagagcagttgtagcgcagcatgttgctccacctccaggaatagtggaaatagatagtgagaagtttgcttgtcagtggctaaatgctcattttgaagtaaatccagattgttctgtttctcgagcagaaatgtattctgaatacctctcgacttgcagtaaattagctcgtggtggaatcctaacatcaactggattttataaatgtcttagaacggtctttccaaatcatacagtgaagagagtggaggattccagtagcaatgggcaggcacatattcatgtggtaggagtaaaacggagggctataccacttcccattcagatgtactatcagcagcaaccagtttctacttctgttgttcgtgttgattctgttcctgatgtatctcctgctccttcacctgcaggaatccctcatggatcacaaaccataggaaaccattttcagaggactcctgttgccaaccaatcttcaaatctgactgcaacacaaatgtcttttcctgtacaaggtgttcatactgtggcacaaactgtttcaagaattccacaaaatccttcacctcatacccaccagcaacaaaatgctccagtgactgtcattcaaagtaaagctccaattccttgtgaagttgttaaggctacagttatccagaattccataccccagacaggagttcctgttagtattgctgttggaggaggacctccacagagttctgttgttcagaatcatagtacagggccacaacctgttacagttgtgaattctcagacattgcttcaccatccatctgtaattccacagcagtctccattacacacagtggtaccaggacagatcccttcaggcactcctgttacagtaattcaacaagctgtcccacagagtcatatgtttggcagagtacagaacataccagcatgtacttctacagtttcacagggtcaacagttaatcaccacatcaccccaacctgtgcaaacttcatctcaacagacatcagctggtagccagtcacaagatactgttatcatagcacccccacagtatgtaacaacttctgcatccaatattgtctcagcaacttcagtacagaattttcaggtagctacaggacaaatggttactattgctggtgtcccaagtccacaagcctcaagggtagggtttcagaacattgcaccaaaacctctcccttctcagcaagtttcatctacagtggtacagcagcctattcaacaaccacagcagccaacccaacaaagcgtagtgattgtaagccagccagctcaacaaggtcaaacttatgcaccagccattcaccaaattgttcttgctaatccagcagctcttccagctggtcagacagttcagctaactggacaacctaacataactccatcttcttcaccatcacctgtcccagctactaataaccaagtccctactgccatgtcgtcgtcctctacccctcaatcacagggaccacctcctactgtcagtcaaatgttatctgtgaaaaggcagcaacagcagcaacattcaccagcacccccaccacagcaggtacaagtacaagttcagcagccccaacaagtacagatgcaagttcaacctcaacagtcgaatgcaggagttggtcagcctgcctctggtgagtcgagtctgattaaacagcttctgcttccgaaacgtggtccttcaacaccaggtggtaagcttattctcccagctccacagattcctccccctaataatgcaagagctcctagccctcaggtggtctatcaggtggccagtaaccaagccgcaggttttggagtgcaggggcaaactccagctcagcagctattggttgggcagcaaaatgttcagttggtcccaagtgcaatgccaccctcagggggagtacaaactgtgcccatttcgaacttacaaatattgccaggtccactgatctcaaatagcccagcaaccattttccaagggacttctggcaaccaggtaaccataacagttgtgccaaatacgagttttgcacctgcaactgtgagtcagggaaatgcaactcagctcattgctccagcaggaattaccatgagcggaacgcagacaggagttggacttccagtacaaacgcttccagccactcaagcatctcctgctggacaatcatcatgtactactgctactcccccattcaaaggtgataaaataatttgccaaaaggaggaggaagcaaaggaagcaacaggtttacatgttcatgaacgtaaaattgaagtcatggagaacccgtcctgccgacgaggagccacaaacaccagcaatggggatacaaaggaaaatgaaatgcatgtgggaagtcttttaaatgggagaaagtacagtgactcaagtctacctccttcaaactcagggaaaattcaaagtgagactaatcagtgctcactaatcagtaatgggccatcattggaattaggtgagaatggagcatctgggaaacagaactcagaacaaatagacatgcaagatatcaaaagtgatttgagaaaaccgctagttaatggaatctgtgattttgataaaggagatggttctcatttaagcaaaaacattccaaatcataaaacttccaatcatgtaggaaatggtgagatatctccaatggaaccacaagggactttagatatcactcagcaagatactgccaaaggtgatcaactagaaagaatttctaatggacctgtattaactttgggtggttcatctgtgagcagtatacaggaggcttcaaatgcggcaacacagcaatttagtggtactgatttgcttaatggacctctagcttcaagtttgaattcagatgtgcctcagcaacgcccaagtgtagttgtctcaccacattctacaacctctgttatacagggacatcaaatcatagcagttcccgactcaggatcaaaagtatcccattctcctgccctatcatctgacgttcggtctacaaatggcacagcagaatgcaaaactgtaaagaggccagcagaggatactgatagggaaacagtcgcaggaattccaaataaagtaggagttagaattgttacaatcagtgaccccaacaatgctggctgcagcgcaacaatggttgctgtgccagcaggagcagatccaagcactgtagctaaagtagcaatagaaagtgctgttcagcaaaagcaacagcatccaccaacatatgtacagaatgtggtcccgcagaacactcctatgccaccttcaccagctgtacaagtgcagggccagcctaacagttctcagccttctccattcagtggatccagtcagcctggagatccaatgagaaaacctggacagaacttcatgtgtctgtggcagtcttgtaaaaagtggtttcagacaccctcacaggttttctaccatgcagcaactgaacatggaggaaaagatgtatatccagggcagtgtctttgggaaggttgtgagccttttcagcgacagcggttttcttttattacccacttgcaggataagcactgttcaaaggatgccctacttgcaggattaaaacaagatgaaccaggacaagcaggaagtcagaagtcttctaccaagcagccaactgtagggggcacaagctcaactcctagagcacaaaaggccattgtgaatcatcccagtgctgcacttatggctctgaggagaggatcaagaaaccttgtctttcgagattttacagatgaaaaagagggaccaataactaaacacatccgactaacagctgccttaatattaaaaaatattggtaaatattcagaatgtggtcgcagattgttaaagagacatgaaaataacttatcagtgctagccattagtaacatggaagcttcctccacccttgccaaatgcctttatgaacttaattttacagttcagagtaaggaacaagaaaaagactcagaaatgctgcagtgaaaaataattccacttacacagtgggggactcaaagtcagccacatttcacatactgttactgaagaaagcaccaagtcttaatggaacaaagaccatagaatgaattattttatctcctcccatgatgctgagaggaagcttcgtattctgatctctgagtgaatccctttgttctctgtttaaaaaaatctaaaaagaaaaaggaaaaaaaaaaagaactgctgtgcggacagggttatcagcatactcgacaggatttttaccgactgctcatgtactcaatgatggatgctggcaggttgagtatacaggatcacctatcgttcggatatacatataaaactagtcaaatcgatacgcccagatggaataggcacactagc

SEQ ID NO: 433485 - DNA, 7311 bp, Homo sapiens
catctcactttacctgatgtgctgcttgtaatctcaacactcgaggtgctatacatgctcacggaaatgggagatgttgcttgcacaaaaattgcaaaagtagaaaagagcatagacatgttagtgtgtctggtttctatggatattcagatgtttggccctgatgcactagctgcggtaaaactcattgaacacccaagttccagtcatcaaatgttatctgaaattaggccacaagctatagagcaagtccaaacccagactcatgtagcatctgccccagcttccagagcagttgtagcgcagcatgttgctccacctccaggaatagtggaaatagatagtgagaagtttgcttgtcagtggctaaatgctcattttgaagtaaatccagattgttctgtttctcgagcagaaatgtattctgaatacctctcgacttgcagtaaattagctcgtggtggaatcctaacatcaactggattttataaatgtcttagaacggtctttccaaatcatacagtgaagagagtggaggattccagtagcaatgggcaggcacatattcatgtggtaggagtaaaacggagggctataccacttcccattcagatgtactatcagcagcaaccagtttctacttctgttgttcgtgttgattctgttcctgatgtatctcctgctccttcacctgcaggaatccctcatggatcacaaaccataggaaaccattttcagaggactcctgttgccaaccaatcttcaaatctgactgcaacacaaatgtcttttcctgtacaaggtgttcatactgtggcacaaactgtttcaagaattccacaaaatccttcacctcatacccaccagcaacaaaatgctccagtgactgtcattcaaagtaaagctccaattccttgtgaagttgttaaggctacagttatccagaattccataccccagacaggagttcctgttagtattgctgttggaggaggacctccacagagttctgttgttcagaatcatagtacagggccacaacctgttacagttgtgaattctcagacattgcttcaccatccatctgtaattccacagcagtctccattacacacagtggtaccaggacagatcccttcaggcactcctgttacagtaattcaacaagctgtcccacagagtcatatgtttggcagagtacagaacataccagcatgtacttctacagtttcacagggtcaacagttaatcaccacatcaccccaacctgtgcaaacttcatctcaacagacatcagctggtagccagtcacaagatactgttatcatagcacccccacagtatgtaacaacttctgcatccaatattgtctcagcaacttcagtacagaattttcaggtagctacaggacaaatggttactattgctggtgtcccaagtccacaagcctcaagggtagggtttcagaacattgcaccaaaacctctcccttctcagcaagtttcatctacagtggtacagcagcctattcaacaaccacagcagccaacccaacaaagcgtagtgattgtaagccagccagctcaacaaggtcaaacttatgcaccagccattcaccaaattgttcttgctaatccagcagctcttccagctggtcagacagttcagctaactggacaacctaacataactccatcttcttcaccatcacctgtcccagctactaataaccaagtccctactgccatgtcgtcgtcctctacccctcaatcacagggaccacctcctactgtcagtcaaatgttatctgtgaaaaggcagcaacagcagcaacattcaccagcacccccaccacagcaggtacaagtacaagttcagcagccccaacaagtacagatgcaagttcaacctcaacagtcgaatgcaggagttggtcagcctgcctctggtgagtcgagtctgattaaacagcttctgcttccgaaacgtggtccttcaacaccaggtggtaagcttattctcccagctccacagattcctccccctaataatgcaagagctcctagccctcaggtggtctatcaggtggccagtaaccaagccgcaggttttggagtgcaggggcaaactccagctcagcagctattggttgggcagcaaaatgttcagttggtcccaagtgcaatgccaccctcagggggagtacaaactgtgcccatttcgaacttacaaatattgccaggtccactgatctcaaatagcccagcaaccattttccaagggacttctggcaaccaggtaaccataacagttgtgccaaatacgagttttgcacctgcaactgtgagtcagggaaatgcaactcagctcattgctccagcaggaattaccatgagcggaacgcagacaggagttggacttccagtacaaacgcttccagccactcaagcatctcctgctggacaatcatcatgtactactgctactcccccattcaaaggtgataaaataatttgccaaaaggaggaggaagcaaaggaagcaacaggtttacatgttcatgaacgtaaaattgaagtcatggagaacccgtcctgccgacgaggagccacaaacaccagcaatggggatacaaaggaaaatgaaatgcatgtgggaagtcttttaaatgggagaaagtacagtgactcaagtctacctccttcaaactcagggaaaattcaaagtgagactaatcagtgctcactaatcagtaatgggccatcattggaattaggtgagaatggagcatctgggaaacagaactcagaacaaatagacatgcaagatatcaaaagtgatttgagaaaaccgctagttaatggaatctgtgattttgataaaggagatggttctcatttaagcaaaaacattccaaatcataaaacttccaatcatgtaggaaatggtgagatatctccaatggaaccacaagggactttagatatcactcagcaagatactgccaaaggtgatcaactagaaagaatttctaatggacctgtattaactttgggtggttcatctgtgagcagtatacaggaggcttcaaatgcggcaacacagcaatttagtggtactgatttgcttaatggacctctagcttcaagtttgaattcagatgtgcctcagcaacgcccaagtgtagttgtctcaccacattctacaacctctgttatacagggacatcaaatcatagcagttcccgactcaggatcaaaagtatcccattctcctgccctatcatctgacgttcggtctacaaatggcacagcagaatgcaaaactgtaaagaggccagcagaggatactgatagggaaacagtcgcaggaattccaaataaagtaggagttagaattgttacaatcagtgaccccaacaatgctggctgcagcgcaacaatggttgctgtgccagcaggagcagatccaagcactgtagctaaagtagcaatagaaagtgctgttcagcaaaagcaacagcatccaccaacatatgtacagaatgtggtcccgcagaacactcctatgccaccttcaccagctgtacaagtgcagggccagcctaacagttctcagccttctccattcagtggatccagtcagcctggagatccaatgagaaaacctggacagaacttcatgtgtctgtggcagtcttgtaaaaagtggtttcagacaccctcacaggttttctaccatgcagcaactgaacatggaggaaaagatgtatatccagggcagtgtctttgggaaggttgtgagccttttcagcgacagcggttttcttttattacccacttgcaggataagcactgttcaaaggatgccctacttgcaggattaaaacaagatgaaccaggacaagcaggaagtcagaagtcttctaccaagcagccaactgtagggggcacaagctcaactcctagagcacaaaaggccattgtgaatcatcccagtgctgcacttatggctctgaggagaggatcaagaaaccttgtctttcgagattttacagatgaaaaagagggaccaataactaaacacatccgactaacagctgccttaatattaaaaaatattggtaaatattcagaatgtggtcgcagaaacatgaatgaagattgaaaaagaattttgctgtgcagccttccatatttagaaagattgttaaagagacatgaaaataacttatcagtgctagccattagtaacatggaagcttcctccacccttgccaaatgcctttatgaacttaattttacagttcagagtaaggaacaagaaaaagactcagaaatgctgcagtgaaaaataattccacttacacagtgggggactcaaagtcagccacatttcacatactgttactgaagaaagcaccaagtcttaatggaacaaagaccatagaatgaattattttatctcctcccatgatgctgagaggaagcttcgtattctgatctctgagtgaatccctttgttctctgtttaaaaaaatctaaaaagaaaaaggaaaaaaaaaaagaactgctgtgggattgtcaaccagcttatctgcaggatgtttcagatctgataaatcctgatggaaactggtatgatcagaattcagtaccatccacattggaatatacatggaatattgtaaaacctacatgagcagatgaaatagaagcattaaatatttttatctatatccaaaaaggagcacatttttatatttacaaaaccgtttaagctggtttgaataatttaaaaaagtttcagcacacctatacccccgatctcagagggggccaccaatatctagctatggatcgtgtgttttgtttagaaatcagtagcttggttttcttacttgagccaatatattttcacttatttattatcataaaaatttaccagtctgaatagatcttgtaaatatttgtgaatagaatgaatacctttcatgccactgcagccactggaaatacattctgtggtgtcctagaagcattattggtaggttctaaagttttctagactttcctgtcaattgtaagtaattgtgatatattctatgcagtggatgaatgttctttaaatttgtgtaaatacttctgcaaaggtactgatgctgtaaagtcaaaacagttttgtggaactgtgatttttttttcttttttctttttttttttctttttttttttgtattatacaccttgtagaactcattttgctggctgaaagagtatggaataatatatctcatgtcattttttagaagaaaaactatttgaaggtattttttggttttccttaacatgtatccactgtaaacgtttgtcgtgtacaagctcagagcttggacagaattttttgtatttgtaaattggtttaaatacatggaattttatacaggttttctcctgtgttatatatgcattatgtgcaggtatgatattttcttcactactttttctatcttaatatagtgtggaattttattgtattattcttccattcttaatactgtaccacattcctgctcagaaactgctcacttccttaaattgtcttttttcccccagcgtgaaatgtatccatttataactgcctattgcctgttctattagcatccaaaaatgtggaaggcctcccaaccaccatttctgctgtgtccttaggatgtgcagtaaaaaatatagacctaacagtttatgttatagaatggctttatttactttggtgactgtttatagtttttaaataaaagactgaacattttcttgagtccttcatttctgagtatgcttaagacatcttaaaaatatagagagaattctaaattcagctgaaggcaaggtataacggtcacctacctatttgattatatgttgattgataacatattaaatagagaacaaataagagaggtcctttacatgacaaatttgcatgaaataagcagattaaccaagtatttatttttcatcttgttataatgcagagcaaatgtagagaacagcaaatgattgatgcagttaaagctcaatatgcctttttttactggatactgtacatttggctaaaagcttttattgtttgatgttgtgtttcttgactgtttattcagaatcacagtgtatccaaatcttcagcttgaatttggaggcagattcttagagtgaaaaagcctcagtttccatattaaaaatgttttaaatattttgattgaattagtaccaatgtaaaatctagtttcttcctgaaggaggatccctggcgctgtcctgccatgtctcaaaggaatgtttgagaaacttcatctaatattagttataaggttgtggaatttatgcttggcccaccttccaagactggcactgcccaacagacaccgctgaaatcatgtgggtatccctaggatggccttcagagccctcaaacttacaagcacctggtagttgacatcatatggggaattttctattcaccgtacttatccaaaaatctcttttaaaaagtaaatttgtgcaacaacgtttatttgaaagataatgtcttctcaaaatcagaaactgcagtggtaattaaattaatagaaaagagaacaaactgcaggtttagaaaaatggttttcatattcaccattcttccacctcattgaattgcatgctgtagttctagcttttctgctataatatgtaaatatgactgtagccttttaagcttcagtctcagcagagaatttcctaaatgcgtttgacctaatgaaactgatcatggcttcccacttaggtttttcttcttatagctttatagaactatataataatatggacttgctgtgtaatggaattaaagtgcttttgcacaataagttctgcaaaaccctctcattcatgaaaaggtgctccttgctagacagaaacttgctgatttacagtattgttatttttgtctaaagttctgtaaatacatgctttaatgttatctttgagaaatctatgtaaataatatagtctacaacatagagactgtataattctgtgttatatatgtgcctagtgctctgttggcactcaataaattttaagtaacaaaattgataatcatatagcgaaggcatatttttcttccaagctcaagtcaggattgtgactatatattaatgagactcagtaatccaacccacacctgagaactcgtctcattactttatagtcatgtcatgtatgtttttttaaccatgaaatgacaataaaatgatttttaaaatgagaa

SEQ ID NO: 433486 - DNA, 3320 bp, Homo sapiens
tatgcagaaaaggcaaacagtaatagtcagcctcagtttatccttctagttgtttcccagatgcttccctctcttcctgcaatactatattaacatttacggggtgtggagctatgtattgtttctattttagtttttaaacttgcaaaattcatgataaagagtcatcgctgtgaccttggagactgacaatcttctatatgtttttttgcagattgttaaagagacatgaaaataacttatcagtgctagccattagtaacatggaagcttcctccacccttgccaaatgcctttatgaacttaattttacagttcagagtaaggaacaagaaaaagactcagaaatgctgcagtgaaaaataattccacttacacagtgggggactcaaagtcagccacatttcacatactgttactgaagaaagcaccaagtcttaatggaacaaagaccatagaatgaattattttatctcctcccatgatgctgagaggaagcttcgtattctgatctctgagtgaatccctttgttctctgtttaaaaaaatctaaaaagaaaaaggaaaaaaaaaaagaactgctgtgggattgtcaaccagcttatctgcaggatgtttcagatctgataaatcctgatggaaactggtatgatcagaattcagtaccatccacattggaatatacatggaatattgtaaaacctacatgagcagatgaaatagaagcattaaatatttttatctatatccaaaaaggagcacatttttatatttacaaaaccgtttaagctggtttgaataatttaaaaaagtttcagcacacctatacccccgatctcagagggggccaccaatatctagctatggatcgtgtgttttgtttagaaatcagtagcttggttttcttacttgagccaatatattttcacttatttattatcataaaaatttaccagtctgaatagatcttgtaaatatttgtgaatagaatgaatacctttcatgccactgcagccactggaaatacattctgtggtgtcctagaagcattattggtaggttctaaagttttctagactttcctgtcaattgtaagtaattgtgatatattctatgcagtggatgaatgttctttaaatttgtgtaaatacttctgcaaaggtactgatgctgtaaagtcaaaacagttttgtggaactgtgatttttttttcttttttctttttttttttctttttttttttgtattatacaccttgtagaactcattttgctggctgaaagagtatggaataatatatctcatgtcattttttagaagaaaaactatttgaaggtattttttggttttccttaacatgtatccactgtaaacgtttgtcgtgtacaagctcagagcttggacagaattttttgtatttgtaaattggtttaaatacatggaattttatacaggttttctcctgtgttatatatgcattatgtgcaggtatgatattttcttcactactttttctatcttaatatagtgtggaattttattgtattattcttccattcttaatactgtaccacattcctgctcagaaactgctcacttccttaaattgtcttttttcccccagcgtgaaatgtatccatttataactgcctattgcctgttctattagcatccaaaaatgtggaaggcctcccaaccaccatttctgctgtgtccttaggatgtgcagtaaaaaatatagacctaacagtttatgttatagaatggctttatttactttggtgactgtttatagtttttaaataaaagactgaacattttcttgagtccttcatttctgagtatgcttaagacatcttaaaaatatagagagaattctaaattcagctgaaggcaaggtataacggtcacctacctatttgattatatgttgattgataacatattaaatagagaacaaataagagaggtcctttacatgacaaatttgcatgaaataagcagattaaccaagtatttatttttcatcttgttataatgcagagcaaatgtagagaacagcaaatgattgatgcagttaaagctcaatatgcctttttttactggatactgtacatttggctaaaagcttttattgtttgatgttgtgtttcttgactgtttattcagaatcacagtgtatccaaatcttcagcttgaatttggaggcagattcttagagtgaaaaagcctcagtttccatattaaaaatgttttaaatattttgattgaattagtaccaatgtaaaatctagtttcttcctgaaggaggatccctggcgctgtcctgccatgtctcaaaggaatgtttgagaaacttcatctaatattagttataaggttgtggaatttatgcttggcccaccttccaagactggcactgcccaacagacaccgctgaaatcatgtgggtatccctaggatggccttcagagccctcaaacttacaagcacctggtagttgacatcatatggggaattttctattcaccgtacttatccaaaaatctcttttaaaaagtaaatttgtgcaacaacgtttatttgaaagataatgtcttctcaaaatcagaaactgcagtggtaattaaattaatagaaaagagaacaaactgcaggtttagaaaaatggttttcatattcaccattcttccacctcattgaattgcatgctgtagttctagcttttctgctataatatgtaaatatgactgtagccttttaagcttcagtctcagcagagaatttcctaaatgcgtttgacctaatgaaactgatcatggcttcccacttaggtttttcttcttatagctttatagaactatataataatatggacttgctgtgtaatggaattaaagtgcttttgcacaataagttctgcaaaaccctctcattcatgaaaaggtgctccttgctagacagaaacttgctgatttacagtattgttatttttgtctaaagttctgtaaatacatgctttaatgttatctttgagaaatctatgtaaataatatagtctacaacatagagactgtataattctgtgttatatatgtgcctagtgctctgttggcactcaataaattttaagtaacaaaattgataatcatatagcgaaggcatatttttcttccaagctcaagtcaggattgtgactatatattaatgagactcagtaatccaacccacacctgagaactcgtctcattactttatagtcatgtcatgtatgtttttttaaccatgaaatgacaataaaatgatttttaaaatgagaa

SEQ ID NO: 433487 - DNA, 4824 bp, Homo sapiens
catctcactttacctgatgtgctgcttgtaatctcaacactcgaggtgctatacatgctcacggaaatgggagatgttgcttgcacaaaaattgcaaaagtagaaaagagcatagacatgttagtgtgtctggtttctatggatattcagatgtttggccctgatgcactagctgcggtaaaactcattgaacacccaagttccagtcatcaaatgttatctgaaattaggccacaagctatagagcaagtccaaacccagactcatgtagcatctgccccagcttccagagcagttgtagcgcagcatgttgctccacctccaggaatagtggaaatagatagtgagaagtttgcttgtcagtggctaaatgctcattttgaagtaaatccagattgttctgtttctcgagcagaaatgtattctgaatacctctcgacttgcagtaaattagctcgtggtggaatcctaacatcaactggattttataaatgtcttagaacggtctttccaaatcatacagtgaagagagtggaggattccagtagcaatgggcaggcacatattcatgtggtaggagtaaaacggagggctataccacttcccattcagatgtactatcagcagcaaccagtttctacttctgttgttcgtgttgattctgttcctgatgtatctcctgctccttcacctgcaggaatccctcatggatcacaaaccataggaaaccattttcagaggactcctgttgccaaccaatcttcaaatctgactgcaacacaaatgtcttttcctgtacaaggtgttcatactgtggcacaaactgtttcaagaattccacaaaatccttcacctcatacccaccagcaacaaaatgctccagtgactgtcattcaaagtaaagctccaattccttgtgaagttgttaaggctacagttatccagaattccataccccagacaggagttcctgttagtattgctgttggaggaggacctccacagagttctgttgttcagaatcatagtacagggccacaacctgttacagttgtgaattctcagacattgcttcaccatccatctgtaattccacagcagtctccattacacacagtggtaccaggacagatcccttcaggcactcctgttacagtaattcaacaagctgtcccacagagtcatatgtttggcagagtacagaacataccagcatgtacttctacagtttcacagggtcaacagttaatcaccacatcaccccaacctgtgcaaacttcatctcaacagacatcagctggtagccagtcacaagatactgttatcatagcacccccacagtatgtaacaacttctgcatccaatattgtctcagcaacttcagtacagaattttcaggtagctacaggacaaatggttactattgctggtgtcccaagtccacaagcctcaagggtagggtttcagaacattgcaccaaaacctctcccttctcagcaagtttcatctacagtggtacagcagcctattcaacaaccacagcagccaacccaacaaagcgtagtgattgtaagccagccagctcaacaaggtcaaacttatgcaccagccattcaccaaattgttcttgctaatccagcagctcttccagctggtcagacagttcagctaactggacaacctaacataactccatcttcttcaccatcacctgtcccagctactaataaccaagtccctactgccatgtcgtcgtcctctacccctcaatcacagggaccacctcctactgtcagtcaaatgttatctgtgaaaaggcagcaacagcagcaacattcaccagcacccccaccacagcaggtacaagtacaagttcagcagccccaacaagtacagatgcaagttcaacctcaacagtcgaatgcaggagttggtcagcctgcctctggtgagtcgagtctgattaaacagcttctgcttccgaaacgtggtccttcaacaccaggtggtaagcttattctcccagctccacagattcctccccctaataatgcaagagctcctagccctcaggtggtctatcaggtggccagtaaccaagccgcaggttttggagtgcaggggcaaactccagctcagcagctattggttgggcagcaaaatgttcagttggtcccaagtgcaatgccaccctcagggggagtacaaactgtgcccatttcgaacttacaaatattgccaggtccactgatctcaaatagcccagcaaccattttccaagggacttctggcaaccaggtaaccataacagttgtgccaaatacgagttttgcacctgcaactgtgagtcagggaaatgcaactcagctcattgctccagcaggaattaccatgagcggaacgcagacaggagttggacttccagtacaaacgcttccagccactcaagcatctcctgctggacaatcatcatgtactactgctactcccccattcaaaggtgataaaataatttgccaaaaggaggaggaagcaaaggaagcaacaggtttacatgttcatgaacgtaaaattgaagtcatggagaacccgtcctgccgacgaggagccacaaacaccagcaatggggatacaaaggaaaatgaaatgcatgtgggaagtcttttaaatgggagaaagtacagtgactcaagtctacctccttcaaactcagggaaaattcaaagtgagactaatcagtgctcactaatcagtaatgggccatcattggaattaggtgagaatggagcatctgggaaacagaactcagaacaaatagacatgcaagatatcaaaagtgatttgagaaaaccgctagttaatggaatctgtgattttgataaaggagatggttctcatttaagcaaaaacattccaaatcataaaacttccaatcatgtaggaaatggtgagatatctccaatggaaccacaagggactttagatatcactcagcaagatactgccaaaggtgatcaactagaaagaatttctaatggacctgtattaactttgggtggttcatctgtgagcagtatacaggaggcttcaaatgcggcaacacagcaatttagtggtactgatttgcttaatggacctctagcttcaagtttgaattcagatgtgcctcagcaacgcccaagtgtagttgtctcaccacattctacaacctctgttatacagggacatcaaatcatagcagttcccgactcaggatcaaaagtatcccattctcctgccctatcatctgacgttcggtctacaaatggcacagcagaatgcaaaactgtaaagaggccagcagaggatactgatagggaaacagtcgcaggaattccaaataaagtaggagttagaattgttacaatcagtgaccccaacaatgctggctgcagcgcaacaatggttgctgtgccagcaggagcagatccaagcactgtagctaaagtagcaatagaaagtgctgttcagcaaaagcaacagcatccaccaacatatgtacagaatgtggtcccgcagaacactcctatgccaccttcaccagctgtacaagtgcagggccagcctaacagttctcagccttctccattcagtggatccagtcagcctggagatccaatgagaaaacctggacagaacttcatgtgtctgtggcagtcttgtaaaaagtggtttcagacaccctcacaggttttctaccatgcagcaactgaacatggaggaaaagatgtatatccagggcagtgtctttgggaaggttgtgagccttttcagcgacagcggttttcttttattacccacttgcaggataagcactgttcaaaggatgccctacttgcaggattaaaacaagatgaaccaggacaagcaggaagtcagaagtcttctaccaagcagccaactgtagggggcacaagctcaactcctagagcacaaaaggccattgtgaatcatcccagtgctgcacttatggctctgaggagaggatcaagaaaccttgtctttcgagattttacagatgaaaaagagggaccaataactaaacacatccgactaacagctgccttaatattaaaaaatattggtaaatattcagaatgtggtcgcaggtgagtaatatgttttctgtagccaaagtgaatttagtttattttatttttacatataagttaataaaattagataactgtattttcttcattgtttttctcatcaattttgcaaatacatccaaaagtttatgcctaggtcaggccatgatgagctcttaaaagtcaaaaataaatagaagttaaaacaaccaaaaggtggtctcttaagttgttttattaagttaatttgtcttactgaccatataatttagaacaaaaagcagctgtactaaagaggaaacttaggagtttattggggaaaacaaaggaatttgatcatttgaatcacgtggagtccaaatgaaattcagtttgacacctggcattttcatgtacccatcaatggcataaataatgttaaggtatgtgtataatactctgaagttttaaaacttaactttccaatggatttaagcaaaagaaaacccaggattttgtagatctacagaaactaggagggataactcattaattcgtgagagagcaaatatagaatattctgtcaataccttgtcttccttagttacttttctagaattcctcctacatcttcaattgaccagtcttgggccgcctctctgcgaaattgtcctcagatgcatcttgtgttcctgatagtcactttctatctcag

SEQ ID NO: 433488 - DNA, 3759 bp, Homo sapiens
catctcactttacctgatgtgctgcttgtaatctcaacactcgaggtgctatacatgctcacggaaatgggagatgttgcttgcacaaaaattgcaaaagtagaaaagagcatagacatgttagtgtgtctggtttctatggatattcagatgtttggccctgatgcactagctgcggtaaaactcattgaacacccaagttccagtcatcaaatgttatctgaaattaggccacaagctatagagcaagtccaaacccagactcatgtagcatctgccccagcttccagagcagttgtagcgcagcatgttgctccacctccaggaatagtggaaatagatagtgagaagtttgcttgtcagtggctaaatgctcattttgaagtaaatccagattgttctgtttctcgagcagaaatgtattctgaatacctctcgacttgcagtaaattagctcgtggtggaatcctaacatcaactggattttataaatgtcttagaacggtctttccaaatcatacagtgaagagagtggaggattccagtagcaatgggcaggcacatattcatgtggtaggagtaaaacggagggctataccacttcccattcagatgtactatcagcagcaaccagtttctacttctgttgttcgtgttgattctgttcctgatgtatctcctgctccttcacctgcaggaatccctcatggatcacaaaccataggaaaccattttcagaggactcctgttgccaaccaatcttcaaatctgactgcaacacaaatgtcttttcctgtacaaggtgttcatactgtggcacaaactgtttcaagaattccacaaaatccttcacctcatacccaccagcaacaaaatgctccagtgactgtcattcaaagtaaagctccaattccttgtgaagttgttaaggctacagttatccagaattccataccccagacaggagttcctgttagtattgctgttggaggaggacctccacagagttctgttgttcagaatcatagtacagggccacaacctgttacagttgtgaattctcagacattgcttcaccatccatctgtaattccacagcagtctccattacacacagtggtaccaggacagatcccttcaggcactcctgttacagtaattcaacaagctgtcccacagagtcatatgtttggcagagtacagaacataccagcatgtacttctacagtttcacagggtcaacagttaatcaccacatcaccccaacctgtgcaaacttcatctcaacagacatcagctggtagccagtcacaagatactgttatcatagcacccccacagtatgtaacaacttctgcatccaatattgtctcagcaacttcagtacagaattttcaggtagctacaggacaaatggttactattgctggtgtcccaagtccacaagcctcaagggtagggtttcagaacattgcaccaaaacctctcccttctcagcaagtttcatctacagtggtacagcagcctattcaacaaccacagcagccaacccaacaaagcgtagtgattgtaagccagccagctcaacaaggtcaaacttatgcaccagccattcaccaaattgttcttgctaatccagcagctcttccagctggtcagacagttcagctaactggacaacctaacataactccatcttcttcaccatcacctgtcccagctactaataaccaagtccctactgccatgtcgtcgtcctctacccctcaatcacagggaccacctcctactgtcagtcaaatgttatctgtgaaaaggcagcaacagcagcaacattcaccagcacccccaccacagcaggtacaagtacaagttcagcagccccaacaagtacagatgcaagttcaacctcaacagtcgaatgcaggagttggtcagcctgcctctggtgagtcgagtctgattaaacagcttctgcttccgaaacgtggtccttcaacaccaggtggtaagcttattctcccagctccacagattcctccccctaataatgcaagagctcctagccctcaggtggtctatcaggtggccagtaaccaagccgcaggttttggagtgcaggggcaaactccagctcagcagctattggttgggcagcaaaatgttcagttggtcccaagtgcaatgccaccctcagggggagtacaaactgtgcccatttcgaacttacaaatattgccaggtccactgatctcaaatagcccagcaaccattttccaagggacttctggcaaccaggtaaccataacagttgtgccaaatacgagttttgcacctgcaactgtgagtcagggaaatgcaactcagctcattgctccagcaggaattaccatgagcggaacgcagacaggagttggacttccagtacaaacgcttccagccactcaagcatctcctgctggacaatcatcatgtactactgctactcccccattcaaaggtgataaaataatttgccaaaaggaggaggaagcaaaggaagcaacaggtttacatgttcatgaacgtaaaattgaagtcatggagaacccgtcctgccgacgaggagccacaaacaccagcaatggggatacaaaggaaaatgaaatgcatgtgggaagtcttttaaatgggagaaagtacagtgactcaagtctacctccttcaaactcagggaaaattcaaagtgagactaatcagtgctcactaatcagtaatgggccatcattggaattaggtgagaatggagcatctgggaaacagaactcagaacaaatagacatgcaagatatcaaaagtgatttgagaaaaccgctagttaatggaatctgtgattttgataaaggagatggttctcatttaagcaaaaacattccaaatcataaaacttccaatcatgtaggaaatggtgagatatctccaatggaaccacaagggactttagatatcactcagcaagatactgccaaaggtgatcaactagaaagaatttctaatggacctgtattaactttgggtggttcatctgtgagcagtatacaggaggcttcaaatgcggcaacacagcaatttagtggtactgatttgcttaatggacctctagcttcaagtttgaattcagatgtgcctcagcaacgcccaagtgtagttgtctcaccacattctacaacctctgttatacagggacatcaaatcatagcagttcccgactcaggatcaaaagtatcccattctcctgccctatcatctgacgttcggtctacaaatggcacagcagaatgcaaaactgtaaagaggccagcagaggatactgatagggaaacagtcgcaggaattccaaataaagtaggagttagaattgttacaatcagtgaccccaacaatgctggctgcagcgcaacaatggttgctgtgccagcaggagcagatccaagcactgtagctaaagtagcaatagaaagtgctgttcagcaaaagcaacagcatccaccaacatatgtacagaatgtggtcccgcagaacactcctatgccaccttcaccagctgtacaagtgcagggccagcctaacagttctcagccttctccattcagtggatccagtcagcctggagatccaatgagaaaacctggacagaacttcatgtgtctgtggcagtcttgtaaaaagtaaatggcaattttatatttaagtttctgtcatctactagtgtcaggaatt

SEQ ID NO: 433489 - DNA, 2140 bp, Homo sapiens
  misc_feature (20)..(20): n is a, c, g, or t
  misc_feature (22)..(22): n is a, c, g, or t
  misc_feature (42)..(42): n is a, c, g, or t
cggatccctcatcaggatcnanaactgatgtttcatagaccnatccctttttttgcttcctgcttctgcccgtccttgtagaactcattttgctggctgaaagagtatggaataatatatctcatgtcattttttagaagaaaaactatttgaaggtattttttggttttccttaacatgtatccactgtaaacgtttgtcgtgtacaagctcagagcttggacagaattttttgtatttgtaaattggtttaaatacatggaattttatacaggttttctcctgtgttatatatgcattatgtgcaggtatgatattttcttcactactttttctatcttaatatagtgtggaattttattgtattattcttccattcttaatactgtaccacattcctgctcagaaactgctcacttccttaaattgtcttttttcccccagcgtgaaatgtatccatttataactgcctattgcctgttctattagcatccaaaaatgtggaaggcctcccaaccaccatttctgctgtgtccttaggatgtgcagtaaaaaatatagacctaacagtttatgttatagaatggctttatttactttggtgactgtttatagtttttaaataaaagactgaacattttcttgagtccttcatttctgagtatgcttaagacatcttaaaaatatagagagaattctaaattcagctgaaggcaaggtataacggtcacctacctatttgattatatgttgattgataacatattaaatagagaacaaataagagaggtcctttacatgacaaatttgcatgaaataagcagattaaccaagtatttatttttcatcttgttataatgcagagcaaatgtagagaacagcaaatgattgatgcagttaaagctcaatatgcctttttttactggatactgtacatttggctaaaagcttttattgtttgatgttgtgtttcttgactgtttattcagaatcacagtgtatccaaatcttcagcttgaatttggaggcagattcttagagtgaaaaagcctcagtttccatattaaaaatgttttaaatattttgattgaattagtaccaatgtaaaatctagtttcttcctgaaggaggatccctggcgctgtcctgccatgtctcaaaggaatgtttgagaaacttcatctaatattagttataaggttgtggaatttatgcttggcccaccttccaagactggcactgcccaacagacaccgctgaaatcatgtgggtatccctaggatggccttcagagccctcaaacttacaagcacctggtagttgacatcatatggggaattttctattcaccgtacttatccaaaaatctcttttaaaaagtaaatttgtgcaacaacgtttatttgaaagataatgtcttctcaaaatcagaaactgcagtggtaattaaattaatagaaaagagaacaaactgcaggtttagaaaaatggttttcatattcaccattcttccacctcattgaattgcatgctgtagttctagcttttctgctataatatgtaaatatgactgtagccttttaagcttcagtctcagcagagaatttcctaaatgcgtttgacctaatgaaactgatcatggcttcccacttaggtttttcttcttatagctttatagaactatataataatatggacttgctgtgtaatggaattaaagtgcttttgcacaataagttctgcaaaaccctctcattcatgaaaaggtgctccttgctagacagaaacttgctgatttacagtattgttatttttgtctaaagttctgtaaatacatgctttaatgttatctttgagaaatctatgtaaataatatagtctacaacatagagactgtataattctgtgttatatatgtgcctagtgctctgttggcactcaataaattttaagtaacaaaattgataatcatatagcgaaggcatatttttcttccaagctcaagtcaggattgtgactatatattaatgagactcagtaatccaacccacacctgagaactcgtctcattactttatagtcatgtcatgtatgtttttttaaccatgaaatgacaataaaatgatttttaaaatgagaa

SEQ ID NO: 433490 - DNA, 1823 bp, Homo sapiens
catctcactttacctgatgtgctgcttgtaatctcaacactcgaggtgctatacatgctcacggaaatgggagatgttgcttgcacaaaaattgcaaaagtagaaaagagcatagacatgttagtgtgtctggtttctatggatattcagatgtttggccctgatgcactagctgcggtaaaactcattgaacacccaagttccagtcatcaaatgttatctgaaattaggccacaagctatagagcaagtccaaacccagactcatgtagcatctgccccagcttccagagcagttgtagcgcagcatgttgctccacctccaggaatagtggaaatagatagtgagaagtttgcttgtcagtggctaaatgctcattttgaagtaaatccagattgttctgtttctcgagcagaaatgtattctgaatacctctcgacttgcagtaaattagctcgtggtggaatcctaacatcaactggattttataaatgtcttagaacggtctttccaaatcatacagtgaagagagtggaggattccagtagcaatgggcaggcacatattcatgtggtaggagtaaaacggagggctataccacttcccattcagatgtactatcagcagcaaccagtttctacttctgttgttcgtgttgattctgttcctgatgtatctcctgctccttcacctgcaggaatccctcatggatcacaaaccataggaaaccattttcagaggactcctgttgccaaccaatcttcaaatctgactgcaacacaaatgtcttttcctgtacaaggtgttcatactgtggcacaaactgtttcaagaattccacaaaatccttcacctcatacccaccagcaacaaaatgctccagtgactgtcattcaaagtaaagctccaattccttgtgaagttgttaaggctacagttatccagaattccataccccagacaggagttcctgttagtattgctgttggaggaggacctccacagagttctgttgttcagaatcatagtacagggccacaacctgttacagttgtgaattctcagacattgcttcaccatccatctgtaattccacagcagtctccattacacacagtggtaccaggacagatcccttcaggcactcctgttacagtaattcaacaagctgtcccacagagtcatatgtttggcagagtacagaacataccagcatgtacttctacagtttcacagggtcaacagttaatcaccacatcaccccaacctgtgcaaacttcatctcaacagacatcagctggtagccagtcacaagatactgttatcatagcacccccacagtatgtaacaacttctgcatccaatattgtctcagcaacttcagtacagaattttcaggtagctacaggacaaatggttactattgctggtgtcccaagtccacaagcctcaagggtagggtttcagaacattgcaccaaaacctctcccttctcagcaagtttcatctacagtggtacagcagcctattcaacaaccacagcagccaacccaacaaagcgtagtgattgtaagccagccagctcaacaaggtcaaacttatgcaccagccattcaccaaattgttcttgctaatccagcagctcttccagctggtcagacagttcagctaactggacaacctaacataactccatcttcttcaccatcacctgtcccagttaggtctaccttggtagacctaacccaggtagacccaactagaagtgtgaaaacgtaggcttggattaaggcgacagagattcctaggatagtcagtagaat

SEQ ID NO: 433491 - DNA, 484 bp, Homo sapiens
gtacactttttaaatactatttgatcagtaactcatttgactgcattaaagattttgacgtgccattctcttgcttcctcttcctcaaaaaggataagcactgttcaaaggatgccctacttgcaggattaaaacaagatgaaccaggacaagcaggaagtcagaagtcttctaccaagtaaggaaaatgagtttacttcctgttgtacatacaaaaagaaactaggcaaaacacaagaaaatgaaacgcaacttagcatattaggagaccagaaacctgggttctagtccagctctgccatgaaccagcaatgtgaccctgttcaaattgcttagattctcttggcatcacttttccttttggctggacaatgtggtctgtaagttacctttcagctctaacactgattctgttttgtagactagtcagtcattggaagtaatgacagatgatatatgagaaatgctttgtaaactaaaagta

SEQ ID NO: 433492 - DNA, 665 bp, Homo sapiens
ggtgggggaatcaaaatttcaagatggaaaaataaaacaaatagtaaaacccatttacatgtaggaaagaaaagttgagcttcaacccaatgtgccactttgatataaaacaagtatgatatatatataaactgaagatataaaacaagtatgatcttgcctttgaaatcataaatgtttggggtacctgttctttgccagttaagatacatatcttattatctttgtttttttcaagtctatgctcctgtttgaagcttttcctgtaatttaggttgtctgtgaaatacctataacatataattcctatagagtatgccacattttttttctaactcatttcaaatgaaattctctcagattctagtttttgagcttgtccactagatctgaaaataaagcatccttttcctgagtccacttgaactaattgtgaatttgttacttaatttactggcatcttgggaaacaagttttgctgtggcaggaaggctgttttgagagtgagcgttgagtctactctggtttgtggatgacattgcattagggttatttcctgtattaccagtgcccccttgtggcaatatactttatgacttggaatgcaaacacattcagactcggggatcctctaatcgactgcagctgcagttgccggcgccgtt

SEQ ID NO: 433493 - DNA, 2141 bp, Homo sapiens
ggtgggggaatcaaaatttcaagatggaaaaataaaacaaatagtaaaacccatttacatgtaggaaagaaaagttgagcttcaacccaatgtgccactttgatataaaacaagtatgatatatatataaactgaagatataaaacaagtatgatcttgcctttgaaatcataaatgtttggggtacctgttctttgccagttaagatacatatcttattatctttgtttttttcaagtctatgctcctgtttgaagcttttcctgtaatttaggttgtctgtgaaatacctataacatataattcctatagagtatgccacattttttttctaactcatttcaaatgaaattctctcagattctagtttttgagcttgtccactagatctgaaaataaagcatccttttcctgagtccacttgaactaattgtgaatttgttacttaatttactggcatcttgggaaacaagttttgctgtggcaggaaggctgttttgagagtgagcgttgagtctactctggtttgtggatgacattgcattagggttatttcctgtattaccagtgcccccttgtggcaatatactttatgacttggaatgcaaacaccacttttaaaagcctgttttcaagtttttgaaaggcatttgttttctgttgtttgccaataatctgaaagtatcatgtgaaaggaattattttaaaagcattttaaacctttcccaaaggtaaaatgtgctcagattataggcacttgtaattctaaccttgtatccatttgatcaaagaaaatttgtagaacatttttacctctcatgatcacaatcattagtgtctccctttataacgacctatgttttgtttactttgaaacaccaaatttgttgtcttggttttttttacatgacagaactcatgcagtttcttttttagttgaaagttcacatcttgccccttgaatagtttgaacatttctttcttaattcttttttgtttttgttttgcactgtaaaactgatgaaaactttaagccaatcttaatgcactagcctctgtagtgtaaggaagtgtgagaaggagtttcttaatgagtttacacgtttaaatcaagcatattataagttatatgccatgtgttgaaggcttttctatttatatatataaagatttttagtatttgtttttagtgtccttgtgttgcaataatttaactcctttgactcagttgctgaaaatatttcttctattaagaagtgctcttgacttcaacacccaaacactgaaaatcatgtcaatgttacccaaagataagtttttatacagatacacaccttataagttctgatttattttcttactcattatgctgtgttctaaataaatcatgaatgagaagagtgctttattgtgaaattatttaaaactgtcctttaaaagaaaaagaggaaacgatgaacaaaaactaatctaattgccaagttagaattcattatttaatttacctcctatgcaatgattaatgctgcaaaatgtatggttatgttaccgtatattcacaaaagaaatattattacaaggtttcagaggtagccaattgcattcttttggaaatttactgtactgtttcaatgtgttaagtgccttgttgtaaagtaaaattttaagtctagattcattattttcctgacatatatttttcattatgatatctactgtatgctattgtgatagttttatgaaatgcttacattttaatcaaatatgtaaatttcagaagctcttttttcctacccaccagtaccttaatcattggtttatcacattggattcaaattcaggttccttttttgataaagaggaaatttgttttccatgcttgtgattttgtgtttgtaaacatttcaggaggaatttaggagtgtaactatagtttatacttctataatgttgtcttacatttacatttttaagtgcctaattgttaaaactgatttatgtttctcttctaaagaggatatgtgtacttggtttctaatctctttggttttgctttttaaaaaatgcaagagcctatactttgtatttacctaataaaccacagtgacatcaacagtcttttcaaaattaaaaaaactgtt

SEQ ID NO: 433494 - DNA, 1452 bp, Homo sapiens
agtcggtcgtcaagagacacctacactaatagtttatgcacagcataaactattcagattataggcacttgtaattctaaccttgtatccatttgatcaaagaaaatttgtagaacatttttacctctcatgatcacaatcattagtgtctccctttataacgacctatgttttgtttactttgaaacaccaaatttgttgtcttggttttttttacatgacagaactcatgcagtttcttttttagttgaaagttcacatcttgccccttgaatagtttgaacatttctttcttaattcttttttgtttttgttttgcactgtaaaactgatgaaaactttaagccaatcttaatgcactagcctctgtagtgtaaggaagtgtgagaaggagtttcttaatgagtttacacgtttaaatcaagcatattataagttatatgccatgtgttgaaggcttttctatttatatatataaagatttttagtatttgtttttagtgtccttgtgttgcaataatttaactcctttgactcagttgctgaaaatatttcttctattaagaagtgctcttgacttcaacacccaaacactgaaaatcatgtcaatgttacccaaagataagtttttatacagatacacaccttataagttctgatttattttcttactcattatgctgtgttctaaataaatcatgaatgagaagagtgctttattgtgaaattatttaaaactgtcctttaaaagaaaaagaggaaacgatgaacaaaaactaatctaattgccaagttagaattcattatttaatttacctcctatgcaatgattaatgctgcaaaatgtatggttatgttaccgtatattcacaaaagaaatattattacaaggtttcagaggtagccaattgcattcttttggaaatttactgtactgtttcaatgtgttaagtgccttgttgtaaagtaaaattttaagtctagattcattattttcctgacatatatttttcattatgatatctactgtatgctattgtgatagttttatgaaatgcttacattttaatcaaatatgtaaatttcagaagctcttttttcctacccaccagtaccttaatcattggtttatcacattggattcaaattcaggttccttttttgataaagaggaaatttgttttccatgcttgtgattttgtgtttgtaaacatttcaggaggaatttaggagtgtaactatagtttatacttctataatgttgtcttacatttacatttttaagtgcctaattgttaaaactgatttatgtttctcttctaaagaggatatgtgtacttggtttctaatctctttggttttgctttttaaaaaatgcaagagcctatactttgtatttacctaataaaccacagtgacatcaacagtcttttcaaaattaaaaaaactgtt

SEQ ID NO: 433495 - DNA, 1929 bp, Homo sapiens
acattccgtcgccttgccgccgcccggccccacagttgtctttgccggagctgcagtcgcgctggggttagggcgggggggcgggcggggagaggagaaggccgcggcggaggcaggtgagaggaggaaggaagcggcggcgcggcgggcacagcagctcaggcggcggcccggttcctgggagtgtcggtgcggcgcgttggttggggcggatcccgcggggcccgggcgggggaaggagtcaccggcccggccatggcggacaacgagaaactggacaaccaacggctcaagaatttcaagaacaaaggccgcgacttggagactatgagaagacaacgaaatgaagttgtagttgaattaaggaagaataaaagagatgaacatctcttaaagagaaggaatgtaccacatgaagatatctgtgaagactctgatatagatggtgattatagagtgcaaaatacctctctagaagctattgttcaaaatgcttcaagtgataaccaaggaattcaattaagtgcagttcaagctgctaggaagcttttgtccagtgatcgaaatccaccaattgatgacttaataaaatctggaatattgcccattttagtccattgtcttgaaagagatgacaatccttctttacagtttgaagctgcatgggctttgacaaacattgcatctggaacttctgaacaaactcaagcagtagttcagtccaatgctgtgccacttttcctgaggcttctccattcaccccatcagaatgtctgtgagcaagcagtgtgggcattgggaaatatcataggtgatgggccccagtgtagagattatgtcataagtcttggagttgtgaaacctttactttccttcataagtccatctattcctataacattcttaagaaatgttacttgggttatggtcaacttatgtcgccacaaagacccaccaccaccaatggaaaccattcaggagattcttccagccctttgtgttttaattcatcacacagatgtaaatatactggtagacacagtctgggccctctcttaccttactgatgctggcaatgaacaaatacagatggtaatagactctggaatagttcctcatttggttcctctgctcagccaccaggaagttaaagttcagactgctgcacttagagctgtgggcaacattgttactggaactgatgagcaaacacaagtagttttgaactgtgatgctctttcacacttcccagcactcctgacacatcccaaagagaaaattaataaagaagcagtgtggttcctctccaacatcactgcaggaaatcagcagcaggtacaggcagtaattgatgccaatcttgtaccaatgataatacaccttttggataagggggattttggcactcaaaaagaagctgcttgggccataagtaacttaacaattagtggaaggaaagatcaagtggcttaccttatccaacaaaatgttatcccacctttttgcaacttgctgactgtaaaagatgcacaagttgtgcaagtagtactcgatggactaagtaatatattaaaaatggctgaagatgaggcagaaaccataggcaatcttatagaagaatgtggagggctggagaaaattgaacaacttcaaaatcatgaaaatgaagacatctacaaattggcctatgagatcattgatcagttcttctcttcagatgatattgatgaagaccctagccttgttccagaggcaattcaaggcggaacatttggtttcaattcatctgccaatgtaccaacagaagggttccagttttagaaagatgttgtggaagttaggtacaatgcagcactgagatatatatatatatatgtgtgtgtgtatatatatatatatatacatatatataaaaaggtttgatccatc

SEQ ID NO: 433496 - DNA, 902 bp, Homo sapiens
cgacccacgcgtcgcccacgcgtcgtgtaaaagatgcacaagttgtgcaagtagtactcgatggactaagtaatatattaaaaatggctgaagatgaggcagaaaccataggcaatcttatagaagaatgtggagggctggagaaaattgaacaacttcaaaatcatgaaaatgaagacatctacaaattggcctatgagatcattgatcagttcttctcttcagatgatattgatgaagaccctagccttgttccagaggcaattcaaggcggaacatttggtttcaattcatctgccaatgtaccaacagaagggttccagttttagaaagatgttgtggaagttaggtacaatgcagcactgagatatatatatatatatgtgtgtgtgtatatatatatatatatacatatatataaaaaggtttgatccatcaagcttggctcatgggatctgctgctgcattaaatcgggaaagaaaatgtgaagatttcatttggaatcacagaaaatgcccaaatgaggtcaagatggcgagtgggtgcgagtgagaatgagtggcaaaatgtaatgaaaactttacatgaatgcttatttaggttgttcaaagtaaaaagggctacaggtcacagatcgtcagtgcctgagaaagaacattgacttactctatatcaattgaggggaaagtgcagtaccgtcatcttcaagccttgtaagcataaaagagaataggctgccatataagtcaacggaaaatgagcccaggcttgctatgaagcagtgtgtgaatggacaatgttgaatgaatgtctggctcagtgatggagagccaggttcatctttgaaatctagggctcttcactcatgaagcagactcctagtcctggagtgactgtgtac

SEQ ID NO: 433497 - DNA, 427 bp, Homo sapiens
  misc_feature (31)..(31): n is a, c, g, or t
  misc_feature (39)..(39): n is a, c, g, or t
  misc_feature (48)..(48): n is a, c, g, or t
ggctgttcaggaggtccccattaggtccatngtccattnaggtccatngtcttgaaagagatgacaatccttctttacagtttgaagctgcatgggctttgacaaacattgcatctggaacttctgaacaaactcaagcagtagttcagtccaatgctgtgccacttttcctgaggcttctccattcaccccatcagaatgtctgtgagcaagcagtgtgggcattgggaaatatcataggtgatgggccccagtgtagagattatgtcataagtcttggagttgtgaaacctttactttccttcataagtccatctattcctataacattcttaagaaatgttacttgggttatggtcaacttatgtcgccacaaagacccaccaccacttatgacctaaatgaacgggatcgctctagaatgctc

SEQ ID NO: 433498 - DNA, 781 bp, Homo sapiens
acagccaaaagagggaaacaacttggctgggcgcagtggctcacgcctgtaatcccaagcactttgggaggccaaggcgggccggatcacctgaggttgggagttgggaaaccagcactaccaacatggagaaaccccgtctctactaaaaatacaaaattagccaggcatggtggcgcatgcctgtgatcccagctacctgggaggctgaggcaggagaatcacttgaacccatgattttaaaaatattttcctttaatttttttgtagactatgagaagacaacgaaatgaagttgtagttgaattaaggaaggtgagtctgattaatattgggtacttctaagcataattctaacaacattatagcattatatacaagatgccaaatatatattatgtttttaggtaaaatgtataacctattgtataactaaattttatttactaaatttagttaaactttttaaaatctcaactgctaagcatttttctttagaaaaaggagagattttgactaaatttgacaggcttttgaagttgaaaggatacaactagttacttgttcattatgcaaaaacagatataaagaacttaaagtataagtcattgagatacagttgtattaaatagttctgctattaatgggcagtagtaagtccctgaaaagaacttgttgcaaacttcttcaacttttaagtattatagttgagaatatatttataaatttgctccaagcattttaagtgaagttgaaatggcccttgatttttgtaagacat

SEQ ID NO: 433499 - DNA, 758 bp, Homo sapiens
acattccgtcgccttgccgccgcccggccccacagttgtctttgccggagctgcagtcgcgctggggttagggcgggggggcgggcggggagaggagaaggccgcggcggaggcaggtgagaggaggaaggaagcggcggcgcggcgggcacagcagctcaggcggcggcccggttcctgggagtgtcggtgcggcgcgttggttggggcggatcccgcggggcccgggcgggggaaggagtcaccggcccggccatggcggacaacgagaaactggacaaccaacggctcaagaatttcaagaacaaaggccgcgacttggaggacaacttctccgttgaaaaaaacacccccggcgtgagaggccatcctggtgatcctaacagtgccttccagcggcctgtgttttactctggatatagctgattcaagatgtggctcacggtgtgccctcttccaggcaaaggataccccttatttcagcttgtccacaaatctctttaccccctcctgagaggagaccaccagctgcattcttacatataaagtctaaagggttatacaaagctgtcatcctctagtctacagtatcctttccctccacctgctggtggtggtagtgggggatggggtgggctagggaatggcaccatcacgtttgattatttaaaaaggaaaaaaaaagcttcattgtcttagatacagctgctcccgagattgtctacataaggtgtatgggttaaatacacacatgcaca

SEQ ID NO: 433500 - DNA, 2394 bp, Homo sapiens
acattccgtcgccttgccgccgcccggccccacagttgtctttgccggagctgcagtcgcgctggggttagggcgggggggcgggcggggagaggagaaggccgcggcggaggcaggtgagaggaggaaggaagcggcggcgcggcgggcacagcagctcaggcggcggcccggttcctgggagtgtcggtgcggcgcgttggttggggcggatcccgcggggcccgggcgggggaaggagtcaccggcccggccatggcggacaacgagaaactggacaaccaacggctcaagaatttcaagaacaaaggccgcgacttggagactatgagaagacaacgaaatgaagttgtagttgaattaaggaagaataaaagagatgaacatctcttaaagagaaggaatgtaccacatgaagatatctgtgaagactctgatatagatggtgattatagagtgcaaaatacctctctagaagctattgttcaaaatgcttcaagtgataaccaaggaattcaattaagtgcagttcaagctgctaggaagcttttgtccagtgatcgaaatccaccaattgatgacttaataaaatctggaatattgcccattttagtccattgtcttgaaagagatgacaatccttctttacagtttgaagctgcatgggctttgacaaacattgcatctggaacttctgaacaaactcaagcagtagttcagtccaatgctgtgccacttttcctgaggcttctccattcaccccatcagaatgtctgtgagcaagcagtgtgggcattgggaaatatcataggtgatgggccccagtgtagagattatgtcataagtcttggagttgtgaaacctttactttccttcataagtccatctattcctataacattcttaagaaatgttacttgggttatggtcaacttatgtcgccacaaagacccaccaccaccaatggaaaccattcaggagattcttccagccctttgtgttttaattcatcacacagatgtaaatatactggtagacacagtctgggccctctcttaccttactgatgctggcaatgaacaaatacagatggtaatagactctggaatagttcctcatttggttcctctgctcagccaccaggaagttaaagttcagactgctgcacttagagctgtgggcaacattgttactggaactgatgagcaaacacaagtagttttgaactgtgatgctctttcacacttcccagcactcctgacacatcccaaagagaaaattaataaagaagcagtgtggttcctctccaacatcactgcaggaaatcagcagcaggtacaggcagtaattgatgccaatcttgtaccaatgataatacaccttttggataagggggattttggcactcaaaaagaagctgcttgggccataagtaacttaacaattagtggaaggaaagatcaagtggcttaccttatccaacaaaatgttatcccacctttttgcaacttgctgactgtaaaagatgcacaagttgtgcaagtagtactcgatggactaagtaatatattaaaaatggctgaagatgaggcagaaaccataggcaatcttatagaagaatgtggagggctggagaaaattgaacaacttcaaaatcatgaaaatgaagacatctacaaattggcctatgagatcattgatcagttcttctcttcagatgatattgatgaagaccctagccttgttccagaggcaattcaaggcggaacatttggtttcaattcatctgccaatgtaccaacagaagggttccagttttagaaagatgttgtggaagttaggtacaatgcagcactgagatatatatatatatatgtgtgtgtgtatatatatatatatatacatatatataaaaaggtttgatccatcaagcttggctcatgggatctgctgctgcattaaatcgggaaagaaaatgtgaagatttcatttggaatcacagaaaatgcccaaatgaggtcaagatggcgagtgggtgcgagtgagaatgagtggcaaaatgtaatgaaaactttacatgaatgcttatttaggttgttcaaagtaaaaagggctacaggtcacagatcgtcagtgcctgagaaagaacattgacttactctatatcaattgaggggaaagtgcagtaccgtcatcttcaagccttgtaagcataaaagagaataggctgccatataagtcaacggaaaatgagcccaggcttgctatgaagcagtgtgtgaatggacaatgttgaatgaatgtctggctcagtgatggagagccaggttcatctttgaaatctagggctcttcactcatgaagcagactcctagtcctggagtgactgtgtac

SEQ ID NO: 433501 - DNA, 1823 bp, Homo sapiens
  misc_feature (31)..(31): n is a, c, g, or t
  misc_feature (39)..(39): n is a, c, g, or t
  misc_feature (48)..(48): n is a, c, g, or t
ggctgttcaggaggtccccattaggtccatngtccattnaggtccatngtcttgaaagagatgacaatccttctttacagtttgaagctgcatgggctttgacaaacattgcatctggaacttctgaacaaactcaagcagtagttcagtccaatgctgtgccacttttcctgaggcttctccattcaccccatcagaatgtctgtgagcaagcagtgtgggcattgggaaatatcataggtgatgggccccagtgtagagattatgtcataagtcttggagttgtgaaacctttactttccttcataagtccatctattcctataacattcttaagaaatgttacttgggttatggtcaacttatgtcgccacaaagacccaccaccaccaatggaaaccattcaggagattcttccagccctttgtgttttaattcatcacacagatgtaaatatactggtagacacagtctgggccctctcttaccttactgatgctggcaatgaacaaatacagatggtaatagactctggaatagttcctcatttggttcctctgctcagccaccaggaagttaaagttcagactgctgcacttagagctgtgggcaacattgttactggaactgatgagcaaacacaagtagttttgaactgtgatgctctttcacacttcccagcactcctgacacatcccaaagagaaaattaataaagaagcagtgtggttcctctccaacatcactgcaggaaatcagcagcaggtacaggcagtaattgatgccaatcttgtaccaatgataatacaccttttggataagggggattttggcactcaaaaagaagctgcttgggccataagtaacttaacaattagtggaaggaaagatcaagtggcttaccttatccaacaaaatgttatcccacctttttgcaacttgctgactgtaaaagatgcacaagttgtgcaagtagtactcgatggactaagtaatatattaaaaatggctgaagatgaggcagaaaccataggcaatcttatagaagaatgtggagggctggagaaaattgaacaacttcaaaatcatgaaaatgaagacatctacaaattggcctatgagatcattgatcagttcttctcttcagatgatattgatgaagaccctagccttgttccagaggcaattcaaggcggaacatttggtttcaattcatctgccaatgtaccaacagaagggttccagttttagaaagatgttgtggaagttaggtacaatgcagcactgagatatatatatatatatgtgtgtgtgtatatatatatatatatacatatatataaaaaggtttgatccatcaagcttggctcatgggatctgctgctgcattaaatcgggaaagaaaatgtgaagatttcatttggaatcacagaaaatgcccaaatgaggtcaagatggcgagtgggtgcgagtgagaatgagtggcaaaatgtaatgaaaactttacatgaatgcttatttaggttgttcaaagtaaaaagggctacaggtcacagatcgtcagtgcctgagaaagaacattgacttactctatatcaattgaggggaaagtgcagtaccgtcatcttcaagccttgtaagcataaaagagaataggctgccatataagtcaacggaaaatgagcccaggcttgctatgaagcagtgtgtgaatggacaatgttgaatgaatgtctggctcagtgatggagagccaggttcatctttgaaatctagggctcttcactcatgaagcagactcctagtcctggagtgactgtgtac

SEQ ID NO: 433502 - DNA, 1444 bp, Homo sapiens
acattccgtcgccttgccgccgcccggccccacagttgtctttgccggagctgcagtcgcgctggggttagggcgggggggcgggcggggagaggagaaggccgcggcggaggcaggtgagaggaggaaggaagcggcggcgcggcgggcacagcagctcaggcggcggcccggttcctgggagtgtcggtgcggcgcgttggttggggcggatcccgcggggcccgggcgggggaaggagtcaccggcccggccatggcggacaacgagaaactggacaaccaacggctcaagaatttcaagaacaaaggccgcgacttggagactatgagaagacaacgaaatgaagttgtagttgaattaaggaagaataaaagagatgaacatctcttaaagagaaggaatgtaccacatgaagatatctgtgaagactctgatatagatggtgattatagagtgcaaaatacctctctagaagctattgttcaaaatgcttcaagtgataaccaaggaattcaattaagtgcagttcaagctgctaggaagcttttgtccagtgatcgaaatccaccaattgatgacttaataaaatctggaatattgcccattttagtccattgtcttgaaagagatgacaatccttctttacagtttgaagctgcatgggctttgacaaacattgcatctggaacttctgaacaaactcaagcagtagttcagtccaatgctgtgccacttttcctgaggcttctccattcaccccatcagaatgtctgtgagcaagcagtgtgggcattgggaaatatcataggtgatgggccccagtgtagagattatgtcataagtcttggagttgtgaaacctttactttccttcataagtccatctattcctataacattcttaagaaatgttacttgggttatggtcaacttatgtcgccacaaagacccaccaccaccaatggaaaccattcaggagattcttccagccctttgtgttttaattcatcacacagatgtaaatatactggtagacacagtctgggccctctcttaccttactgatgctggcaatgaacaaatacagatggtaatagactctggaatagttcctcatttggttcctctgctcagccaccaggaagttaaagttcagactgctgcacttagagctgtgggcaacattgttactggaactgatgagcaaacacaagtagttttgaactgtgatgctctttcacacttcccagcactcctgacacatcccaaagagaaaattaataaagaagcagtgtggttcctctccaacatcactgcaggaaatcagcagcaggtacaggcagtaattgatgccaatcttgtaccaatgataatacaccttttggataaggggattttggcccaagcagcttctttttgagtgccaagtcgacgcggccgga

SEQ ID NO: 433503 - DNA, 2322 bp, Homo sapiens
acattccgtcgccttgccgccgcccggccccacagttgtctttgccggagctgcagtcgcgctggggttagggcgggggggcgggcggggagaggagaaggccgcggcggaggcaggtgagaggaggaaggaagcggcggcgcggcgggcacagcagctcaggcggcggcccggttcctgggagtgtcggtgcggcgcgttggttggggcggatcccgcggggcccgggcgggggaaggagtcaccggcccggccatggcggacaacgagaaactggacaaccaacggctcaagaatttcaagaacaaaggccgcgacttggagactatgagaagacaacgaaatgaagttgtagttgaattaaggaagaataaaagagatgaacatctcttaaagagaaggaatgtaccacatgaagatatctgtgaagactctgatatagatggtgattatagagtgcaaaatacctctctagaagctattgttcaaaatgcttcaagtgataaccaaggaattcaattaagtgcagttcaagctgctaggaagcttttgtccagtgatcgaaatccaccaattgatgacttaataaaatctggaatattgcccattttagtccattgtcttgaaagagatgacaatccttctttacagtttgaagctgcatgggctttgacaaacattgcatctggaacttctgaacaaactcaagcagtagttcagtccaatgctgtgccacttttcctgaggcttctccattcaccccatcagaatgtctgtgagcaagcagtgtgggcattgggaaatatcataggtgatgggccccagtgtagagattatgtcataagtcttggagttgtgaaacctttactttccttcataagtccatctattcctataacattcttaagaaatgttacttgggttatggtcaacttatgtcgccacaaagacccaccaccaccaatggaaaccattcaggagattcttccagccctttgtgttttaattcatcacacagatgtaaatatactggtagacacagtctgggccctctcttaccttactgatgctggcaatgaacaaatacagatggtaatagactctggaatagttcctcatttggttcctctgctcagccaccaggaagttaaagttcagactgctgcacttagagctgtgggcaacattgttactggaactgatgagcaaacacaagtagttttgaactgtgatgctctttcacacttcccagcactcctgacacatcccaaagagaaaattaataaagaagcagtgtggttcctctccaacatcactgcaggaaatcagcagcaggtacaggcagtaattgatgccaatcttgtaccaatgataatacaccttttggataaggtggcttaccttatccaacaaaatgttatcccacctttttgcaacttgctgactgtaaaagatgcacaagttgtgcaagtagtactcgatggactaagtaatatattaaaaatggctgaagatgaggcagaaaccataggcaatcttatagaagaatgtggagggctggagaaaattgaacaacttcaaaatcatgaaaatgaagacatctacaaattggcctatgagatcattgatcagttcttctcttcagatgatattgatgaagaccctagccttgttccagaggcaattcaaggcggaacatttggtttcaattcatctgccaatgtaccaacagaagggttccagttttagaaagatgttgtggaagttaggtacaatgcagcactgagatatatatatatatatgtgtgtgtgtatatatatatatatatacatatatataaaaaggtttgatccatcaagcttggctcatgggatctgctgctgcattaaatcgggaaagaaaatgtgaagatttcatttggaatcacagaaaatgcccaaatgaggtcaagatggcgagtgggtgcgagtgagaatgagtggcaaaatgtaatgaaaactttacatgaatgcttatttaggttgttcaaagtaaaaagggctacaggtcacagatcgtcagtgcctgagaaagaacattgacttactctatatcaattgaggggaaagtgcagtaccgtcatcttcaagccttgtaagcataaaagagaataggctgccatataagtcaacggaaaatgagcccaggcttgctatgaagcagtgtgtgaatggacaatgttgaatgaatgtctggctcagtgatggagagccaggttcatctttgaaatctagggctcttcactcatgaagcagactcctagtcctggagtgactgtgtac

SEQ ID NO: 433504 - DNA, 1948 bp, Homo sapiens
accgcccttttttataatatatcccagcggccttgtaccaacttccccacatcttctaaaactgaacccttctgtggtacatggcagatgaatgaaaccaaatggttcccctgaatgcctctgaaccagcctagggtctttcatcaatatcatctgaagagaagaactgatcatgatctcatagccatttgtagatgtcttcattttcatgattttgaattgttcaattttctccaccctcccacattcttctataagattgcctatgtttctgcctcatcttcagccatttttaatatatttacttagtccatcgagtactacttgcacacttgtgcatcttttacagtcagcaagttgcaaaaaggtgggataacattttgttgataaggtaaccacttgatctttccttccactaattgttaagttacttatggcccaagcagcttctttttgagtgccaaatcccccttatccaaaaggtgtattatcattggtacaagattggcatcaattactgcctgtacctgctgctgatttcctgcagtgatgttggagaggaaccacactgcttctttattaattttctctttgggatgtgtccaggagtgctgggaagtgtgaaagagcatcacagttcaaaactacttgtgtttgctcatcagttcctcatttggttcctctgctcagccaccaggaagttaaagttcagactgctgcacttagagctgtgggcaacattgttactggaactgatgagcaaacacaagtagttttgaactgtgatgctctttcacacttcccagcactcctgacacatcccaaagagaaaattaataaagaagcagtgtggttcctctccaacatcactgcaggaaatcagcagcaggtacaggcagtaattgatgccaatcttgtaccaatgataatacaccttttggataagggggattttggcactcaaaaagaagctgcttgggccataagtaacttaacaattagtggaaggaaagatcaagtggcttaccttatccaacaaaatgttatcccacctttttgcaacttgctgactgtaaaagatgcacaagttgtgcaagtagtactcgatggactaagtaatatattaaaaatggctgaagatgaggcagaaaccataggcaatcttatagaagaatgtggagggctggagaaaattgaacaacttcaaaatcatgaaaatgaagacatctacaaattggcctatgagatcattgatcagttcttctcttcagatgatattgatgaagaccctagccttgttccagaggcaattcaaggcggaacatttggtttcaattcatctgccaatgtaccaacagaagggttccagttttagaaagatgttgtggaagttaggtacaatgcagcactgagatatatatatatatatgtgtgtgtgtatatatatatatatatacatatatataaaaaggtttgatccatcaagcttggctcatgggatctgctgctgcattaaatcgggaaagaaaatgtgaagatttcatttggaatcacagaaaatgcccaaatgaggtcaagatggcgagtgggtgcgagtgagaatgagtggcaaaatgtaatgaaaactttacatgaatgcttatttaggttgttcaaagtaaaaagggctacaggtcacagatcgtcagtgcctgagaaagaacattgacttactctatatcaattgaggggaaagtgcagtaccgtcatcttcaagccttgtaagcataaaagagaataggctgccatataagtcaacggaaaatgagcccaggcttgctatgaagcagtgtgtgaatggacaatgttgaatgaatgtctggctcagtgatggagagccaggttcatctttgaaatctagggctcttcactcatgaagcagactcctagtcctggagtgactgtgtac

SEQ ID NO: 433505 - DNA, 851 bp, Homo sapiens
cttacatagtggaggtggagatcctcctctccaaggaccacccgcgtagggcgagattccccaattctgacttttcactactatcccccacaggggcggggctccaactccaggtaaccagaccaggcaacctggacttccaattagcaggggagtccccaagccagcctggccaatctcggccggctagccaagacgaccagacgtgacgtcagacatgattaagttggcgcgtcacctagacgtcagcctcttacctctcggacgtcccgtcccaggagcaaaactctagtgactttgggcccgcccccgtgagagtggagggcggccgatgagggcggttctgaagggaacaagaccaatgagacgagcccggggcggggcgcggggccggagggtggggcgggtggcggcggtggcagtccgaggtctggctccgcgcagtatatgacagtacgtcagcagcgggatggccctagcagtggcggcggctgcagaagcccaagcagccgcggccgcagtggaggctagagccggagcggcggcggcggcggcaccccggggagtttaagatggcggcgggggggacagggggcctgcgggaggagcagcgctatgggctgtcgtgcggacggctggggcaggacaacatcaccgtactgcatgtgaagctcaccgagacggcgatccgggcgctcgagacttaccagagccacaagaatttaattccttttcgaccttcaatccagttccaaggactccacggggtgagtactcttattgatttaacaaacaaatctaatgttcttgcacgctattcaacttttaaaatccgttttcagttgaccctt

SEQ ID NO: 433506 - DNA, 6956 bp, Homo sapiens
  misc_feature (1649)..(1649): n is a, c, g, or t
  misc_feature (6956)..(6956): n is a, c, g, or t
cttacatagtggaggtggagatcctcctctccaaggaccacccgcgtagggcgagattccccaattctgacttttcactactatcccccacaggggcggggctccaactccaggtaaccagaccaggcaacctggacttccaattagcaggggagtccccaagccagcctggccaatctcggccggctagccaagacgaccagacgtgacgtcagacatgattaagttggcgcgtcacctagacgtcagcctcttacctctcggacgtcccgtcccaggagcaaaactctagtgactttgggcccgcccccgtgagagtggagggcggccgatgagggcggttctgaagggaacaagaccaatgagacgagcccggggcggggcgcggggccggagggtggggcgggtggcggcggtggcagtccgaggtctggctccgcgcagtatatgacagtacgtcagcagcgggatggccctagcagtggcggcggctgcagaagcccaagcagccgcggccgcagtggaggctagagccggagcggcggcggcggcggcaccccggggagtttaagatggcggcgggggggacagggggcctgcgggaggagcagcgctatgggctgtcgtgcggacggctggggcaggacaacatcaccgtactgcatgtgaagctcaccgagacggcgatccgggcgctcgagacttaccagagccacaagaatttaattccttttcgaccttcaatccagttccaaggactccacgggcttgtcaaaattcccaaaaatgatcccctcaatgaagttcataactttaacttttatttgtcaaatgtgggcaaagacaaccctcagggcagctttgactgcatccagcaaacattctccagctctggagcctcccagctcaattgcctgggatttatacaagataaaattacagtgtgtgcaacaaacgactcgtatcagatgacacgagaaagaatgacccaggcagaggaggaatcccgcaaccgaagcacaaaagttatcaaacccggtggaccatatgtagggaaaagagtgcaaattcggaaagcacctcaagctgtttcagatacagttcctgagaggaaaaggtcaacccccatgaaccctgcaaatacaattcgaaagacacatagcagcagcaccatctctcagaggccatacagggacagggtgattcacttactggccctgaaggcctacaagaaaccggagctacttgctagactccagaaagatggtgtcaatcaaaaagacaagaactccctgggagcaattctgcaacaggtagccaatctgaattctaaggacctctcatataccttaaaggattatgtttttaaagagcttcaaagagactggcctggatacagtgaaatagacagacggtcattggagtcagtgctctctagaaaactaaatccgtctcagaatgctacaggcaccagccgttcagaatctcctgtatgttctagtagagatgctgtatcttctcctcagaaacggcttttggattcagagtttattgatcctttaatgaataaaaaagcccgaatatctcacctgacgaacagagtaccaccaacactaaatggtcatttgaatcccaccagtgaaaaatcngctgcaggcctcccgctgccccctgcggctgctgccatccctacccctccaccgctgccttcaacctatctgcccatctcacatcctcctcagattgtaaattctaactccaactcccctagcactccagaaggccgggggactcaagacctacctgttgacagttttagtcaaaacgatagtatctatgaggaccagcaagacaaatatacctctaggacttctctggaaaccttaccccctggttccgttctactaaagtgtccaaagcctatggaagaaaaccattcaatgtctcacaaaaagtccaaaaagaagtctaaaaaacataaggaaaaggaccaaataaaaaagcacgacattgagactattgaggaaaaggaggaagatcttaagagagaagaggaaattgccaagctaaataactccagtccaaattccagtggaggagttaaagaggattgcactgcctccatggaaccttcagcaattgaactcccagattatttgataaaatatatcgctatcgtctcctatgagcaacgccagaattataaggatgacttcaatgcagagtatgatgagtacagagctttgcatgccaggatggagactgtagctagaagatttatcaaactagatgcacaaagaaagcgcctttctccaggctcaaaagagtatcagaatgttcatgaagaagtcttacaagaatatcagaagataaagcagtctagtcccaattaccatgaagaaaaatacagatgtgaatatcttcataacaagctggctcacatcaaaaggctaataggtgaatttgaccaacagcaagcagagtcatggtcctagaactctgcttggaccagaagatgtgaataaacttaagcttatttatttaaaattccaaatgagttgctctagattctaaaaaggtgaaactttggctgttgaaagtttcagtattagtaaacttgagttactttttcttttccattttactttgcttccctgcatttcgaagctgctctttctggtcctccccaccaccccacccccaagacttgtgtttgttaatagaaataatttttttaggtattggggatccattgtctatatttcaaatcagttttttttcctcaaaaacttgtgtttgttattagaaatgattttttagatattggggatccagtgtccacacttaaaagttgtatgtgtttaaaaaacaacaacagtaatgtgcaaggtgaaatgcttttggataaacgtaagcctattttctgacgtttcttaatgcaaactctttgccttaaatggtagaatatttagaaatttgcacaaaattaaaaaaataaacattgtcttggagggttaaaaaatagaaaggtgtatgtgtatagattcacatacacatatgtatatacaggctgacttgatctagaacattaaatccgccctgcaagttaaccccccattgcaatggttgccttaaggtgtttgctagttgtgtacatagtgtggttaatcattagctacactgcttcccacttgattagagcaatgggaagcatactgtggcctaccagcatctggaagtgtgtgctcgatctgtatgtgtgcagaggtggtgtggatgtgagcgtgcatgaaggaaaaaaagctgctactcctagtaggccaaacgctcaggttaaacaactgacgagtgttactgtagggtgtttttttgtttttttgttttttttcttctatcaaattgctacttttgttgtggaagacaaaagcatttccatttcaacgagtttgtcagctttattaatgttgggcaaaaattgatatgtcatgaaaatgaaacagatctatagttttgggacaaaattataaaatgaaatgtgtaggtaacctatttatatactgctataaagtattttttgaagagagatatgcaaagaagctattacctacataagaggtatatttaaagattttttttttcatcctggtgccaggaatataaaaaagagtggatatatttaaccataacatactgtgattcatcaaacagcacaaactttcatttcatggagtttatctgttgacattgatttaaactgtcacttgttttatcatgtgggaacataagttatgtggtcaaaaatataaggattttgaattaatgttgattcaagttgtattgtcttattgtattgtcttttcaaagtgctgccagttgaaaagggaagcattatgtttacaaatctgttttgaaatgtttgccaaaattttggtagtgtctttaataaagatgtttgtctccagcatccagaaaaataaatgaataactttgttgtgtatcactgtaaaccagaaaaatgttggttatctagaaaacttgagagagcatgtagattaacttttctctttggagttctaaaacattaactggaaagattagataatatactaaatgtatacagaagtatacagactatacaaagactgaaacaagtcccttttgcactacaactctataacattaccgcagaaattttggttctatgtagcatggacctcctaaggaattctgtttcttttagcattgagatccctggtgctctttttttacctcagaattggtacaatcattattaaacgttaatttatttcaaactttttaattgaaaaaaggaaagggaaacttaattggggataaattcaggcatcatattattatgatagagtctcctgagtggttcgtctataggtaatgaactcattggtgttatttcttggacatcttggccttttaatcaaagactgtgtgctgctatttgctatgagcaaggtttctcaaaagcaaaaggtgcttggaccatttggatcacctgagttagaatctctaggtatagggcccaagtatctgcattttcacaggtttcttgtaggtgactttctgcaagctaaagtatgagaaccattggcttggatgtagttctaaacttttaggtctgtaaatcttgaaatcttgaactgaaggtcaactattggcttttttttttttttaatgtccatcatgtcagcaggtgcaaatcacttttcccctttgcatgatctgaggcacctcctcagttgtttcactgccaactcttgtttcagaacctgtttacaaacaagccttccagttggtgaatggttagccattggagctcctaccctgtacatcagcacatcttctggtttacaagttgggtaacaatgaaagctggagatgctaaatggaaatccagcattgcatacccttagacctgatcacataccagtaaaagccttaatttagatgttagttgtatgtgttggacagatccttgcaaaagtgtgtctgtctattagttgtaaatttgaaaattataaatctctgaatctgctactatccaagtttcatcccttttgaagatgaggcatgagcctattaaaatatttataatcatttttcgtcccctactgcaagacttttagattcttacaaatgattactacaggaatagtggccacttaatgtcagttactccggtggaagaatttatctagttttttttcttttcttttttggaaggatggtgtgaaaaatagcaagattagagaatgagttgtatagttttttctatcacatttcatctaaaatgatttgaaggacttttgaagatttttaccaacatccttaaatcaactccaggttggatgaacaactgatttaaaacaaactaagagaacattaactagatgtgggctttttaaaatatataggtattgcatttcctaccttgttatttattccactttgaatactttagagggcttaactttcaactctttaaggtagtaatggatagttttatacttgttctcacaaaattgttatggtcagtttatatcattgctccatgcattgattataaaaattcagtattaattttttctgatcttataagctttataggagttttcttttctcttataaagtgtttcaccttatgtaaaacaaatgcctgcttgcatattggaagatgttgaaattagttttagacaaaagtggtccatcaattcagacactctgcttggatgccttacccttttcattagtgcattctttgcttctgaaacttggcagaaactcgttagccagtccactgcctttctgacaatgtgtggagtcacgtatgcttggtatatgcctttactacttttaaagttctacagtttattacttgcccaagtgttactaaatccttttcttatgtgtactggatggagaaaaaattatagccagcactttgagaggaaagttttcagaaacaatattaactggcactactaactgaaggccacaggagatgctatcaatgttatttgtaatctgaagattgaacaaggctgtgaggctcatttcaaactattttgaggtgttaaaatatatatatgctgtttctcagctgttccactcaaaccgtgttaggactctcaaaggtaaaatgtcacaggggcttttcagttgttacagagctcagcagctgtggttgcccctgttctacaccaatttcagttcaataaaaatgttaactttgcaaaaaaaaaaaaaaaaaaaaaaaaaaaaaaaaaaaaaaaaaaaaaaaaaaaaaaaaaaaaaaaaaaaaaaaaaaaaaaaaaaaaaaaaaaaaaaaaaaaaaaaaaaaaaaaaaaaaaaaaaaaaaaaaaaaaagggggagggggccgatgatataaaaaccgccgaggagggacagcaaataataacaatacacaacacgtgatgagaagaaccgactgataaaagaacgcaatcactaaaaacgacgaacgacgccgtggccacaaaaaagcatcgcgcgtggaagaacaaccaaacgagttggcgctacagccaggagagacaacccccgatgcgggggcggaatagaaaaaaaccacccacaaacgcagtagaccgacgcaaaaacaaacacacccgacgcgtcagacaacaacaacaatgggcgggacaaaatgaagcacgttttcttcctcatactgaaccccgcgcgctctcatcatacacgcgccgcagtagatgaacgatacacaacatacgagcaaagagcagggcaacggatcagatgaccagacaagaaagaagaaaaatacacaggaacaaagaaaacaaaatccagcaacacaaaaaaggatgagcaggtagcagccaaaaacactagcaagaccagcacagaacaagcagacaagacagcatcacgacacagaacn

SEQ ID NO: 433507 - DNA, 6268 bp, Homo sapiens
  misc_feature (1649)..(1649): n is a, c, g, or t
cttacatagtggaggtggagatcctcctctccaaggaccacccgcgtagggcgagattccccaattctgacttttcactactatcccccacaggggcggggctccaactccaggtaaccagaccaggcaacctggacttccaattagcaggggagtccccaagccagcctggccaatctcggccggctagccaagacgaccagacgtgacgtcagacatgattaagttggcgcgtcacctagacgtcagcctcttacctctcggacgtcccgtcccaggagcaaaactctagtgactttgggcccgcccccgtgagagtggagggcggccgatgagggcggttctgaagggaacaagaccaatgagacgagcccggggcggggcgcggggccggagggtggggcgggtggcggcggtggcagtccgaggtctggctccgcgcagtatatgacagtacgtcagcagcgggatggccctagcagtggcggcggctgcagaagcccaagcagccgcggccgcagtggaggctagagccggagcggcggcggcggcggcaccccggggagtttaagatggcggcgggggggacagggggcctgcgggaggagcagcgctatgggctgtcgtgcggacggctggggcaggacaacatcaccgtactgcatgtgaagctcaccgagacggcgatccgggcgctcgagacttaccagagccacaagaatttaattccttttcgaccttcaatccagttccaaggactccacgggcttgtcaaaattcccaaaaatgatcccctcaatgaagttcataactttaacttttatttgtcaaatgtgggcaaagacaaccctcagggcagctttgactgcatccagcaaacattctccagctctggagcctcccagctcaattgcctgggatttatacaagataaaattacagtgtgtgcaacaaacgactcgtatcagatgacacgagaaagaatgacccaggcagaggaggaatcccgcaaccgaagcacaaaagttatcaaacccggtggaccatatgtagggaaaagagtgcaaattcggaaagcacctcaagctgtttcagatacagttcctgagaggaaaaggtcaacccccatgaaccctgcaaatacaattcgaaagacacatagcagcagcaccatctctcagaggccatacagggacagggtgattcacttactggccctgaaggcctacaagaaaccggagctacttgctagactccagaaagatggtgtcaatcaaaaagacaagaactccctgggagcaattctgcaacaggtagccaatctgaattctaaggacctctcatataccttaaaggattatgtttttaaagagcttcaaagagactggcctggatacagtgaaatagacagacggtcattggagtcagtgctctctagaaaactaaatccgtctcagaatgctacaggcaccagccgttcagaatctcctgtatgttctagtagagatgctgtatcttctcctcagaaacggcttttggattcagagtttattgatcctttaatgaataaaaaagcccgaatatctcacctgacgaacagagtaccaccaacactaaatggtcatttgaatcccaccagtgaaaaatcngctgcaggcctcccgctgccccctgcggctgctgccatccctacccctccaccgctgccttcaacctatctgcccatctcacatcctcctcagattgtaaattctaactccaactcccctagcactccagaaggccgggggactcaagacctacctgttgacagttttagtcaaaacgatagtatctatgaggaccagcaagacaaatatacctctaggacttctctggaaaccttaccccctggttccgttctactaaagtgtccaaagcctatggaagaaaaccattcaatgtctcacaaaaagtccaaaaagaagtctaaaaaacataaggaaaaggaccaaataaaaaagcacgacattgagactattgaggaaaaggaggaagatcttaagagagaagaggaaattgccaagctaaataactccagtccaaattccagtggaggagttaaagaggattgcactgcctccatggaaccttcagcaattgaactcccagattatttgataaaatatatcgctatcgtctcctatgagcaacgccagaattataaggatgacttcaatgcagagtatgatgagtacagagctttgcatgccaggatggagactgtagctagaagatttatcaaactagatgcacaaagaaagcgcctttctccaggctcaaaagagtatcagaatgttcatgaagaagtcttacaagaatatcagaagataaagcagtctagtcccaattaccatgaagaaaaatacagatgtgaatatcttcataacaagctggctcacatcaaaaggctaataggtgaatttgaccaacagcaagcagagtcatggtcctagaactctgcttggaccagaagatgtgaataaacttaagcttatttatttaaaattccaaatgagttgctctagattctaaaaaggtgaaactttggctgttgaaagtttcagtattagtaaacttgagttactttttcttttccattttactttgcttccctgcatttcgaagctgctctttctggtcctccccaccaccccacccccaagacttgtgtttgttaatagaaataatttttttaggtattggggatccattgtctatatttcaaatcagttttttttcctcaaaaacttgtgtttgttattagaaatgattttttagatattggggatccagtgtccacacttaaaagttgtatgtgtttaaaaaacaacaacagtaatgtgcaaggtgaaatgcttttggataaacgtaagcctattttctgacgtttcttaatgcaaactctttgccttaaatggtagaatatttagaaatttgcacaaaattaaaaaaataaacattgtcttggagggttaaaaaatagaaaggtgtatgtgtatagattcacatacacatatgtatatacaggctgacttgatctagaacattaaatccgccctgcaagttaaccccccattgcaatggttgccttaaggtgtttgctagttgtgtacatagtgtggttaatcattagctacactgcttcccacttgattagagcaatgggaagcatactgtggcctaccagcatctggaagtgtgtgctcgatctgtatgtgtgcagaggtggtgtggatgtgagcgtgcatgaaggaaaaaaagctgctactcctagtaggccaaacgctcaggttaaacaactgacgagtgttactgtagggtgtttttttgtttttttgttttttttcttctatcaaattgctacttttgttgtggaagacaaaagcatttccatttcaacgagtttgtcagctttattaatgttgggcaaaaattgatatgtcatgaaaatgaaacagatctatagttttgggacaaaattataaaatgaaatgtgtaggtaacctatttatatactgctataaagtattttttgaagagagatatgcaaagaagctattacctacataagaggtatatttaaagattttttttttcatcctggtgccaggaatataaaaaagagtggatatatttaaccataacatactgtgattcatcaaacagcacaaactttcatttcatggagtttatctgttgacattgatttaaactgtcacttgttttatcatgtgggaacataagttatgtggtcaaaaatataaggattttgaattaatgttgattcaagttgtattgtcttattgtattgtcttttcaaagtgctgccagttgaaaagggaagcattatgtttacaaatctgttttgaaatgtttgccaaaattttggtagtgtctttaataaagatgtttgtctccagcatccagaaaaataaatgaataactttgttgtgtatcactgtaaaccagaaaaatgttggttatctagaaaacttgagagagcatgtagattaacttttctctttggagttctaaaacattaactggaaagattagataatatactaaatgtatacagaagtatacagactatacaaagactgaaacaagtcccttttgcactacaactctataacattaccgcagaaattttggttctatgtagcatggacctcctaaggaattctgtttcttttagcattgagatccctggtgctctttttttacctcagaattggtacaatcattattaaacgttaatttatttcaaactttttaattgaaaaaaggaaagggaaacttaattggggataaattcaggcatcatattattatgatagagtctcctgagtggttcgtctataggtaatgaactcattggtgttatttcttggacatcttggccttttaatcaaagactgtgtgctgctatttgctatgagcaaggtttctcaaaagcaaaaggtgcttggaccatttggatcacctgagttagaatctctaggtatagggcccaagtatctgcattttcacaggtttcttgtaggtgactttctgcaagctaaagtatgagaaccattggcttggatgtagttctaaacttttaggtctgtaaatcttgaaatcttgaactgaaggtcaactattggcttttttttttttttaatgtccatcatgtcagcaggtgcaaatcacttttcccctttgcatgatctgaggcacctcctcagttgtttcactgccaactcttgtttcagaacctgtttacaaacaagccttccagttggtgaatggttagccattggagctcctaccctgtacatcagcacatcttctggtttacaagttgggtaacaatgaaagctggagatgctaaatggaaatccagcattgcatacccttagacctgatcacataccagtaaaagccttaatttagatgttagttgtatgtgttggacagatccttgcaaaagtgtgtctgtctattagttgtaaatttgaaaattataaatctctgaatctgctactatccaagtttcatcccttttgaagatgaggcatgagcctattaaaatatttataatcatttttcgtcccctactgcaagacttttagattcttacaaatgattactacaggaatagtggccacttaatgtcagttactccggtggaagaatttatctagttttttttcttttcttttttggaaggatggtgtgaaaaatagcaagattagagaatgagttgtatagttttttctatcacatttcatctaaaatgatttgaaggacttttgaagatttttaccaacatccttaaatcaactccaggttggatgaacaactgatttaaaacaaactaagagaacattaactagatgtgggctttttaaaatatataggtattgcatttcctaccttgttatttattccactttgaatactttagagggcttaactttcaactctttaaggtagtaatggatagttttatacttgttctcacaaaattgttatggtcagtttatatcattgctccatgcattgattataaaaattcagtattaattttttctgatcttataagctttataggagttttcttttctcttataaagtgtttcaccttatgtaaaacaaatgcctgcttgcatattggaagatgttgaaattagttttagacaaaagtggtccatcaattcagacactctgcttggatgccttacccttttcattagtgcattctttgcttctgaaacttggcagaaactcgttagccagtccactgcctttctgacaatgtgtggagtcacgtatgcttggtatatgcctttactacttttaaagttctacagtttattacttgcccaagtgttactaaatccttttcttatgtgtactggatggagaaaaaattatagccagcactttgagaggaaagttttcagaaacaatattaactggcactactaactgaaggccacaggagatgctatcaatgttatttgtaatctgaagattgaacaaggctgtgaggctcatttcaaactattttgaggtgttaaaatatatatatgctgtttctcagctgttccactcaaaccgtgttaggactctcaaaggtaaaatgtcacaggggcttttcagttgttacagagctcagcagctgtggttgcccctgttctacaccaatttcagttcaataaaaatgttaactttgcaa

SEQ ID NO: 433508 - DNA, 6738 bp, Homo sapiens
  misc_feature (1431)..(1431): n is a, c, g, or t
  misc_feature (6738)..(6738): n is a, c, g, or t
gcaattatggcattaaccttatgctgttactctaagaagttcaaaaatactgctctaagaagcaagaattaaaatgaaatgtgtttttttattataagagccaaagattcggatatggactcttatctcagagattgcttcaatatatagaagctatttagaagggggtcatgtaagccaaagacaaaacttgtattgctcaaaagaggaagagctttttacaaattcactaataactctttcataagaactgtaaccatttgctactttgaaatgaaaagggttcctcttataaactaatagaaactattgagcagaagtgattactgacacttaaaggtagaaaatggaaataagaatctggtaagttataggcatgtttgccagattccttgaattgtttggtcatttaaatgctgcgaggatgtatatatcaaaagggcttaggtctaaaatgattttcactagaaaaaccagtaagtcagtcttaagacttttctatggcaaatttataatttgaggcgtttctctcttttcccctcattttagcttgtcaaaattcccaaaaatgatcccctcaatgaagttcataactttaacttttatttgtcaaatgtgggcaaagacaaccctcagggcagctttgactgcatccagcaaacattctccagctctggagcctcccagctcaattgcctgggatttatacaagataaaattacagtgtgtgcaacaaacgactcgtatcagatgacacgagaaagaatgacccaggcagaggaggaatcccgcaaccgaagcacaaaagttatcaaacccggtggaccatatgtagggaaaagagtgcaaattcggaaagcacctcaagctgtttcagatacagttcctgagaggaaaaggtcaacccccatgaaccctgcaaatacaattcgaaagacacatagcagcagcaccatctctcagaggccatacagggacagggtgattcacttactggccctgaaggcctacaagaaaccggagctacttgctagactccagaaagatggtgtcaatcaaaaagacaagaactccctgggagcaattctgcaacaggtagccaatctgaattctaaggacctctcatataccttaaaggattatgtttttaaagagcttcaaagagactggcctggatacagtgaaatagacagacggtcattggagtcagtgctctctagaaaactaaatccgtctcagaatgctacaggcaccagccgttcagaatctcctgtatgttctagtagagatgctgtatcttctcctcagaaacggcttttggattcagagtttattgatcctttaatgaataaaaaagcccgaatatctcacctgacgaacagagtaccaccaacactaaatggtcatttgaatcccaccagtgaaaaatcngctgcaggcctcccgctgccccctgcggctgctgccatccctacccctccaccgctgccttcaacctatctgcccatctcacatcctcctcagattgtaaattctaactccaactcccctagcactccagaaggccgggggactcaagacctacctgttgacagttttagtcaaaacgatagtatctatgaggaccagcaagacaaatatacctctaggacttctctggaaaccttaccccctggttccgttctactaaagtgtccaaagcctatggaagaaaaccattcaatgtctcacaaaaagtccaaaaagaagtctaaaaaacataaggaaaaggaccaaataaaaaagcacgacattgagactattgaggaaaaggaggaagatcttaagagagaagaggaaattgccaagctaaataactccagtccaaattccagtggaggagttaaagaggattgcactgcctccatggaaccttcagcaattgaactcccagattatttgataaaatatatcgctatcgtctcctatgagcaacgccagaattataaggatgacttcaatgcagagtatgatgagtacagagctttgcatgccaggatggagactgtagctagaagatttatcaaactagatgcacaaagaaagcgcctttctccaggctcaaaagagtatcagaatgttcatgaagaagtcttacaagaatatcagaagataaagcagtctagtcccaattaccatgaagaaaaatacagatgtgaatatcttcataacaagctggctcacatcaaaaggctaataggtgaatttgaccaacagcaagcagagtcatggtcctagaactctgcttggaccagaagatgtgaataaacttaagcttatttatttaaaattccaaatgagttgctctagattctaaaaaggtgaaactttggctgttgaaagtttcagtattagtaaacttgagttactttttcttttccattttactttgcttccctgcatttcgaagctgctctttctggtcctccccaccaccccacccccaagacttgtgtttgttaatagaaataatttttttaggtattggggatccattgtctatatttcaaatcagttttttttcctcaaaaacttgtgtttgttattagaaatgattttttagatattggggatccagtgtccacacttaaaagttgtatgtgtttaaaaaacaacaacagtaatgtgcaaggtgaaatgcttttggataaacgtaagcctattttctgacgtttcttaatgcaaactctttgccttaaatggtagaatatttagaaatttgcacaaaattaaaaaaataaacattgtcttggagggttaaaaaatagaaaggtgtatgtgtatagattcacatacacatatgtatatacaggctgacttgatctagaacattaaatccgccctgcaagttaaccccccattgcaatggttgccttaaggtgtttgctagttgtgtacatagtgtggttaatcattagctacactgcttcccacttgattagagcaatgggaagcatactgtggcctaccagcatctggaagtgtgtgctcgatctgtatgtgtgcagaggtggtgtggatgtgagcgtgcatgaaggaaaaaaagctgctactcctagtaggccaaacgctcaggttaaacaactgacgagtgttactgtagggtgtttttttgtttttttgttttttttcttctatcaaattgctacttttgttgtggaagacaaaagcatttccatttcaacgagtttgtcagctttattaatgttgggcaaaaattgatatgtcatgaaaatgaaacagatctatagttttgggacaaaattataaaatgaaatgtgtaggtaacctatttatatactgctataaagtattttttgaagagagatatgcaaagaagctattacctacataagaggtatatttaaagattttttttttcatcctggtgccaggaatataaaaaagagtggatatatttaaccataacatactgtgattcatcaaacagcacaaactttcatttcatggagtttatctgttgacattgatttaaactgtcacttgttttatcatgtgggaacataagttatgtggtcaaaaatataaggattttgaattaatgttgattcaagttgtattgtcttattgtattgtcttttcaaagtgctgccagttgaaaagggaagcattatgtttacaaatctgttttgaaatgtttgccaaaattttggtagtgtctttaataaagatgtttgtctccagcatccagaaaaataaatgaataactttgttgtgtatcactgtaaaccagaaaaatgttggttatctagaaaacttgagagagcatgtagattaacttttctctttggagttctaaaacattaactggaaagattagataatatactaaatgtatacagaagtatacagactatacaaagactgaaacaagtcccttttgcactacaactctataacattaccgcagaaattttggttctatgtagcatggacctcctaaggaattctgtttcttttagcattgagatccctggtgctctttttttacctcagaattggtacaatcattattaaacgttaatttatttcaaactttttaattgaaaaaaggaaagggaaacttaattggggataaattcaggcatcatattattatgatagagtctcctgagtggttcgtctataggtaatgaactcattggtgttatttcttggacatcttggccttttaatcaaagactgtgtgctgctatttgctatgagcaaggtttctcaaaagcaaaaggtgcttggaccatttggatcacctgagttagaatctctaggtatagggcccaagtatctgcattttcacaggtttcttgtaggtgactttctgcaagctaaagtatgagaaccattggcttggatgtagttctaaacttttaggtctgtaaatcttgaaatcttgaactgaaggtcaactattggcttttttttttttttaatgtccatcatgtcagcaggtgcaaatcacttttcccctttgcatgatctgaggcacctcctcagttgtttcactgccaactcttgtttcagaacctgtttacaaacaagccttccagttggtgaatggttagccattggagctcctaccctgtacatcagcacatcttctggtttacaagttgggtaacaatgaaagctggagatgctaaatggaaatccagcattgcatacccttagacctgatcacataccagtaaaagccttaatttagatgttagttgtatgtgttggacagatccttgcaaaagtgtgtctgtctattagttgtaaatttgaaaattataaatctctgaatctgctactatccaagtttcatcccttttgaagatgaggcatgagcctattaaaatatttataatcatttttcgtcccctactgcaagacttttagattcttacaaatgattactacaggaatagtggccacttaatgtcagttactccggtggaagaatttatctagttttttttcttttcttttttggaaggatggtgtgaaaaatagcaagattagagaatgagttgtatagttttttctatcacatttcatctaaaatgatttgaaggacttttgaagatttttaccaacatccttaaatcaactccaggttggatgaacaactgatttaaaacaaactaagagaacattaactagatgtgggctttttaaaatatataggtattgcatttcctaccttgttatttattccactttgaatactttagagggcttaactttcaactctttaaggtagtaatggatagttttatacttgttctcacaaaattgttatggtcagtttatatcattgctccatgcattgattataaaaattcagtattaattttttctgatcttataagctttataggagttttcttttctcttataaagtgtttcaccttatgtaaaacaaatgcctgcttgcatattggaagatgttgaaattagttttagacaaaagtggtccatcaattcagacactctgcttggatgccttacccttttcattagtgcattctttgcttctgaaacttggcagaaactcgttagccagtccactgcctttctgacaatgtgtggagtcacgtatgcttggtatatgcctttactacttttaaagttctacagtttattacttgcccaagtgttactaaatccttttcttatgtgtactggatggagaaaaaattatagccagcactttgagaggaaagttttcagaaacaatattaactggcactactaactgaaggccacaggagatgctatcaatgttatttgtaatctgaagattgaacaaggctgtgaggctcatttcaaactattttgaggtgttaaaatatatatatgctgtttctcagctgttccactcaaaccgtgttaggactctcaaaggtaaaatgtcacaggggcttttcagttgttacagagctcagcagctgtggttgcccctgttctacaccaatttcagttcaataaaaatgttaactttgcaaaaaaaaaaaaaaaaaaaaaaaaaaaaaaaaaaaaaaaaaaaaaaaaaaaaaaaaaaaaaaaaaaaaaaaaaaaaaaaaaaaaaaaaaaaaaaaaaaaaaaaaaaaaaaaaaaaaaaaaaaaaaaaaaaaaagggggagggggccgatgatataaaaaccgccgaggagggacagcaaataataacaatacacaacacgtgatgagaagaaccgactgataaaagaacgcaatcactaaaaacgacgaacgacgccgtggccacaaaaaagcatcgcgcgtggaagaacaaccaaacgagttggcgctacagccaggagagacaacccccgatgcgggggcggaatagaaaaaaaccacccacaaacgcagtagaccgacgcaaaaacaaacacacccgacgcgtcagacaacaacaacaatgggcgggacaaaatgaagcacgttttcttcctcatactgaaccccgcgcgctctcatcatacacgcgccgcagtagatgaacgatacacaacatacgagcaaagagcagggcaacggatcagatgaccagacaagaaagaagaaaaatacacaggaacaaagaaaacaaaatccagcaacacaaaaaaggatgagcaggtagcagccaaaaacactagcaagaccagcacagaacaagcagacaagacagcatcacgacacagaacn

SEQ ID NO: 433509 - DNA, 6670 bp, Homo sapiens
  misc_feature (1363)..(1363): n is a, c, g, or t
  misc_feature (6670)..(6670): n is a, c, g, or t
cttacatagtggaggtggagatcctcctctccaaggaccacccgcgtagggcgagattccccaattctgacttttcactactatcccccacaggggcggggctccaactccaggtaaccagaccaggcaacctggacttccaattagcaggggagtccccaagccagcctggccaatctcggccggctagccaagacgaccagacgtgacgtcagacatgattaagttggcgcgtcacctagacgtcagcctcttacctctcggacgtcccgtcccaggagcaaaactctagtgactttgggcccgcccccgtgagagtggagggcggccgatgagggcggttctgaagggaacaagaccaatgagacgagcccggggcggggcgcggggccggagggtggggcgggtggcggcggtggcagtccgaggtctggctccgcgcagtatatgacagtacgtcagcagcgggatggccctagcagtggcggcggctgcagaagcccaagcagccgcggccgcagtggaggctagagccggagcggcggcggcggcggcaccccggggagtttaagatggcggcgggggggacagggggcctgcgggaggagcagcgctatgggctgtcgtgcggacggctggggcaggacaacatcaccgtactgcatgtgaagctcaccgagacggcgatccgggcgctcgagacttaccagagccacaagaatttaattccttttcgaccttcaatccagttccaaggactccacgggggaaaagagtgcaaattcggaaagcacctcaagctgtttcagatacagttcctgagaggaaaaggtcaacccccatgaaccctgcaaatacaattcgaaagacacatagcagcagcaccatctctcagaggccatacagggacagggtgattcacttactggccctgaaggcctacaagaaaccggagctacttgctagactccagaaagatggtgtcaatcaaaaagacaagaactccctgggagcaattctgcaacaggtagccaatctgaattctaaggacctctcatataccttaaaggattatgtttttaaagagcttcaaagagactggcctggatacagtgaaatagacagacggtcattggagtcagtgctctctagaaaactaaatccgtctcagaatgctacaggcaccagccgttcagaatctcctgtatgttctagtagagatgctgtatcttctcctcagaaacggcttttggattcagagtttattgatcctttaatgaataaaaaagcccgaatatctcacctgacgaacagagtaccaccaacactaaatggtcatttgaatcccaccagtgaaaaatcngctgcaggcctcccgctgccccctgcggctgctgccatccctacccctccaccgctgccttcaacctatctgcccatctcacatcctcctcagattgtaaattctaactccaactcccctagcactccagaaggccgggggactcaagacctacctgttgacagttttagtcaaaacgatagtatctatgaggaccagcaagacaaatatacctctaggacttctctggaaaccttaccccctggttccgttctactaaagtgtccaaagcctatggaagaaaaccattcaatgtctcacaaaaagtccaaaaagaagtctaaaaaacataaggaaaaggaccaaataaaaaagcacgacattgagactattgaggaaaaggaggaagatcttaagagagaagaggaaattgccaagctaaataactccagtccaaattccagtggaggagttaaagaggattgcactgcctccatggaaccttcagcaattgaactcccagattatttgataaaatatatcgctatcgtctcctatgagcaacgccagaattataaggatgacttcaatgcagagtatgatgagtacagagctttgcatgccaggatggagactgtagctagaagatttatcaaactagatgcacaaagaaagcgcctttctccaggctcaaaagagtatcagaatgttcatgaagaagtcttacaagaatatcagaagataaagcagtctagtcccaattaccatgaagaaaaatacagatgtgaatatcttcataacaagctggctcacatcaaaaggctaataggtgaatttgaccaacagcaagcagagtcatggtcctagaactctgcttggaccagaagatgtgaataaacttaagcttatttatttaaaattccaaatgagttgctctagattctaaaaaggtgaaactttggctgttgaaagtttcagtattagtaaacttgagttactttttcttttccattttactttgcttccctgcatttcgaagctgctctttctggtcctccccaccaccccacccccaagacttgtgtttgttaatagaaataatttttttaggtattggggatccattgtctatatttcaaatcagttttttttcctcaaaaacttgtgtttgttattagaaatgattttttagatattggggatccagtgtccacacttaaaagttgtatgtgtttaaaaaacaacaacagtaatgtgcaaggtgaaatgcttttggataaacgtaagcctattttctgacgtttcttaatgcaaactctttgccttaaatggtagaatatttagaaatttgcacaaaattaaaaaaataaacattgtcttggagggttaaaaaatagaaaggtgtatgtgtatagattcacatacacatatgtatatacaggctgacttgatctagaacattaaatccgccctgcaagttaaccccccattgcaatggttgccttaaggtgtttgctagttgtgtacatagtgtggttaatcattagctacactgcttcccacttgattagagcaatgggaagcatactgtggcctaccagcatctggaagtgtgtgctcgatctgtatgtgtgcagaggtggtgtggatgtgagcgtgcatgaaggaaaaaaagctgctactcctagtaggccaaacgctcaggttaaacaactgacgagtgttactgtagggtgtttttttgtttttttgttttttttcttctatcaaattgctacttttgttgtggaagacaaaagcatttccatttcaacgagtttgtcagctttattaatgttgggcaaaaattgatatgtcatgaaaatgaaacagatctatagttttgggacaaaattataaaatgaaatgtgtaggtaacctatttatatactgctataaagtattttttgaagagagatatgcaaagaagctattacctacataagaggtatatttaaagattttttttttcatcctggtgccaggaatataaaaaagagtggatatatttaaccataacatactgtgattcatcaaacagcacaaactttcatttcatggagtttatctgttgacattgatttaaactgtcacttgttttatcatgtgggaacataagttatgtggtcaaaaatataaggattttgaattaatgttgattcaagttgtattgtcttattgtattgtcttttcaaagtgctgccagttgaaaagggaagcattatgtttacaaatctgttttgaaatgtttgccaaaattttggtagtgtctttaataaagatgtttgtctccagcatccagaaaaataaatgaataactttgttgtgtatcactgtaaaccagaaaaatgttggttatctagaaaacttgagagagcatgtagattaacttttctctttggagttctaaaacattaactggaaagattagataatatactaaatgtatacagaagtatacagactatacaaagactgaaacaagtcccttttgcactacaactctataacattaccgcagaaattttggttctatgtagcatggacctcctaaggaattctgtttcttttagcattgagatccctggtgctctttttttacctcagaattggtacaatcattattaaacgttaatttatttcaaactttttaattgaaaaaaggaaagggaaacttaattggggataaattcaggcatcatattattatgatagagtctcctgagtggttcgtctataggtaatgaactcattggtgttatttcttggacatcttggccttttaatcaaagactgtgtgctgctatttgctatgagcaaggtttctcaaaagcaaaaggtgcttggaccatttggatcacctgagttagaatctctaggtatagggcccaagtatctgcattttcacaggtttcttgtaggtgactttctgcaagctaaagtatgagaaccattggcttggatgtagttctaaacttttaggtctgtaaatcttgaaatcttgaactgaaggtcaactattggcttttttttttttttaatgtccatcatgtcagcaggtgcaaatcacttttcccctttgcatgatctgaggcacctcctcagttgtttcactgccaactcttgtttcagaacctgtttacaaacaagccttccagttggtgaatggttagccattggagctcctaccctgtacatcagcacatcttctggtttacaagttgggtaacaatgaaagctggagatgctaaatggaaatccagcattgcatacccttagacctgatcacataccagtaaaagccttaatttagatgttagttgtatgtgttggacagatccttgcaaaagtgtgtctgtctattagttgtaaatttgaaaattataaatctctgaatctgctactatccaagtttcatcccttttgaagatgaggcatgagcctattaaaatatttataatcatttttcgtcccctactgcaagacttttagattcttacaaatgattactacaggaatagtggccacttaatgtcagttactccggtggaagaatttatctagttttttttcttttcttttttggaaggatggtgtgaaaaatagcaagattagagaatgagttgtatagttttttctatcacatttcatctaaaatgatttgaaggacttttgaagatttttaccaacatccttaaatcaactccaggttggatgaacaactgatttaaaacaaactaagagaacattaactagatgtgggctttttaaaatatataggtattgcatttcctaccttgttatttattccactttgaatactttagagggcttaactttcaactctttaaggtagtaatggatagttttatacttgttctcacaaaattgttatggtcagtttatatcattgctccatgcattgattataaaaattcagtattaattttttctgatcttataagctttataggagttttcttttctcttataaagtgtttcaccttatgtaaaacaaatgcctgcttgcatattggaagatgttgaaattagttttagacaaaagtggtccatcaattcagacactctgcttggatgccttacccttttcattagtgcattctttgcttctgaaacttggcagaaactcgttagccagtccactgcctttctgacaatgtgtggagtcacgtatgcttggtatatgcctttactacttttaaagttctacagtttattacttgcccaagtgttactaaatccttttcttatgtgtactggatggagaaaaaattatagccagcactttgagaggaaagttttcagaaacaatattaactggcactactaactgaaggccacaggagatgctatcaatgttatttgtaatctgaagattgaacaaggctgtgaggctcatttcaaactattttgaggtgttaaaatatatatatgctgtttctcagctgttccactcaaaccgtgttaggactctcaaaggtaaaatgtcacaggggcttttcagttgttacagagctcagcagctgtggttgcccctgttctacaccaatttcagttcaataaaaatgttaactttgcaaaaaaaaaaaaaaaaaaaaaaaaaaaaaaaaaaaaaaaaaaaaaaaaaaaaaaaaaaaaaaaaaaaaaaaaaaaaaaaaaaaaaaaaaaaaaaaaaaaaaaaaaaaaaaaaaaaaaaaaaaaaaaaaaaaaagggggagggggccgatgatataaaaaccgccgaggagggacagcaaataataacaatacacaacacgtgatgagaagaaccgactgataaaagaacgcaatcactaaaaacgacgaacgacgccgtggccacaaaaaagcatcgcgcgtggaagaacaaccaaacgagttggcgctacagccaggagagacaacccccgatgcgggggcggaatagaaaaaaaccacccacaaacgcagtagaccgacgcaaaaacaaacacacccgacgcgtcagacaacaacaacaatgggcgggacaaaatgaagcacgttttcttcctcatactgaaccccgcgcgctctcatcatacacgcgccgcagtagatgaacgatacacaacatacgagcaaagagcagggcaacggatcagatgaccagacaagaaagaagaaaaatacacaggaacaaagaaaacaaaatccagcaacacaaaaaaggatgagcaggtagcagccaaaaacactagcaagaccagcacagaacaagcagacaagacagcatcacgacacagaacn

SEQ ID NO: 433510 - DNA, 6246 bp, Homo sapiens
  misc_feature (939)..(939): n is a, c, g, or t
  misc_feature (6246)..(6246): n is a, c, g, or t
cttctgaacgtgtgaaattactaacgtaatgctcagccaagagtgtgttcttagagaggtctgacaggtatttctgacatttcaccatgttcactgtattatagtttgcttttcagaaatggcatatatttatttaagatataagttatcaagtctgttgttacagtttgtgttactagttattatctttctgtagcaaaatgaccaaaatacatgcattatacatattattattattatttcctctagaaatgaagaggtacctaaatcagaattgtggaaactgaggtgctcatattgtaacccacaaatgtgtaacaatgtcatttccactggactttagggaaaagagtgcaaattcggaaagcacctcaagctgtttcagatacagttcctgagaggaaaaggtcaacccccatgaaccctgcaaatacaattcgaaagacacatagcagcagcaccatctctcagaggccatacagggacagggtgattcacttactggccctgaaggcctacaagaaaccggagctacttgctagactccagaaagatggtgtcaatcaaaaagacaagaactccctgggagcaattctgcaacaggtagccaatctgaattctaaggacctctcatataccttaaaggattatgtttttaaagagcttcaaagagactggcctggatacagtgaaatagacagacggtcattggagtcagtgctctctagaaaactaaatccgtctcagaatgctacaggcaccagccgttcagaatctcctgtatgttctagtagagatgctgtatcttctcctcagaaacggcttttggattcagagtttattgatcctttaatgaataaaaaagcccgaatatctcacctgacgaacagagtaccaccaacactaaatggtcatttgaatcccaccagtgaaaaatcngctgcaggcctcccgctgccccctgcggctgctgccatccctacccctccaccgctgccttcaacctatctgcccatctcacatcctcctcagattgtaaattctaactccaactcccctagcactccagaaggccgggggactcaagacctacctgttgacagttttagtcaaaacgatagtatctatgaggaccagcaagacaaatatacctctaggacttctctggaaaccttaccccctggttccgttctactaaagtgtccaaagcctatggaagaaaaccattcaatgtctcacaaaaagtccaaaaagaagtctaaaaaacataaggaaaaggaccaaataaaaaagcacgacattgagactattgaggaaaaggaggaagatcttaagagagaagaggaaattgccaagctaaataactccagtccaaattccagtggaggagttaaagaggattgcactgcctccatggaaccttcagcaattgaactcccagattatttgataaaatatatcgctatcgtctcctatgagcaacgccagaattataaggatgacttcaatgcagagtatgatgagtacagagctttgcatgccaggatggagactgtagctagaagatttatcaaactagatgcacaaagaaagcgcctttctccaggctcaaaagagtatcagaatgttcatgaagaagtcttacaagaatatcagaagataaagcagtctagtcccaattaccatgaagaaaaatacagatgtgaatatcttcataacaagctggctcacatcaaaaggctaataggtgaatttgaccaacagcaagcagagtcatggtcctagaactctgcttggaccagaagatgtgaataaacttaagcttatttatttaaaattccaaatgagttgctctagattctaaaaaggtgaaactttggctgttgaaagtttcagtattagtaaacttgagttactttttcttttccattttactttgcttccctgcatttcgaagctgctctttctggtcctccccaccaccccacccccaagacttgtgtttgttaatagaaataatttttttaggtattggggatccattgtctatatttcaaatcagttttttttcctcaaaaacttgtgtttgttattagaaatgattttttagatattggggatccagtgtccacacttaaaagttgtatgtgtttaaaaaacaacaacagtaatgtgcaaggtgaaatgcttttggataaacgtaagcctattttctgacgtttcttaatgcaaactctttgccttaaatggtagaatatttagaaatttgcacaaaattaaaaaaataaacattgtcttggagggttaaaaaatagaaaggtgtatgtgtatagattcacatacacatatgtatatacaggctgacttgatctagaacattaaatccgccctgcaagttaaccccccattgcaatggttgccttaaggtgtttgctagttgtgtacatagtgtggttaatcattagctacactgcttcccacttgattagagcaatgggaagcatactgtggcctaccagcatctggaagtgtgtgctcgatctgtatgtgtgcagaggtggtgtggatgtgagcgtgcatgaaggaaaaaaagctgctactcctagtaggccaaacgctcaggttaaacaactgacgagtgttactgtagggtgtttttttgtttttttgttttttttcttctatcaaattgctacttttgttgtggaagacaaaagcatttccatttcaacgagtttgtcagctttattaatgttgggcaaaaattgatatgtcatgaaaatgaaacagatctatagttttgggacaaaattataaaatgaaatgtgtaggtaacctatttatatactgctataaagtattttttgaagagagatatgcaaagaagctattacctacataagaggtatatttaaagattttttttttcatcctggtgccaggaatataaaaaagagtggatatatttaaccataacatactgtgattcatcaaacagcacaaactttcatttcatggagtttatctgttgacattgatttaaactgtcacttgttttatcatgtgggaacataagttatgtggtcaaaaatataaggattttgaattaatgttgattcaagttgtattgtcttattgtattgtcttttcaaagtgctgccagttgaaaagggaagcattatgtttacaaatctgttttgaaatgtttgccaaaattttggtagtgtctttaataaagatgtttgtctccagcatccagaaaaataaatgaataactttgttgtgtatcactgtaaaccagaaaaatgttggttatctagaaaacttgagagagcatgtagattaacttttctctttggagttctaaaacattaactggaaagattagataatatactaaatgtatacagaagtatacagactatacaaagactgaaacaagtcccttttgcactacaactctataacattaccgcagaaattttggttctatgtagcatggacctcctaaggaattctgtttcttttagcattgagatccctggtgctctttttttacctcagaattggtacaatcattattaaacgttaatttatttcaaactttttaattgaaaaaaggaaagggaaacttaattggggataaattcaggcatcatattattatgatagagtctcctgagtggttcgtctataggtaatgaactcattggtgttatttcttggacatcttggccttttaatcaaagactgtgtgctgctatttgctatgagcaaggtttctcaaaagcaaaaggtgcttggaccatttggatcacctgagttagaatctctaggtatagggcccaagtatctgcattttcacaggtttcttgtaggtgactttctgcaagctaaagtatgagaaccattggcttggatgtagttctaaacttttaggtctgtaaatcttgaaatcttgaactgaaggtcaactattggcttttttttttttttaatgtccatcatgtcagcaggtgcaaatcacttttcccctttgcatgatctgaggcacctcctcagttgtttcactgccaactcttgtttcagaacctgtttacaaacaagccttccagttggtgaatggttagccattggagctcctaccctgtacatcagcacatcttctggtttacaagttgggtaacaatgaaagctggagatgctaaatggaaatccagcattgcatacccttagacctgatcacataccagtaaaagccttaatttagatgttagttgtatgtgttggacagatccttgcaaaagtgtgtctgtctattagttgtaaatttgaaaattataaatctctgaatctgctactatccaagtttcatcccttttgaagatgaggcatgagcctattaaaatatttataatcatttttcgtcccctactgcaagacttttagattcttacaaatgattactacaggaatagtggccacttaatgtcagttactccggtggaagaatttatctagttttttttcttttcttttttggaaggatggtgtgaaaaatagcaagattagagaatgagttgtatagttttttctatcacatttcatctaaaatgatttgaaggacttttgaagatttttaccaacatccttaaatcaactccaggttggatgaacaactgatttaaaacaaactaagagaacattaactagatgtgggctttttaaaatatataggtattgcatttcctaccttgttatttattccactttgaatactttagagggcttaactttcaactctttaaggtagtaatggatagttttatacttgttctcacaaaattgttatggtcagtttatatcattgctccatgcattgattataaaaattcagtattaattttttctgatcttataagctttataggagttttcttttctcttataaagtgtttcaccttatgtaaaacaaatgcctgcttgcatattggaagatgttgaaattagttttagacaaaagtggtccatcaattcagacactctgcttggatgccttacccttttcattagtgcattctttgcttctgaaacttggcagaaactcgttagccagtccactgcctttctgacaatgtgtggagtcacgtatgcttggtatatgcctttactacttttaaagttctacagtttattacttgcccaagtgttactaaatccttttcttatgtgtactggatggagaaaaaattatagccagcactttgagaggaaagttttcagaaacaatattaactggcactactaactgaaggccacaggagatgctatcaatgttatttgtaatctgaagattgaacaaggctgtgaggctcatttcaaactattttgaggtgttaaaatatatatatgctgtttctcagctgttccactcaaaccgtgttaggactctcaaaggtaaaatgtcacaggggcttttcagttgttacagagctcagcagctgtggttgcccctgttctacaccaatttcagttcaataaaaatgttaactttgcaaaaaaaaaaaaaaaaaaaaaaaaaaaaaaaaaaaaaaaaaaaaaaaaaaaaaaaaaaaaaaaaaaaaaaaaaaaaaaaaaaaaaaaaaaaaaaaaaaaaaaaaaaaaaaaaaaaaaaaaaaaaaaaaaaaaagggggagggggccgatgatataaaaaccgccgaggagggacagcaaataataacaatacacaacacgtgatgagaagaaccgactgataaaagaacgcaatcactaaaaacgacgaacgacgccgtggccacaaaaaagcatcgcgcgtggaagaacaaccaaacgagttggcgctacagccaggagagacaacccccgatgcgggggcggaatagaaaaaaaccacccacaaacgcagtagaccgacgcaaaaacaaacacacccgacgcgtcagacaacaacaacaatgggcgggacaaaatgaagcacgttttcttcctcatactgaaccccgcgcgctctcatcatacacgcgccgcagtagatgaacgatacacaacatacgagcaaagagcagggcaacggatcagatgaccagacaagaaagaagaaaaatacacaggaacaaagaaaacaaaatccagcaacacaaaaaaggatgagcaggtagcagccaaaaacactagcaagaccagcacagaacaagcagacaagacagcatcacgacacagaacn

SEQ ID NO: 433511 - DNA, 5027 bp, Homo sapiens
  misc_feature (1649)..(1649): n is a, c, g, or t
  misc_feature (5006)..(5006): n is a, c, g, or t
  misc_feature (5022)..(5022): n is a, c, g, or t
cttacatagtggaggtggagatcctcctctccaaggaccacccgcgtagggcgagattccccaattctgacttttcactactatcccccacaggggcggggctccaactccaggtaaccagaccaggcaacctggacttccaattagcaggggagtccccaagccagcctggccaatctcggccggctagccaagacgaccagacgtgacgtcagacatgattaagttggcgcgtcacctagacgtcagcctcttacctctcggacgtcccgtcccaggagcaaaactctagtgactttgggcccgcccccgtgagagtggagggcggccgatgagggcggttctgaagggaacaagaccaatgagacgagcccggggcggggcgcggggccggagggtggggcgggtggcggcggtggcagtccgaggtctggctccgcgcagtatatgacagtacgtcagcagcgggatggccctagcagtggcggcggctgcagaagcccaagcagccgcggccgcagtggaggctagagccggagcggcggcggcggcggcaccccggggagtttaagatggcggcgggggggacagggggcctgcgggaggagcagcgctatgggctgtcgtgcggacggctggggcaggacaacatcaccgtactgcatgtgaagctcaccgagacggcgatccgggcgctcgagacttaccagagccacaagaatttaattccttttcgaccttcaatccagttccaaggactccacgggcttgtcaaaattcccaaaaatgatcccctcaatgaagttcataactttaacttttatttgtcaaatgtgggcaaagacaaccctcagggcagctttgactgcatccagcaaacattctccagctctggagcctcccagctcaattgcctgggatttatacaagataaaattacagtgtgtgcaacaaacgactcgtatcagatgacacgagaaagaatgacccaggcagaggaggaatcccgcaaccgaagcacaaaagttatcaaacccggtggaccatatgtagggaaaagagtgcaaattcggaaagcacctcaagctgtttcagatacagttcctgagaggaaaaggtcaacccccatgaaccctgcaaatacaattcgaaagacacatagcagcagcaccatctctcagaggccatacagggacagggtgattcacttactggccctgaaggcctacaagaaaccggagctacttgctagactccagaaagatggtgtcaatcaaaaagacaagaactccctgggagcaattctgcaacaggtagccaatctgaattctaaggacctctcatataccttaaaggattatgtttttaaagagcttcaaagagactggcctggatacagtgaaatagacagacggtcattggagtcagtgctctctagaaaactaaatccgtctcagaatgctacaggcaccagccgttcagaatctcctgtatgttctagtagagatgctgtatcttctcctcagaaacggcttttggattcagagtttattgatcctttaatgaataaaaaagcccgaatatctcacctgacgaacagagtaccaccaacactaaatggtcatttgaatcccaccagtgaaaaatcngctgcaggcctcccgctgccccctgcggctgctgccatccctacccctccaccgctgccttcaacctatctgcccatctcacatcctcctcagattgtaaattctaactccaactcccctagcactccagaaggccgggggactcaagacctacctgttgacagttttagtcaaaacgatagtatctatgaggaccagcaagacaaatatacctctaggacttctctggaaaccttaccccctggttccgttctactaaagtgtccaaagcctatggaagaaaaccattcaatgtctcacaaaaagtccaaaaagaagtctaaaaaacataaggaaaaggaccaaataaaaaagcacgacattgagactattgaggaaaaggaggaagatcttaagagagaagaggaaattgccaagctaaataactccagtccaaattccagtggaggagttaaagaggattgcactgcctccatggaaccttcagcaattgaactcccagattatttgataaaatatatcgctatcgtctcctatgagcaacgccagaattataaggatgacttcaatgcagagtatgatgagtacagagctttgcatgccaggatggagactgtagctagaagatttatcaaactagatgcacaaagaaagcgcctttctccaggctcaaaagagtatcagaatgttcatgaagaagtcttacaagaatatcagaagataaagcagtctagtcccaattaccatgaagaaaaatacagatgtgaatatcttcataacaagctggctcacatcaaaaggctaataggtgaatttgaccaacagcaagcagagtcatggtcctagaactctgcttggaccagaagatgtgaataaacttaagcttatttatttaaaattccaaatgagttgctctagattctaaaaaggtgaaactttggctgttgaaagtttcagtattagtaaacttgagttactttttcttttccattttactttgcttccctgcatttcgaagctgctctttctggtcctccccaccaccccacccccaagacttgtgtttgttaatagaaataatttttttaggtattggggatccattgtctatatttcaaatcagttttttttcctcaaaaacttgtgtttgttattagaaatgattttttagatattggggatccagtgtccacacttaaaagttgtatgtgtttaaaaaacaacaacagtaatgtgcaaggtgaaatgcttttggataaacgtaagcctattttctgacgtttcttaatgcaaactctttgccttaaatggtagaatatttagaaatttgcacaaaattaaaaaaataaacattgtcttggagggttaaaaaatagaaaggtgtatgtgtatagattcacatacacatatgtatatacaggctgacttgatctagaacattaaatccgccctgcaagttaaccccccattgcaatggttgccttaaggtgtttgctagttgtgtacatagtgtggttaatcattagctacactgcttcccacttgattagagcaatgggaagcatactgtggcctaccagcatctggaagtgtgtgctcgatctgtatgtgtgcagaggtggtgtggatgtgagcgtgcatgaaggaaaaaaagctgctactcctagtaggccaaacgctcaggttaaacaactgacgagtgttactgtagggtgtttttttgtttttttgttttttttcttctatcaaattgctacttttgttgtggaagacaaaagcatttccatttcaacgagtttgtcagctttattaatgttgggcaaaaattgatatgtcatgaaaatgaaacagatctatagttttgggacaaaattataaaatgaaatgtgtaggtaacctatttatatactgctataaagtattttttgaagagagatatgcaaagaagctattacctacataagaggtatatttaaagattttttttttcatcctggtgccaggaatataaaaaagagtggatatatttaaccataacatactgtgattcatcaaacagcacaaactttcatttcatggagtttatctgttgacattgatttaaactgtcacttgttttatcatgtgggaacataagttatgtggtcaaaaatataaggattttgaattaatgttgattcaagttgtattgtcttattgtattgtcttttcaaagtgctgccagttgaaaagggaagcattatgtttacaaatctgttttgaaatgtttgccaaaattttggtagtgtctttaataaagatgtttgtctccagcatccagaaaaataaatgaataactttgttgtgtatcactgtaaaccagaaaaatgttggttatctagaaaacttgagagagcatgtagattaacttttctctttggagttctaaaacattaactggaaagattagataatatactaaatgtatacagaagtatacagactatacaaagactgaaacaagtcccttttgcactacaactctataacattaccgcagaaattttggttctatgtagcatggacctcctaaggaattctgtttcttttagcattgagatccctggtgctctttttttacctcagaattggtacaatcattattaaacgttaatttatttcaaactttttaattgaaaaaaggaaagggaaacttaattggggataaattcaggcatcatattattatgatagagtctcctgagtggttcgtctataggtaatgaactcattggtgttatttcttggacatcttggccttttaatcaaagactgtgtgctgctatttgctatgagcaaggtttctcaaaaggcccaagtatctgcattttcacaggtttcttgtaggtgactttctgcaagctaaagtatgagaaccattggcttggatgtagttctaaacttttaggtctgtaaatcttgaaatcttgaactgaaggtcaactattggcttttttttttttttaatgtccatcatgtcagcaggtgcaaatcacttttcccctttgcatgatctgaggcacctcctcagttgtttcactgccaactcttgtttcagaacctgtttacaaacaagccttccagttggtgaatggttagccattggagctcctaccctgtacatcagcacatcttctggtttacaagttgggtaacaatgaaagctggagatgctaaatggaaatccagcattgcatacccttagacctgatcacataccagtaaaagcctatttaatgtagtgatggttgcagatctgcaaagggctgctatagtgtaattgaaatatatcttgatctgtctatcaagtcatctttngagatagctgactatnatata

SEQ ID NO: 433512 - DNA, 5695 bp, Homo sapiens
  misc_feature (388)..(388): n is a, c, g, or t
  misc_feature (5695)..(5695): n is a, c, g, or t
agccagtttttaaaagccatttctcaagaactccgggagcattctgcaacaggtagccaatctgaattctaaggacctctcatataccttaaaggattatgtttttaaagagcttcaaagagactggcctggatacagtgaaatagacagacggtcattggagtcagtgctctctagaaaactaaatccgtctcagaatgctacaggcaccagccgttcagaatctcctgtatgttctagtagagatgctgtatcttctcctcagaaacggcttttggattcagagtttattgatcctttaatgaataaaaaagcccgaatatctcacctgacgaacagagtaccaccaacactaaatggtcatttgaatcccaccagtgaaaaatcngctgcaggcctcccgctgccccctgcggctgctgccatccctacccctccaccgctgccttcaacctatctgcccatctcacatcctcctcagattgtaaattctaactccaactcccctagcactccagaaggccgggggactcaagacctacctgttgacagttttagtcaaaacgatagtatctatgaggaccagcaagacaaatatacctctaggacttctctggaaaccttaccccctggttccgttctactaaagtgtccaaagcctatggaagaaaaccattcaatgtctcacaaaaagtccaaaaagaagtctaaaaaacataaggaaaaggaccaaataaaaaagcacgacattgagactattgaggaaaaggaggaagatcttaagagagaagaggaaattgccaagctaaataactccagtccaaattccagtggaggagttaaagaggattgcactgcctccatggaaccttcagcaattgaactcccagattatttgataaaatatatcgctatcgtctcctatgagcaacgccagaattataaggatgacttcaatgcagagtatgatgagtacagagctttgcatgccaggatggagactgtagctagaagatttatcaaactagatgcacaaagaaagcgcctttctccaggctcaaaagagtatcagaatgttcatgaagaagtcttacaagaatatcagaagataaagcagtctagtcccaattaccatgaagaaaaatacagatgtgaatatcttcataacaagctggctcacatcaaaaggctaataggtgaatttgaccaacagcaagcagagtcatggtcctagaactctgcttggaccagaagatgtgaataaacttaagcttatttatttaaaattccaaatgagttgctctagattctaaaaaggtgaaactttggctgttgaaagtttcagtattagtaaacttgagttactttttcttttccattttactttgcttccctgcatttcgaagctgctctttctggtcctccccaccaccccacccccaagacttgtgtttgttaatagaaataatttttttaggtattggggatccattgtctatatttcaaatcagttttttttcctcaaaaacttgtgtttgttattagaaatgattttttagatattggggatccagtgtccacacttaaaagttgtatgtgtttaaaaaacaacaacagtaatgtgcaaggtgaaatgcttttggataaacgtaagcctattttctgacgtttcttaatgcaaactctttgccttaaatggtagaatatttagaaatttgcacaaaattaaaaaaataaacattgtcttggagggttaaaaaatagaaaggtgtatgtgtatagattcacatacacatatgtatatacaggctgacttgatctagaacattaaatccgccctgcaagttaaccccccattgcaatggttgccttaaggtgtttgctagttgtgtacatagtgtggttaatcattagctacactgcttcccacttgattagagcaatgggaagcatactgtggcctaccagcatctggaagtgtgtgctcgatctgtatgtgtgcagaggtggtgtggatgtgagcgtgcatgaaggaaaaaaagctgctactcctagtaggccaaacgctcaggttaaacaactgacgagtgttactgtagggtgtttttttgtttttttgttttttttcttctatcaaattgctacttttgttgtggaagacaaaagcatttccatttcaacgagtttgtcagctttattaatgttgggcaaaaattgatatgtcatgaaaatgaaacagatctatagttttgggacaaaattataaaatgaaatgtgtaggtaacctatttatatactgctataaagtattttttgaagagagatatgcaaagaagctattacctacataagaggtatatttaaagattttttttttcatcctggtgccaggaatataaaaaagagtggatatatttaaccataacatactgtgattcatcaaacagcacaaactttcatttcatggagtttatctgttgacattgatttaaactgtcacttgttttatcatgtgggaacataagttatgtggtcaaaaatataaggattttgaattaatgttgattcaagttgtattgtcttattgtattgtcttttcaaagtgctgccagttgaaaagggaagcattatgtttacaaatctgttttgaaatgtttgccaaaattttggtagtgtctttaataaagatgtttgtctccagcatccagaaaaataaatgaataactttgttgtgtatcactgtaaaccagaaaaatgttggttatctagaaaacttgagagagcatgtagattaacttttctctttggagttctaaaacattaactggaaagattagataatatactaaatgtatacagaagtatacagactatacaaagactgaaacaagtcccttttgcactacaactctataacattaccgcagaaattttggttctatgtagcatggacctcctaaggaattctgtttcttttagcattgagatccctggtgctctttttttacctcagaattggtacaatcattattaaacgttaatttatttcaaactttttaattgaaaaaaggaaagggaaacttaattggggataaattcaggcatcatattattatgatagagtctcctgagtggttcgtctataggtaatgaactcattggtgttatttcttggacatcttggccttttaatcaaagactgtgtgctgctatttgctatgagcaaggtttctcaaaagcaaaaggtgcttggaccatttggatcacctgagttagaatctctaggtatagggcccaagtatctgcattttcacaggtttcttgtaggtgactttctgcaagctaaagtatgagaaccattggcttggatgtagttctaaacttttaggtctgtaaatcttgaaatcttgaactgaaggtcaactattggcttttttttttttttaatgtccatcatgtcagcaggtgcaaatcacttttcccctttgcatgatctgaggcacctcctcagttgtttcactgccaactcttgtttcagaacctgtttacaaacaagccttccagttggtgaatggttagccattggagctcctaccctgtacatcagcacatcttctggtttacaagttgggtaacaatgaaagctggagatgctaaatggaaatccagcattgcatacccttagacctgatcacataccagtaaaagccttaatttagatgttagttgtatgtgttggacagatccttgcaaaagtgtgtctgtctattagttgtaaatttgaaaattataaatctctgaatctgctactatccaagtttcatcccttttgaagatgaggcatgagcctattaaaatatttataatcatttttcgtcccctactgcaagacttttagattcttacaaatgattactacaggaatagtggccacttaatgtcagttactccggtggaagaatttatctagttttttttcttttcttttttggaaggatggtgtgaaaaatagcaagattagagaatgagttgtatagttttttctatcacatttcatctaaaatgatttgaaggacttttgaagatttttaccaacatccttaaatcaactccaggttggatgaacaactgatttaaaacaaactaagagaacattaactagatgtgggctttttaaaatatataggtattgcatttcctaccttgttatttattccactttgaatactttagagggcttaactttcaactctttaaggtagtaatggatagttttatacttgttctcacaaaattgttatggtcagtttatatcattgctccatgcattgattataaaaattcagtattaattttttctgatcttataagctttataggagttttcttttctcttataaagtgtttcaccttatgtaaaacaaatgcctgcttgcatattggaagatgttgaaattagttttagacaaaagtggtccatcaattcagacactctgcttggatgccttacccttttcattagtgcattctttgcttctgaaacttggcagaaactcgttagccagtccactgcctttctgacaatgtgtggagtcacgtatgcttggtatatgcctttactacttttaaagttctacagtttattacttgcccaagtgttactaaatccttttcttatgtgtactggatggagaaaaaattatagccagcactttgagaggaaagttttcagaaacaatattaactggcactactaactgaaggccacaggagatgctatcaatgttatttgtaatctgaagattgaacaaggctgtgaggctcatttcaaactattttgaggtgttaaaatatatatatgctgtttctcagctgttccactcaaaccgtgttaggactctcaaaggtaaaatgtcacaggggcttttcagttgttacagagctcagcagctgtggttgcccctgttctacaccaatttcagttcaataaaaatgttaactttgcaaaaaaaaaaaaaaaaaaaaaaaaaaaaaaaaaaaaaaaaaaaaaaaaaaaaaaaaaaaaaaaaaaaaaaaaaaaaaaaaaaaaaaaaaaaaaaaaaaaaaaaaaaaaaaaaaaaaaaaaaaaaaaaaaaaaagggggagggggccgatgatataaaaaccgccgaggagggacagcaaataataacaatacacaacacgtgatgagaagaaccgactgataaaagaacgcaatcactaaaaacgacgaacgacgccgtggccacaaaaaagcatcgcgcgtggaagaacaaccaaacgagttggcgctacagccaggagagacaacccccgatgcgggggcggaatagaaaaaaaccacccacaaacgcagtagaccgacgcaaaaacaaacacacccgacgcgtcagacaacaacaacaatgggcgggacaaaatgaagcacgttttcttcctcatactgaaccccgcgcgctctcatcatacacgcgccgcagtagatgaacgatacacaacatacgagcaaagagcagggcaacggatcagatgaccagacaagaaagaagaaaaatacacaggaacaaagaaaacaaaatccagcaacacaaaaaaggatgagcaggtagcagccaaaaacactagcaagaccagcacagaacaagcagacaagacagcatcacgacacagaacn

SEQ ID NO: 433513 - DNA, 5768 bp, Homo sapiens
  misc_feature (461)..(461): n is a, c, g, or t
  misc_feature (5768)..(5768): n is a, c, g, or t
aactagcagtccctttggggccaattgatgtaattattttcagtgtaaatcctaaaggttgcctgttttaggttaggagatgatagtaaaaatacctaatgctctgtttttatacctcatactaggtagccaatctgaattctaaggacctctcatataccttaaaggattatgtttttaaagagcttcaaagagactggcctggatacagtgaaatagacagacggtcattggagtcagtgctctctagaaaactaaatccgtctcagaatgctacaggcaccagccgttcagaatctcctgtatgttctagtagagatgctgtatcttctcctcagaaacggcttttggattcagagtttattgatcctttaatgaataaaaaagcccgaatatctcacctgacgaacagagtaccaccaacactaaatggtcatttgaatcccaccagtgaaaaatcngctgcaggcctcccgctgccccctgcggctgctgccatccctacccctccaccgctgccttcaacctatctgcccatctcacatcctcctcagattgtaaattctaactccaactcccctagcactccagaaggccgggggactcaagacctacctgttgacagttttagtcaaaacgatagtatctatgaggaccagcaagacaaatatacctctaggacttctctggaaaccttaccccctggttccgttctactaaagtgtccaaagcctatggaagaaaaccattcaatgtctcacaaaaagtccaaaaagaagtctaaaaaacataaggaaaaggaccaaataaaaaagcacgacattgagactattgaggaaaaggaggaagatcttaagagagaagaggaaattgccaagctaaataactccagtccaaattccagtggaggagttaaagaggattgcactgcctccatggaaccttcagcaattgaactcccagattatttgataaaatatatcgctatcgtctcctatgagcaacgccagaattataaggatgacttcaatgcagagtatgatgagtacagagctttgcatgccaggatggagactgtagctagaagatttatcaaactagatgcacaaagaaagcgcctttctccaggctcaaaagagtatcagaatgttcatgaagaagtcttacaagaatatcagaagataaagcagtctagtcccaattaccatgaagaaaaatacagatgtgaatatcttcataacaagctggctcacatcaaaaggctaataggtgaatttgaccaacagcaagcagagtcatggtcctagaactctgcttggaccagaagatgtgaataaacttaagcttatttatttaaaattccaaatgagttgctctagattctaaaaaggtgaaactttggctgttgaaagtttcagtattagtaaacttgagttactttttcttttccattttactttgcttccctgcatttcgaagctgctctttctggtcctccccaccaccccacccccaagacttgtgtttgttaatagaaataatttttttaggtattggggatccattgtctatatttcaaatcagttttttttcctcaaaaacttgtgtttgttattagaaatgattttttagatattggggatccagtgtccacacttaaaagttgtatgtgtttaaaaaacaacaacagtaatgtgcaaggtgaaatgcttttggataaacgtaagcctattttctgacgtttcttaatgcaaactctttgccttaaatggtagaatatttagaaatttgcacaaaattaaaaaaataaacattgtcttggagggttaaaaaatagaaaggtgtatgtgtatagattcacatacacatatgtatatacaggctgacttgatctagaacattaaatccgccctgcaagttaaccccccattgcaatggttgccttaaggtgtttgctagttgtgtacatagtgtggttaatcattagctacactgcttcccacttgattagagcaatgggaagcatactgtggcctaccagcatctggaagtgtgtgctcgatctgtatgtgtgcagaggtggtgtggatgtgagcgtgcatgaaggaaaaaaagctgctactcctagtaggccaaacgctcaggttaaacaactgacgagtgttactgtagggtgtttttttgtttttttgttttttttcttctatcaaattgctacttttgttgtggaagacaaaagcatttccatttcaacgagtttgtcagctttattaatgttgggcaaaaattgatatgtcatgaaaatgaaacagatctatagttttgggacaaaattataaaatgaaatgtgtaggtaacctatttatatactgctataaagtattttttgaagagagatatgcaaagaagctattacctacataagaggtatatttaaagattttttttttcatcctggtgccaggaatataaaaaagagtggatatatttaaccataacatactgtgattcatcaaacagcacaaactttcatttcatggagtttatctgttgacattgatttaaactgtcacttgttttatcatgtgggaacataagttatgtggtcaaaaatataaggattttgaattaatgttgattcaagttgtattgtcttattgtattgtcttttcaaagtgctgccagttgaaaagggaagcattatgtttacaaatctgttttgaaatgtttgccaaaattttggtagtgtctttaataaagatgtttgtctccagcatccagaaaaataaatgaataactttgttgtgtatcactgtaaaccagaaaaatgttggttatctagaaaacttgagagagcatgtagattaacttttctctttggagttctaaaacattaactggaaagattagataatatactaaatgtatacagaagtatacagactatacaaagactgaaacaagtcccttttgcactacaactctataacattaccgcagaaattttggttctatgtagcatggacctcctaaggaattctgtttcttttagcattgagatccctggtgctctttttttacctcagaattggtacaatcattattaaacgttaatttatttcaaactttttaattgaaaaaaggaaagggaaacttaattggggataaattcaggcatcatattattatgatagagtctcctgagtggttcgtctataggtaatgaactcattggtgttatttcttggacatcttggccttttaatcaaagactgtgtgctgctatttgctatgagcaaggtttctcaaaagcaaaaggtgcttggaccatttggatcacctgagttagaatctctaggtatagggcccaagtatctgcattttcacaggtttcttgtaggtgactttctgcaagctaaagtatgagaaccattggcttggatgtagttctaaacttttaggtctgtaaatcttgaaatcttgaactgaaggtcaactattggcttttttttttttttaatgtccatcatgtcagcaggtgcaaatcacttttcccctttgcatgatctgaggcacctcctcagttgtttcactgccaactcttgtttcagaacctgtttacaaacaagccttccagttggtgaatggttagccattggagctcctaccctgtacatcagcacatcttctggtttacaagttgggtaacaatgaaagctggagatgctaaatggaaatccagcattgcatacccttagacctgatcacataccagtaaaagccttaatttagatgttagttgtatgtgttggacagatccttgcaaaagtgtgtctgtctattagttgtaaatttgaaaattataaatctctgaatctgctactatccaagtttcatcccttttgaagatgaggcatgagcctattaaaatatttataatcatttttcgtcccctactgcaagacttttagattcttacaaatgattactacaggaatagtggccacttaatgtcagttactccggtggaagaatttatctagttttttttcttttcttttttggaaggatggtgtgaaaaatagcaagattagagaatgagttgtatagttttttctatcacatttcatctaaaatgatttgaaggacttttgaagatttttaccaacatccttaaatcaactccaggttggatgaacaactgatttaaaacaaactaagagaacattaactagatgtgggctttttaaaatatataggtattgcatttcctaccttgttatttattccactttgaatactttagagggcttaactttcaactctttaaggtagtaatggatagttttatacttgttctcacaaaattgttatggtcagtttatatcattgctccatgcattgattataaaaattcagtattaattttttctgatcttataagctttataggagttttcttttctcttataaagtgtttcaccttatgtaaaacaaatgcctgcttgcatattggaagatgttgaaattagttttagacaaaagtggtccatcaattcagacactctgcttggatgccttacccttttcattagtgcattctttgcttctgaaacttggcagaaactcgttagccagtccactgcctttctgacaatgtgtggagtcacgtatgcttggtatatgcctttactacttttaaagttctacagtttattacttgcccaagtgttactaaatccttttcttatgtgtactggatggagaaaaaattatagccagcactttgagaggaaagttttcagaaacaatattaactggcactactaactgaaggccacaggagatgctatcaatgttatttgtaatctgaagattgaacaaggctgtgaggctcatttcaaactattttgaggtgttaaaatatatatatgctgtttctcagctgttccactcaaaccgtgttaggactctcaaaggtaaaatgtcacaggggcttttcagttgttacagagctcagcagctgtggttgcccctgttctacaccaatttcagttcaataaaaatgttaactttgcaaaaaaaaaaaaaaaaaaaaaaaaaaaaaaaaaaaaaaaaaaaaaaaaaaaaaaaaaaaaaaaaaaaaaaaaaaaaaaaaaaaaaaaaaaaaaaaaaaaaaaaaaaaaaaaaaaaaaaaaaaaaaaaaaaaaagggggagggggccgatgatataaaaaccgccgaggagggacagcaaataataacaatacacaacacgtgatgagaagaaccgactgataaaagaacgcaatcactaaaaacgacgaacgacgccgtggccacaaaaaagcatcgcgcgtggaagaacaaccaaacgagttggcgctacagccaggagagacaacccccgatgcgggggcggaatagaaaaaaaccacccacaaacgcagtagaccgacgcaaaaacaaacacacccgacgcgtcagacaacaacaacaatgggcgggacaaaatgaagcacgttttcttcctcatactgaaccccgcgcgctctcatcatacacgcgccgcagtagatgaacgatacacaacatacgagcaaagagcagggcaacggatcagatgaccagacaagaaagaagaaaaatacacaggaacaaagaaaacaaaatccagcaacacaaaaaaggatgagcaggtagcagccaaaaacactagcaagaccagcacagaacaagcagacaagacagcatcacgacacagaacn

SEQ ID NO: 433514 - DNA, 2727 bp, Homo sapiens
  misc_feature (1649)..(1649): n is a, c, g, or t
cttacatagtggaggtggagatcctcctctccaaggaccacccgcgtagggcgagattccccaattctgacttttcactactatcccccacaggggcggggctccaactccaggtaaccagaccaggcaacctggacttccaattagcaggggagtccccaagccagcctggccaatctcggccggctagccaagacgaccagacgtgacgtcagacatgattaagttggcgcgtcacctagacgtcagcctcttacctctcggacgtcccgtcccaggagcaaaactctagtgactttgggcccgcccccgtgagagtggagggcggccgatgagggcggttctgaagggaacaagaccaatgagacgagcccggggcggggcgcggggccggagggtggggcgggtggcggcggtggcagtccgaggtctggctccgcgcagtatatgacagtacgtcagcagcgggatggccctagcagtggcggcggctgcagaagcccaagcagccgcggccgcagtggaggctagagccggagcggcggcggcggcggcaccccggggagtttaagatggcggcgggggggacagggggcctgcgggaggagcagcgctatgggctgtcgtgcggacggctggggcaggacaacatcaccgtactgcatgtgaagctcaccgagacggcgatccgggcgctcgagacttaccagagccacaagaatttaattccttttcgaccttcaatccagttccaaggactccacgggcttgtcaaaattcccaaaaatgatcccctcaatgaagttcataactttaacttttatttgtcaaatgtgggcaaagacaaccctcagggcagctttgactgcatccagcaaacattctccagctctggagcctcccagctcaattgcctgggatttatacaagataaaattacagtgtgtgcaacaaacgactcgtatcagatgacacgagaaagaatgacccaggcagaggaggaatcccgcaaccgaagcacaaaagttatcaaacccggtggaccatatgtagggaaaagagtgcaaattcggaaagcacctcaagctgtttcagatacagttcctgagaggaaaaggtcaacccccatgaaccctgcaaatacaattcgaaagacacatagcagcagcaccatctctcagaggccatacagggacagggtgattcacttactggccctgaaggcctacaagaaaccggagctacttgctagactccagaaagatggtgtcaatcaaaaagacaagaactccctgggagcaattctgcaacaggtagccaatctgaattctaaggacctctcatataccttaaaggattatgtttttaaagagcttcaaagagactggcctggatacagtgaaatagacagacggtcattggagtcagtgctctctagaaaactaaatccgtctcagaatgctacaggcaccagccgttcagaatctcctgtatgttctagtagagatgctgtatcttctcctcagaaacggcttttggattcagagtttattgatcctttaatgaataaaaaagcccgaatatctcacctgacgaacagagtaccaccaacactaaatggtcatttgaatcccaccagtgaaaaatcngctgcaggcctcccgctgccccctgcggctgctgccatccctacccctccaccgctgccttcaacctatctgcccatctcacatcctcctcagattgtaaattctaactccaactcccctagcactccagaaggccgggggactcaagacctacctgttgacagttttagtcaaaacgatagtatctatgaggaccagcaagacaaatatacctctaggacttctctggaaaccttaccccctggttccgttctactaaagtgtccaaagcctatggaagaaaaccattcaatgtctcacaaaaagtccaaaaagaagtctaaaaaacataaggaaaaggaccaaataaaaaagcacgacattgagactattgaggaaaaggaggaagatcttaagagagaagaggaaattgccaagctaaataactccagtccaaattccagtggaggagttaaagaggattgcactgcctccatggaaccttcagcaattgaactcccagattatttgataaaatatatcgctatcgtctcctatgagcaacgccagaattataaggatgacttcaatgcagagtatgatgagtacagagctttgcatgccaggatggagactgtagctagaagatttatcaaactagatgcacaaagaaagcgcctttctccaggctcaaaagagtatcagaatgttcatgaagaagtcttacaagaatatcagaagataaagcagtctagtcccaattaccatgaagaaaaatacagatgtgaatatcttcataacaagctggctcacatcaaaaggctaataggtgaatttgaccaacagcaagcagagtcatggtcctagaactctgcttggaccagaagatgtgaataaacttaagcttatttatttaaaattccaaatgagttgctctagattctaaaaaggtgaaactttggctgttgaaagtttcagtattagtaaacttgagttactttttcttttccattttactttgcttcccaccacctcgaactctgggaattcgtttaacacgacggccagtaccccgagactcagcactcgtctgatgcct

SEQ ID NO: 433515 - DNA, 2075 bp, Homo sapiens
cttacatagtggaggtggagatcctcctctccaaggaccacccgcgtagggcgagattccccaattctgacttttcactactatcccccacaggggcggggctccaactccaggtaaccagaccaggcaacctggacttccaattagcaggggagtccccaagccagcctggccaatctcggccggctagccaagacgaccagacgtgacgtcagacatgattaagttggcgcgtcacctagacgtcagcctcttacctctcggacgtcccgtcccaggagcaaaactctagtgactttgggcccgcccccgtgagagtggagggcggccgatgagggcggttctgaagggaacaagaccaatgagacgagcccggggcggggcgcggggccggagggtggggcgggtggcggcggtggcagtccgaggtctggctccgcgcagtatatgacagtacgtcagcagcgggatggccctagcagtggcggcggctgcagaagcccaagcagccgcggccgcagtggaggctagagccggagcggcggcggcggcggcaccccggggagtttaagatggcggcgggggggacagggggcctgcgggaggagcagcgctatgggctgtcgtgcggacggctggggcaggacaacatcaccgtactgcatgtgaagctcaccgagacggcgatccgggcgctcgagacttaccagagccacaagaatttaattccttttcgaccttcaatccagttccaaggactccacgggcttgtcaaaattcccaaaaatgatcccctcaatgaagttcataactttaacttttatttgtcaaatgtgggcaaagacaaccctcagggcagctttgactgcatccagcaaacattctccagctctggagcctcccagctcaattgcctgggatttatacaagataaaattacagtgtgtgcaacaaacgactcgtatcagatgacacgagaaagaatgacccaggcagaggaggaatcccgcaaccgaagcacaaaagttatcaaacccggtggaccatatgtagggaaaagagtgcaaattcggaaagcacctcaagctgtttcagatacagttcctgagaggaaaaggtcaacccccatgaaccctgcaaatacaattcgaaagacacatagcagcagcaccatctctcagaggccatacagggacagggtgattcacttactggccctgaaggcctacaagaaaccggagctacttgctagactccagaaagatggtgtcaatcaaaaagacaagaactccctgggagcaattctgcaacaggtgaggacagctggagagaggtccttcctgcttaccttcttgttaaaatgttcatttaaaaaagcttgttgtcattattatcattattattgagatagagaaattttaggattattttgatcagtggtatgtgaaatacaactcctgaatattaagttaaatcatctcattttaagcacttaattaaaaactagttgaaatgtgagcattgtctttatttgggaccaacaaattttgttctcaaattccattaaaaagaaagtaagaagtgtttgttatctgtttttagtgttgaatacactaaagtattgccttaatttgtattgattattgtcggtgaaattgtgcaatgtattctattggcctttgattggtataagccagaacattttttgcctactaaatagtttaaaatgtatcttgccccacatactttgtgctgcccttattactctatctttttctgccactaagtgtgccaagatcagtcatttgtctgcataaaagcatatgaaattgtaatgtattagcagtgatcccatactttatcacaagcttacgtgtaagaaagtaggccattgttttttaaagtcagtggtttgttagactataacctcctacatatttttttcttccttccttctgtccatctgtcataaatctttatgagcattcagatccaccataaatggtggtccatcttttttactttttctaaggaaataacatttccaaagaagttattctgaatctcatcattta

SEQ ID NO: 433516 - DNA, 1599 bp, Homo sapiens
cttacatagtggaggtggagatcctcctctccaaggaccacccgcgtagggcgagattccccaattctgacttttcactactatcccccacaggggcggggctccaactccaggtaaccagaccaggcaacctggacttccaattagcaggggagtccccaagccagcctggccaatctcggccggctagccaagacgaccagacgtgacgtcagacatgattaagttggcgcgtcacctagacgtcagcctcttacctctcggacgtcccgtcccaggagcaaaactctagtgactttgggcccgcccccgtgagagtggagggcggccgatgagggcggttctgaagggaacaagaccaatgagacgagcccggggcggggcgcggggccggagggtggggcgggtggcggcggtggcagtccgaggtctggctccgcgcagtatatgacagtacgtcagcagcgggatggccctagcagtggcggcggctgcagaagcccaagcagccgcggccgcagtggaggctagagccggagcggcggcggcggcggcaccccggggagtttaagatggcggcgggggggacagggggcctgcgggaggagcagcgctatgggctgtcgtgcggacggctggggcaggacaacatcaccgtactgcatgtgaagctcaccgagacggcgatccgggcgctcgagacttaccagagccacaagaatttaattccttttcgaccttcaatccagttccaaggactccacgggcttgtcaaaattcccaaaaatgatcccctcaatgaagttcataactttaacttttatttgtcaaatgtgggcaaagacaaccctcagggcagctttgactgcatccagcaaacattctccagctctggagcctcccagctcaattgcctgggatttatacaagataaaattacagtgtgtgcaacaaacgactcgtatcagatgacacgagaaagaatgacccaggcagaggaggaatcccgcaaccgaagcacaaaagttatcaaacccggtggaccatatgtagggaaaagagtgcaaattcggaaagcacctcaagctgtttcagatacagttcctgagaggaaaaggtcaacccccatgaaccctgcaaatacaattcgaaagacacatagcagcagcaccatctctcagaggccatacagggacagggtgattcacttactggccctgaaggcctacaagaaaccggagctacttgctagactccagaaagatggtgtcaatcaaaaagacaagaactccctgggagcaattctgcaacaggtagccaatctgaattctaaggacctctcatataccttaaaggattatgtttttaaagagcttcaaagagactggcctggatacagtgaaatagacagacggtcattggagtcagtgctctctagaaaactaaatccgtctcagaatgctacaggcaccagccgttcagaatctcctgtatgttctagtatcaaaatcttgaatcttactccctagaaacccggtttttggaattccagaggtttattgggaccccttttaaggaaatcaaagaagtccccgaaat

SEQ ID NO: 433517 - DNA, 1481 bp, Homo sapiens
  misc_feature (23)..(23): n is a, c, g, or t
  misc_feature (1481)..(1481): n is a, c, g, or t
aaggaataaaaatagactttgancaaaaaggaacatttgctggcctgggggggcatagttttatacttgttctcacaaaattgttatggtcagtttatatcattgctccatgcattgattataaaaattcagtattaattttttctgatcttataagctttataggagttttcttttctcttataaagtgtttcaccttatgtaaaacaaatgcctgcttgcatattggaagatgttgaaattagttttagacaaaagtggtccatcaattcagacactctgcttggatgccttacccttttcattagtgcattctttgcttctgaaacttggcagaaactcgttagccagtccactgcctttctgacaatgtgtggagtcacgtatgcttggtatatgcctttactacttttaaagttctacagtttattacttgcccaagtgttactaaatccttttcttatgtgtactggatggagaaaaaattatagccagcactttgagaggaaagttttcagaaacaatattaactggcactactaactgaaggccacaggagatgctatcaatgttatttgtaatctgaagattgaacaaggctgtgaggctcatttcaaactattttgaggtgttaaaatatatatatgctgtttctcagctgttccactcaaaccgtgttaggactctcaaaggtaaaatgtcacaggggcttttcagttgttacagagctcagcagctgtggttgcccctgttctacaccaatttcagttcaataaaaatgttaactttgcaaaaaaaaaaaaaaaaaaaaaaaaaaaaaaaaaaaaaaaaaaaaaaaaaaaaaaaaaaaaaaaaaaaaaaaaaaaaaaaaaaaaaaaaaaaaaaaaaaaaaaaaaaaaaaaaaaaaaaaaaaaaaaaaaaaaagggggagggggccgatgatataaaaaccgccgaggagggacagcaaataataacaatacacaacacgtgatgagaagaaccgactgataaaagaacgcaatcactaaaaacgacgaacgacgccgtggccacaaaaaagcatcgcgcgtggaagaacaaccaaacgagttggcgctacagccaggagagacaacccccgatgcgggggcggaatagaaaaaaaccacccacaaacgcagtagaccgacgcaaaaacaaacacacccgacgcgtcagacaacaacaacaatgggcgggacaaaatgaagcacgttttcttcctcatactgaaccccgcgcgctctcatcatacacgcgccgcagtagatgaacgatacacaacatacgagcaaagagcagggcaacggatcagatgaccagacaagaaagaagaaaaatacacaggaacaaagaaaacaaaatccagcaacacaaaaaaggatgagcaggtagcagccaaaaacactagcaagaccagcacagaacaagcagacaagacagcatcacgacacagaacn

SEQ ID NO: 433518 - DNA, 317 bp, Homo sapiens
cttattactctatctttttctgccactaagtgtgccaagatcagtcatttgtctgcataaaagcatatgaaattgtaatgtattagcagtgatcccatactttatcacaagcttacgtgtaagaaagtaggccattgttttttaaagtcagtggtttgttagactataacctcctacatatttttttcttccttccttctgtccatctgtcataaatctttatgagcattcagatccaccataaatggtggtccatcttttttactttttctaaggaaataacatttccaaagaagttattctgaatctcatcattt

SEQ ID NO: 433519 - DNA, 283 bp, Homo sapiens
gttgttctggtttagtttttgtttgggttttttgtttgtttgttttttgcttaagcatgaagaaagcgtgtaatattacaaccctggtaatattaatagtaagtaaggttacttagttgtttaaccagccatgcatgtattgaatttatttaattttagtgcaaactggctcacttttctccttttccctcccctagaaacggcttttggattcagagtttattgatcctttaatgaataaaaaagcccgaatatctcacctgacgaacagagtaccaccaac

SEQ ID NO: 433520 - DNA, 418 bp, Homo sapiens
gtggaggctagagccggagcggcggcggcggcggcaccccggggagtttaagatggcggcgggggggacagggggcctgcgggaggagcagcgctatgggctgtcgtgcggacggctggggcaggacaacatcaccgtactgcatgtgaagctcaccgagacggcgatccgggcgctcgagacttaccagagccacaaggtgagcgggccggccggcaggctgggctcagagaggcagagcgcacccctcacggcctggccgcgcccgggtgcggggccggcggagccgtggctggcagctgctaccgtcagcgcccgcagcggccaggcagggcagggccgggcagggtggctgacgccgcggtcccgggctagcctgggcgttggggaagcgggcagtcgggcggcccctggcggc

SEQ ID NO: 433521 - DNA, 473 bp, Homo sapiens
ataagttatcaagtctgttgttacagtttgtgttactagttattatctttctgtagcaaaatgaccaaaatacatgcattatacatattatttccaagaaatgattttattaaaataatttctaattcaaattttagaccatttatttaaaatgctttctgtttgcatgccttcttaaagattgaaataaagtggcctttattattatttcctctagaaatgaagaggtacctaaatcagaattgtggaaactgaggtgctcatattgtaacccacaaatgtgtaacaatgtcatttccactggactttagggaaaagagtgcaaattcggaaagcacctcaagctgtttcagatacagttcctgagaggaaaaggtcaacccccatgaaccctgcaaatacaattcgaaagacacatagcagcagcaccatctctcagaggccatacagggacagggtgattcacttactgg

SEQ ID NO: 433522 - DNA, 675 bp, Homo sapiens
tttgctttacaaacagcactacagtgaataatcttgtatatgtgtcattcactggggagcaagtgtgtccataggataagtagaattgctgagtcgattttgcatttactattttgatagctgttgccacattgccttccataaagattgtttcaagttacattcccacagtcaatatttcctatactcttgctgaatgcatgttatctatttgtattgccacacacaaaagaagttgttctcttctgatttctaatatttaattttgtagaatgttcatgaagaagtcttacaagaatatcagaagataaagcaggtaggtatcatcactgttgattttctgacctgtggttgaaaaatgttgtaaattctgcaatctcattcctcttttttttttttttttttcatctgcagtctagtcccaattaccatgaagaaaaatacagatgtgaatatcttcataacaagctggctcacatcaaaaggctaataggtgaatttgaccaacagcaagcagagtcatggtcctagaactctgcttggaccagaagatgtgaataaacttaagcttatttatttaaaattccaaatgagttgctctagattctaaaaaggtgaaactttggctgttgaaagtttcagtattagtaaacttgagttactttttcttttcca

SEQ ID NO: 433523 - DNA, 287 bp, Homo sapiens
tctgtttcatcattataaactaagaataatgatagatgttggtgaagtgtatagagatctggaactgatagagagttaagaaagaactatgttgttgttatccttctaatcattcccttacatagacgcaaaatgcgtgggttactttacatggttcccagcatcaggtcagatcactgaaattatatttatgtgaagttaagttcatatccaccttttggggatagcaggtactaatcatcacttctctaatgtgttgtgacgttcttcgcagtagtcgcatctgt

SEQ ID NO: 433524 - DNA, 1971 bp, Homo sapiens
tctgtttcatcattataaactaagaataatgatagatgttggtgaagtgtatagagatctggaactgatagagagttaagaaagaactatgttgttgttatccttctaatcattcccttacatagacgcaaaatgcgtgggttactttacatggttcccatgcaactcaaagctaatgaacatgcggtaactaacatgaaagctattccctaaatctgtcaactattttaaacttcaagctctgaccaatcctgagctcagaaagctcaaaaatcaaatattgtgaacttttcaatgcaaatttgtatggtaaagaataaataacactatttcttggttaatatatgtttgtaaattctgcctttcctctttttctatttatctgattattattattattattattattttctttgagacagagtctcactctgttgcccaggctggagtgcaatggcgcaatctcggctcactgcaacctccgcctcccaggttcaagcgattctcctgcctcagcttcccgagtagctgggattacaggtgcccaccaccacgcccagctaatttttgtatttttagcagagacggggtttcgccatgttggccaggctggtttcgaactcctgacctcaggtgatccgcctgcctcagcctcccaaactgctgggattataggcatgagccacctcgccagccctatttatctgattatttaagtaaaactttaataaaccatgacctacattttctatgcaattttaagatactcagagttaatattttaatattgaggttcttgatttttttaatgatcagctttcaaattatatttcagtatatactctgagtctacgtgtatgctacaaaaggtgaaatgaagttagcttatttttcagtgagtttaggctatattaagagttaggtaagttaggtaagggtgaaactgctttggggcccagactgcgctggaatgtactgtttaaattcaaaggtaattgatggccagtgttcagttgctctatttgtaacgtttgcatgttggtctggctgaagtatcaggaaaacacaaaattcatgaaaatagcaccttttataattttatacttttataaagcacttgttaaagaagtatagcaaatttctatgtattttaacatacaagtcgctgcattttaatgttcatttttggtatagctatggtaacttataatagtcatttttatattcataacttgttttctgaaagatatagtcattattaaaataaacattcatgtaaatggagtaaatcataggggaatcaatcgtaataaataccttataaattataaacttgtttagatactagatttctataaccataaattttatactgtaaagtctgtttaaaatagggtttaatgaagttattttaatttttagagactcccctctaaataatttactcctacattgtaaatacattgatgccaacaaaattccaactgctactaacaaaggtttggttggtgataagctaataacagctactttgtgtaggaggtaaatatgtgtactggagggggtaaaaatccatttaggttatggcaaagatgggaatcaaactgtaaaactcatagccccataaaattaatattctttgttaagtgccagagggtttaagagaacttcttgcttagagtttattgataataataatgcttcagaatatcccatttaaatgtacagtgtaaatatgtaaaatattttacttcccaggcaagtttgtggctgtattgccacttagtggctctttgtgactggcagttctgtatatctgaaacaaataagctgtaagcacttttgttaaaactttgtcaaataatccttttatgtacttgttctcagacctgttctctggttatgaaatgtgttaaagacaaggtgcaaatttaaaacaatgcctgtattgaaataaatgacttaaacaga

SEQ ID NO: 433525 - DNA, 2344 bp, Homo sapiens
tctgtttcatcattataaactaagaataatgatagatgttggtgaagtgtatagagatctggaactgatagagagttaagaaagaactatgttgttgttatccttctaatcattcccttacatagacgcaaaatgcgtgggttactttacatggttcccatgcaactcaaagctaatgaacatgcggtaactaacatgaaagctattccctaaatctgtcaactattttaaacttcaagctctgaccaatcctgagctcagaaagctcaaaaatcaaatattgtgaacttttcaatgcaaatttgtatggtaaagaataaataacactatttcttggttaatatatgtttgtaaattctgcctttcctctttttctatttatctgattattattattattattattattttctttgagacagagtctcactctgttgcccaggctggagtgcaatggcgcaatctcggctcactgcaacctccgcctcccaggttcaagcgattctcctgcctcagcttcccgagtagctgggattacaggtgcccaccaccacgcccagctaatttttgtatttttagcagagacggggtttcgccatgttggccaggctggtttcgaactcctgacctcaggtgatccgcctgcctcagcctcccaaactgctgggattataggcatgagccacctcgccagccctatttatctgattatttaagtaaaactttaataaaccatgacctacattttctatgcaattttaagatactcagagttaatattttaatattgaggttcttgatttttttaatgatcagctttcaaattatatttcagtatatactctgagtctacgtgtatgctacaaaaggtgaaatgaagttagcttatttttcagtgagtttaggctatattaagagttaggtaagttaggtaagggtgaaactgctttggggcccagactgcgctggaatgtactgtttaaattcaaaggtaattgatggccagtgttcagttgctctatttgtaacgtttgcatgttggtctggctgaagtatcaggaaaacacaaaattcatgaaaatagcaccttttataattttatacttttataaagcacttgttaaagaagtatagcaaatttctatgtattttaacatacaagtcgctgcattttaatgttcatttttggtatagctatggtaacttataatagtcatttttatattcataacttgttttctgaaagatatagtcattattaaaataaacattcatgtaaatggagtaaatcataggggaatcaatcgtaataaataccttataaattataaacttgtttagatactagatttctataaccataaattttatactgtaaagtctgtttaaaatagggtttaatgaagttattttaatttttagagactcccctctaaataatttactcctacattgtaaatacattgatgccaacaaaattccaactgctactaacaaaggtttggttggtgataagctaataacagctactttgtgtaggaggtaaatatgtgtactggagggggtaaaaatccatttaggttatggcaaagatgggaatcaaactgtaaaactcatagccccataaaattaatattctttgttaagtgccagagggtttaagagaacttcttgcttagagtttattgataataataatgcttcagaatatcccatttaaatgtacagtgtaaatatgtaaaatattttacttcccaggcaagtttgtggctgtattgccacttagtggctctttgtgactggcagttctgtatatctgaaacaaataagctgtaagcacttttgttaaaactttgtcaaataatccttttatgtacttgttctcagacctgttctctggttatgaaatgtgttaaagacaaggtgcaaatttaaaacaatgcctgtattgaaataaatgacttaaacagaaaaaaaaacaaaaacacaaaaaaaaaaaaacaaaacaaaaacaaaacaaaaaaaaaaaaaaaaaaaaaacaaaaaaaaaaaaacaaaaaaacaaaaaaaaaaaaaaaaaaacaaaaaaagaaaaaacaaaagaaaaaaaacaacgagagagagcgccgaaagagaaaagaaaagagaaaacaacacagcgctatgaagggggacggcgagggcgaagacaaaagaagaagagacacgcagaccggatgaagaagtgcggagcgcgcgcgcagaacgacacggcgtgacaagtgaagtatggtgtcgtatacgaaaagcagagagaacaacgagaccgcggcgacgggacaaggagctgggtaggcaacacggc

SEQ ID NO: 433526 - DNA, 16390 bp, Homo sapiens
ctgcagccatgggtgccctatggagctggtggatactctgggctggagcaaccctcctgtggggattgacccaggaggcttcagtggacctcaagaacactggcagagaggaattcctcacagccttcctgcagaactatcagctggcctacagcaaggcctacccccgcctccttatctccagtctgtcagagagccccgcttcagtctccatcctcagccaggcagacaacacctcaaagaaggtcacagtgaggcccggggagtcggtcatggtcaacatcagtgccaaggctgagatgataggcagcaagatcttccagcatgcggtggtgatccattctgactatgccatctctgtgcaggcactaaatgccaagcctgacacagcggagctgacactgctgcggcccatccaggccctaggcaccgagtattttgtgctcacaccccccggcacctcagccaggaatgtcaaggagtttgccgtggtggccggtgccgcaggtgcctcggtcagtgtcacgctgaaggggtcagtgacattcaatggcaagttctatccagcaggcgatgtcctaagagtgactctacagccctacaatgtggcccagctacagagctcagtggatctctcggggtcaaaggtcacagctagtagccccgtggctgtcctctctggccacagctgtgcgcagaaacatacgacctgcaaccatgtggttgagcagctgctacccacgtctgcctggggcacccactatgtagtacccacgctggcctcccaatctcgctatgatttggccttcgttgtggccagccaggccacaaagctgacctacaaccatgggggtatcactggctcccgtgggctccaggcaggtgatgtggtagagtttgaggtccggccatcctggccactctacctgtctgcaaatgtgggcatccaggtcctgttgtttggcacaggtgccataaggaatgaagtgacttatgacccctacctggtcctgatcccagatgtggcggcctactgcccagcctatgtggtcaagagtgtaccaggctgtgagggcgtggccctggtagtggcacagacgaaggctatcagcgggctgaccatagatgggcatgcagtgggggccaagctcacctgggaggctgtgccaggcagtgagttctcgtatgctgaagtggagctcggcacagctgacatgatccacacggccgaggccaccaccaacttgggactgctcaccttcgggctggccaaggctataggctacgcaacagctgctgattgcggccggactgtactgtccccagtggagccctcctgcgaaggcatgcagtgcgcagccgggcagcgctgccaggtggtaggcgggaaggccgggtgtgtggcggagtccaccgctgtctgccgcgcccagggcgacccccattacaccaccttcgacggccgtcgctacgacatgatgggcacctgttcgtacacgatggtggagctgtgcagcgaggacgacaccctgcccgccttcagcgtggaggccaagaacgagcaccggggcagccgccgcgtctcctacgtgggcctcgtcactgtgcgcgcctacagccactctgtgtcgctgacccgcggtgaagttggcttcgtcctggttgacaaccagcgctcgcgcctgccagtctccctgagtgagggtcgcctgcgtgtgtaccagagcggaccacgggccgtggtggagctggtctttgggctggtggtcacttatgactgggactgccagctggcactcagcctgcctgcacgcttccaagaccaggtgtgcgggctgtgtggcaactataatggtgacccagcagacgacttcctcacgcctgacggggctctggctcctgacgctgtggagttcgcaagtagctggaagctggatgatggggactacctgtgtgaggatggctgccagaacaactgtcccgcctgcaccccaggccaggcccaacactatgagggcgaccgactctgtggcatgctgaccaagctcgatggccccttcgctgtctgccatgacaccctggaccccaggcccttcctggagcagtgtgtatatgacctgtgtgtggtcggtggggagcggctcagcctgtgccgtggcctcagcgcctatgcccaggcctgtctggagcttggcatctcggttggggactggagatcaccagccaactgccccctgtcctgccctgccaacagccgctatgagctctgcggccctgcttgcccgacctcctgcaacggggctgcggcgccgtccaactgctccgggcgcccctgcgtggagggctgcgtgtgcctcccaggcttcgtggccagcggcggcgcctgcgtgccggcctcgtcgtgtggctgcaccttccagggtctccagctcgctccgggccaggaagtgtgggcggacgagttgtgccaaaggcgctgcacctgcaacggcgccacccatcaggtcacctgccgcgacaagcagagctgcccggcgggtgagcgctgcagcgtccagaacggcctcctgggctgctaccccgatcgcttcgggacctgccaggggtccggggacccacactatgtgagcttcgacggccggcgcttcgacttcatgggcacctgcacgtacctgctggtcggctcatgcggccagaacgcagcgctgcctgccttccgggtgctggtggaaaacgagcatcggggcagccagactgtgagctacacgcgcgccgtgcgggtggaggcccgcggggtgaaggtggccgtgcgccgggagtaccccgggcaagtgctggtggatgacgtccttcagtatctgcccttccaagcagcagatgggcaggtgcaggtgttccgacagggcagggatgccgtcgtgcgcacggactttggcctgactgtcacttatgactggaatgcacgagtgactgccaaggtgcccagcagctatgctgaggccctgtgtggactctgtgggaacttcaacggggacccagctgatgacctggctctgcggggtgggggtcaagctgccaatgcactggcctttgggaacagctggcaagaagagacgaggcccggctgtggagcaactgaaccgggtgactgtcccaagctggactccctggtggcccagcagctgcagagcaagaatgagtgtggaatccttgccgaccccaaggggcccttccgggagtgccatagcaagctggacccccagggtgccgtgcgcgactgtgtctatgaccgctgcctgctgccaggccagtctgggccactgtgtgacgcactggccacctatgctgctgcatgccaggctgctggagccacagtgcacccctggaggagtgaagaactttgcccactgagctgcccaccccacagccactatgaggcgtgttcctacggctgcccgctgtcctgtggagacctcccagtgcccgggggctgtggctcagaatgccatgagggctgcgtgtgcgatgagggctttgcgctcagtggtgagtcctgcctgcccctggcctcctgtggctgcgtacaccagggcacctaccacccaccaggccagaccttctaccctggccccggatgtgattccctttgccactgccaggagggcggcctggtgtcctgtgagtcctccagctgcggaccgcacgaggcctgccagccatccggtggcagcttgggctgtgtggccgtgggctctagcacctgccaggcgtcaggagacccccactacaccaccttcgatggccgccgcttcgacttcatgggcacctgcgtgtatgtgctggctcagacctgcggcacccggcctggcctgcatcggtttgccgtcctgcaggagaacgtggcctggggtaatgggcgagtcagtgtgaccagggtgatcacggtccaggtggcaaacttcaccctgcggctggagcagagacagtggaaggtcacggtgaacggtgtggacatgaagctgcccgtggtgctggccaacggccagatccgtgcctcccagcatggttcagatgttgtgattgagaccgacttcggcctgcgtgtggcctacgaccttgtgtactatgtgcgggtcaccgtccccggaaactactaccagcagatgtgtggcctgtgtgggaactacaacggcgaccccaaggatgacttccagaagcccaatggctcacaggcaggcaacgccaatgagttcggcaactcctgggaggaggtggtgcccgactctccctgcctgccgcccaccccttgcccgccggggagcgaggactgtatccccagccacaagtgtcctcccgagctggagaagaagtatcagaaggaggagttctgtgggctcctctccagccccacagggccactgtcctcctgccacaagctggtggatccccagggtcccttgaaagattgcatctttgatctctgcctgggtggtgggaacctgagcattctctgcagcaacatccatgcctacgtgagtgcttgccaggcggctggaggccacgtggagccctggaggactgaaactttctgtcccatggagtgccctccgaacagtcactacgagctctgtgcggacacctgctccctgggctgctcagctctcagtgcccctccacagtgccaggatgggtgtgctgagggctgccagtgtgactccggcttcctctacaatggccaagcctgcgtgcccatccagcaatgcggctgctaccacaatggtgtctactatgagccggagcagacagtcctcattgacaactgtcggcagcagtgcacgtgccatgcgggtaaaggcatggtgtgccaggaacacagctgcaagccggggcaggtgtgccagccctccggaggcatcctgagctgcgtcaccaaagacccgtgccacggcgtgacatgccggccacaggagacatgcaaggagcagggtggccagggcgtgtgcctgcccaactatgaggccacgtgctggctgtggggcgacccacactaccactccttcgatggccggaagtttgacttccagggcacctgtaactatgtgctggcaacaactggctgcccgggggtcagcacccagggcctgacacccttcaccgtcaccaccaagaaccagaaccggggcaaccctgctgtgtcctacgtgagagtcgtcaccgtggctgccctcggcaccaacatctccatccacaaggacgagatcggcaaagtccgggtgaacggtgtgctcacagccttgcctgtctctgtggccgacgggcggatttcagtgacccagggtgcatcgaaggcactgctggtggctgactttggactgcaagtcagctatgactggaactggcgggtagacgtgacgctgcccagcagctatcatggcgcagtgtgcgggctctgcggtaacatggaccgcaaccccaacaatgaccaggtcttccctaatggcacactggctccctccatacccatctggggcggcagctggcgagccccaggctgggacccactgtgttgggacgaatgtcgggggtcctgcccaacgtgccctgaggaccggttggagcagtacgagggccctggcttctgcggacccctggcccccggcacagggggccctttcaccacctgccatgctcatgtgccacctgagagcttcttcaagggctgtgttctggacgtctgcatgggtggtggggaccgtgacattctttgcaaggctctggcttcctatgtggccgcctgccaggctgctggggttgtcatcgaagactggcgggcacaggttggctgtgagatcacctgcccagaaaacagccactatgaggtctgtggcccaccctgcccggccagctgtccgtcccctgcaccccttacgacgccagccgtatgtgagggcccctgtgtggagggctgccagtgcgacgcgggtttcgtgttaagtgctgaccgctgtgttcccctcaacaacggctgcggctgctgggccaatggcacctaccacgaggcgggcagtgagttttgggctgatggcacctgctcccagtggtgtcgctgcgggcctgggggtggctcgctggtctgcacacctgccagctgtgggctgggtgaagtgtgtggcctcctgccatccggccagcacggctgccagcccgtcagcacagctgagtgccaggcgtggggtgacccccattacgtcactctggatgggcaccgattcaatttccaaggcacctgcgagtacctgctgagtgcaccctgccacggaccacccttgggggctgagaacttcactgtcactgtagccaatgagcaccggggcagccaggctgtcagctacacccgcagtgtcaccctgcaaatctacaaccacagcctgacactgagtgcccgctggccccggaagctacaggtggacggcgtgttcgtcactctgcccttccagctggactcgctcctgcacgcacacctgagcggcgccgacgtggtggtgaccacaacctcagggctctcgctggctttcgacggggacagcttcgtgcgcctgcgcgtgccggcggcgtacgcgggctctctctgtggcttatgcgggaactacaaccaggaccccgcagacgacctgaaggcggtgggcgggaagcccgccggatggcaggtgggcggcgcccagggctgcggggaatgtgtgtccaagccatgcccgtcgccgtgcaccccagagcagcaagagtccttcggcggcccggacgcctgcggcgtgatctccgccaccgacggcccgctggcgccctgccacggccttgtgccgcccgcgcagtacttccagggctgcttgctggacgcctgccaagttcagggccatcctggaggcctctgtcctgcagtggccacctacgtggcagcctgtcaggccgctggggcccagctccgcgagtggaggcggccggacttctgtcccttccagtgccctgcccacagccactacgagctctgcggtgactcctgtcctgggagctgcccgagcctgtcggcacccgagggctgtgagtcggcctgccgtgaaggctgtgtctgcgatgctggcttcgtgctcagtggtgacacgtgtgtacctgtgggccagtgtggctgcctccacgatgaccgctactacccactgggccagaccttctaccctggccctgggtgtgattccctttgccgctgccgggagggcggtgaggtgtcctgtgagccctccagctgcggcccgcatgagacctgccggccatccggtggcagcttgggctgcgtggccgtgggctctaccacctgccaggcgtcgggagatccccactacaccaccttcgatggccgccgcttcgacttcatgggcacctgcgtgtatgtgctggctcagacctgcggcacccggcctggcctacatcggtttgccgtcctgcaggagaacgtggcctggggtaatgggcgagtcagtgtgaccagggtgatcacggtccaggtggcaaacttcaccctgcggctggagcagagacagtggaaggtcacggtgaacggtgtggacatgaagctgcccgtggtgctggccaacggccagatccgtgcctcccagcatggttcagatgttgtgattgagaccgacttcggcctgcgtgtggcctacgaccttgtgtactatgtgcgggtcaccgtccctggaaactactaccagctgatgtgtggcctgtgtgggaactacaacggcgaccccaaggatgacttccagaagcccaatggctcgcaggcaggcaacgccaatgagttcggcaactcctgggaggaggtggtgcccgactctccctgcctgccgccgcccacctgcccgccggggagcgagggctgtatccccagcgaggagtgtcctcccgagctggagaagaagtatcagaaggaggagttctgtgggctcctctccagccccacagggccactgtcctcctgccacaagctggtggatccccagggtcccttgaaagattgcatctttgatctctgcctgggtggtgggaacctgagcattctctgcagcaacatccatgcctacgtgagtgcttgccaggcggctggaggccacgtggagccctggaggaatgaaactttctgtcccatggaatgccctcagaacagtcactacgagctctgtgcggacacctgctccctgggctgctcggctctcagtgcccctctgcagtgcccagatgggtgtgctgagggctgccagtgtgactccggcttcctctacaacggccaagcctgcgtgcccatccagcaatgtggctgctaccacaatggtgcctactatgagccggagcagacagtcctcattgacaactgtcggcagcagtgcacgtgccatgcgggtaaagtcgtggtgtgccaggaacacagctgcaagccggggcaggtgtgccagccctccggaggcatcctgagctgcgtcaccaaagacccgtgccacggcgtgacatgccggccacaggagacatgcaaggagcagggtggccagggtgtgtgcctgcccaactatgaggccacgtgctggctgtggggcgacccacactaccactccttcgatggccggaagtttgacttccagggcacctgtaactatgtgctggcaacaactggctgcccgggggtcagcacccagggcctgacacccttcaccgtcaccaccaagaaccagaaccggggcaaccctgctgtatcctacgtgagagtcgtcaccgtggctgccctcggcaccaacatctccatccacaaggacgagatcggcaaagtccgggtgaacggtgtgctcacagccttgcctgtctccgtggccgacgggcggatttcagtggcccagggtgcatcgaaggcactgctggtggctgactttggactgcaagtcagctatgactggaactggcgggtagacgtgacgctccccagcagctatcatggcgcagtgtgcgggctctgcggtaacatggaccgcaaccccaacaatgaccaggtcttccctaatggcacactggctccctccatacccatctggggcggcagctggcgagccccaggctgggacccactgtgttgggacgaatgtcgggggtcctgcccaacgtgccctgaggaccggttggagcagtacgagggccctggcttctgcggacccctggcccccggcacagggggccctttcaccacctgccatgctcatgtgccacctgagagcttcttcaagggctgtgttctggacgtctgcatgggtggtggggaccatgacattctttgcaaggctctggcttcctacgtggccgcctgccaggccgctggggttgtcatcgaagactggcgggcacaggttggctgtgagatcacctgcccagaaaacagccactatgaggtctgtggcccaccctgcccggccagctgtccgtcccctgcaccccttacgacgccagccgtatgtgagggcccctgtgtggagggctgccagtgcgacgcgggtttcgtgttaagtgctgaccgctgtgttcccctcaacaacggctgcggctgctgggccaatggcacctaccacgaggcgggcagtgagttttgggctgatggcacctgctcccagtggtgtcgctgcgggcctgggggtggctcgctggtctgcacacctgccagctgtgggctgggtgaagtgtgtggcctcctgccatccggccagcacggctgccagcccgtcagcacagctgagtgccaggcgtggggtgacccccattacgtcactctggatgggcaccgattcgatttccaaggcacctgcgagtacctgctgagtgcaccctgccacggaccacccttgggggctgagaacttcactgtcactgtagccaatgagcaccggggcagccaggctgtcagctacacccgcagtgtcaccctgcaaatctacaaccacagcctgacactgagtgcccgctggccccggaagctacaggtggacggcgtgttcgtcactctgcccttccagctggactcgctcctgcacgcacacctgagcggcgccgacgtggtggtgaccacaacctcagggctctcgctggctttcgacggggacagcttcgtgcgcctgcgcgtgccggcggcgtacgcgggctctctctgtggcttatgcgggaactacaaccaggaccccgcagacgacctgaaggcggtgggcgggaagcccgccggatggcaggtgggcggcgcccagggctgcggggaatgtgtgtccaagccatgcccgtcgccgtgcaccccagagcagcaagagtccttcggcggcccggacgcctgcggcgtgatctccgccaccgacggcccgctggcgccctgccacggccttgtgccgcccgcgcagtacttccagggctgcttgctggacgcctgccaagttcagggccatcctggaggcctctgtcctgcagtggccacctacgtggcagcctgtcaggccgctggggcccagctccgcgagtggaggcggccggacttctgtcccttccagtgccctgcccacagccactacgagctctgcggtgactcctgtcctgggagctgcccgagcctgtcggcacccgagggctgtgagtcggcctgccgtgaaggctgtgtctgcgatgctggcttcgtgctcagtggtgacacgtgtgtacctgtgggccagtgtggctgcctccacgatgaccgctactacccactgggccagaccttctaccctggccctgggtgtgattccctttgccgctgccgggagggcggtgaggtgtcctgtgagccctccagctgcggcccgcatgagacctgccggccatccggtggcagcttgggctgcgtggccgtgggctctaccacctgccaggcgtcgggagatccccactacaccaccttcgatggccgccgcttcgacttcatgggcacctgcgtgtatgtgctggctcagacctgcggcacccggcctggcctacatcggtttgccgtcctgcaggagaacgtggcctggggtaatgggcgagtcagtgtgaccagggtgatcacggtccaggtggcaaacttcaccctgcggctggagcagagacagtggaaggtcacggtgaacggtgtggacatgaagctgcccgtggtgctggccaacggccagatccgtgcctcccagcatggttcagatgttgtgattgagaccgacttcggcctgcgtgtggcctacgaccttgtgtactatgtgcgggtcaccgtccctggaaactactaccagctgatgtgtggcctgtgtgggaactacaacggcgaccccaaggatgacttccagaagcccaatggctcgcaggcaggcaacgccaatgagttcggcaactcctgggaggaggtggtgcccgactctccctgcctgccgccgcccacctgcccgccggggagcgagggctgtatccccagcgaggagtgtcctcccgagctggagaagaagtatcagaaggaggagttctgtgggctcctctccagccccacagggccactgtcctcctgccacaagctggtggatccccagggtcccttgaaagattgcatctttgatctctgcctgggtggtgggaacctgagcattctctgcagcaacatccatgcctacgtgagtgcttgccaggcggctggaggccacgtggagccctggaggaatgaaactttctgtcccatggaatgccctcagaacagtcactacgagctctgtgcggacacctgctccctgggctgctcggctctcagtgcccctctgcagtgcccagatgggtgtgctgagggctgccagtgtgactccggcttcctctacaacggccaagcctgcgtgcccatccagcaatgtggctgctaccacaatggtgtctactatgagccggagcagacagtcctcattgacaactgtcggcagcagtgcacgtgccatgtgggtaaagtcgtggtgtgccaggaacacagctgcaagccggggcaggtgtgccagccctccggaggcatcctgagctgcgtcaacaaagacccgtgccacggcgtgacatgccggccacaggagacatgcaaggagcagggtggccagggtgtgtgcctgcccaactatgaggccacgtgctggctgtggggcgacccacactaccactccttcgatggccggaagtttgacttccagggcacctgtaactatgtgctggcaacaactggctgcccgggggtcagcacccagggcctgacacccttcaccgtcaccaccaagaaccagaaccggggcaaccctgctgtatcctacgtgagagtcgtcaccgtggctgccctcggcaccaacatctccatccacaaggacgagatcggcaaagtccgggtgaacggtgtgctcacagccttgcctgtctccgtggccgacgggcggatttcagtggcccagggtgcatcgaaggcactgctggtggctgactttggactgcaagtcagctatgactggaactggcgggtagacgtgacgctccccagcagctatcatggcgcagtgtgcgggctctgcggtaacatggaccgcaaccccaacaatgaccaggtcttccctaatggcacactggctccctccatacccatctggggcggcagctggcgagccccaggctgggacccactgtgttgggacgaatgtcgggggtcctgcccaacgtgccctgaggaccggttggagcagtacgaggggcctggcttctgcggacccctggcatctggcacagggggccccttcaccacctgccatgctcatgtgccacctgagagcttcttcaagggctgtgttctggacgtctgcatgggtggtggggaccatgacattctttgcaaggctctggcttcctacgtggccgcctgccaggccgctggggttgtcatcgaagactggcgggcacaggttggctgtgagatcacctgcccagaaaacagccactatgaggtctgtggcccaccctgcccggccagctgtccgtcccctgcaccccttacgacgccagccgtatgtgagggcccctgtgtggagggctgccagtgcgacgcgggtttcgtgttaagtgctgaccgctgtgttcccctcaacaacggctgcggctgctgggccaatggcacctaccacgaggcgggcagtgagttttgggctgatggcacctgctcccagtggtgtcgctgcgggcctgggggtggctcgctggtctgcacacctgccagctgtgggctgggtgaagtgtgtggcctcctgccatccggccagcacggctgccagcccgtcagcacagctgagtgccaggcgtggggtgacccccattacgtcactctggatgggcaccgattcgatttccaaggcacctgcgagtacctgctgagtgcaccctgccacggaccacccttgggggctgagaacttcactgtcactgtagccaatgagcaccggggcagccaggctgtcagctacacccgcagtgtcaccctgcaaatctacaaccacagcctgacactgagtgcccgctggccccggaagctacaggtcgacggcgtgttcgtggctctgcctttccagctggactcgctcctgcacgcacacctgagcggcgccgacgtggtggtgaccacaacctcagggctctcgctggctttcgatggggacagcttcgtgcgcctgcgcgtgccggcggcgtacgcggcctctctctgtggcttatgcgggaactacaaccaggaccccgcagacgacctcaaggctgtgggcgggaagcccgctggatggcaggtgggcggggcccagggctgcggggaatgtgtgtccaagccatgcccgtcgccgtgcaccccagagcagcaggagtccttcggcggcccggacgcctgcggcgtgatctccgccaccgacggcccgctggcaccctgccacggccttgtgccgcccgcgcagtacttccagggctgcttgctggacgcctgccaagttcagggccatcctggaggcctctgtcctgcagtggctacctacgtggcagcctgtcaggccgctggggcccagctcggcgagtggaggcggccggacttctgtcccttgcagtgccctgcccacagccactatgagctctgcggtgactcctgccctgtgagctgcccgagcctctcagcacccgagggctgtgagtcggcctgccgtgaaggctgtgtctgcgatgctggcttcgtactcagtggtgacacctgcgtacccgtgggccagtgtggctgcctccatgatggccgctactacccactgggcgaggtcttctacccgggccctgagtgtgagcgacgctgtgagtgtgggccaggtggccatgtcacctgccaggagggcgcagcctgtgggccccatgaggagtgccggttagaggatggtgtccaggcctgtcatgccacaggctgtggccgctgcctggccaacgggggcatccactacatcacccttgatggccgtgtctacgacctgcatggctcctgctcctatgtcttggcccaagtctgccacccaaagcctggggacgaggacttttccatcgtgcttgagaagaatgcagctggacatctccaacgcctcctggttactgtggctggccaggttgtgagcctagctcaggggcagcaggtcaccgtggacggcgaggctgtggccctgcctgtggctgtgggccgcgtgcgggtgaccgccgagggccgaaacatggttctgcagacgaccaaggggctgcggcttctctttgatggcgatgcccacctcctcatgtccatccccagccccttccgtggacggctctgtggcctctgtgggaacttcaatggcaactggagtgacgactttgtcctgcccaatggctcagcagcgtccagtgtggagaccttcggggctgcatggcgggtgcccggctcctccaagggctgtggcgagggctgcgggccccaaggctgcccagtgtgcttggcagaggagactgcaccctatgagagcaacgaggcctgcgggcagctccggaacccccagggccccttcgcgacctgccaggcggtgctgagtccctctgagtacttccgccaatgcgtatacgacctgtgcgcgcaaaagggtgacaaagccttcctgtgccgcagcctggcagcctacacggcggcctgtcaggcagctggcgtggccgtgaagccctggaggacagacagcttctgcccgctccattgccccgcccacagccactactccatctgcactcgcacctgccagggatcctgtgcggctctctccggcctcacgggctgcaccacccgctgttttgagggctgtgagtgcgacgaccgcttcctgctttcccagggtgtctgcatccctgtccaagattgtggctgcacccataatggccgatacttgccggtaaactcctccctgctgacctcagactgcagcgagcgctgttcctgttcctcaagctctggcctgacatgccaggcagctggctgcccaccaggccgtgtatgtgaggtcaaggctgaagcccggaactgctgggccacccgtggtctctgtgtcctgtctgtgggtgccaacctcaccacctttgatggggcccgtggtgccaccacctctcctggtgtctatgagctctcttcccgctgcccaggactacagaataccatcccctggtaccgtgtagttgccgaagtccagatctgccatggcaaaacggaggctgtgggccaggtccacatcttcttccaggatgggatggtgacgttgactccaaacaagggtgtgtgggtgaatggtctccgagtggatctcccagctgagaagttagcatctgtgtccgtgagtcgtacacctgatggctccctgctagtccgccagaaggcaggggtccaggtgtggcttggagccaatgggaaggtggctgtgattgtcagcaatgaccatgctgggaaactgtgtggggcctgtggaaactttgacggggaccagaccaatgattggcatgactcccaggagaagccagcgatggagaaatggagagcgcaggacttctccccatgttatggctgatcagtcatccaccaggaacgaagatttcctgaagaagacctggtccctctggaggttgcagtggctgaaggatgcatcatgtgctcctaccctgctctaccgcttttctgggtcacagaggccaaatgtgagagcattgaataaatatcttaagctaagctgca

SEQ ID NO: 433527 - DNA, 10911 bp, Homo sapiens
cggcacgagggggtcccatctcttcggggctggtttggtttcactctggtccttctgggtctctttgttttcttttttctctgtttgtctctctgtttcttggtgctcgtctctgggcctcgctttgcttgtctctatctttctgtttctcattctctagctccctcagtttctgcttgggtctcctggtgtctcgctttctcccatttctttctctgtgtcctctctctgtgtcttgttttctgtctccccctttctctgtctgctccctagtgtctctctctgtctcctcccaccctgttctgggaccccacccctaacacccttctttctgtttctctccttcctgctccttcatctgcccacagagatcacctgcccagaaaacagccactatgaggtctgtggcccaccctgcccggccagctgtccgtcccctgcaccccttacgacgccagccgtatgtgagggcccctgtgtggagggctgccagtgcgacgcgggtttcgtgttaagtgctgaccgctgtgttcccctcaacaacggctgcggctgctgggccaatggcacctaccacgaggcgggcagtgagttttgggctgatggcacctgctcccagtggtgtcgctgcgggcctgggggtggctcgctggtctgcacacctgccagctgtgggctgggtgaagtgtgtggcctcctgccatccggccagcacggctgccagcccgtcagcacagctgagtgccaggcgtggggtgacccccattacgtcactctggatgggcaccgattcaatttccaaggcacctgcgagtacctgctgagtgcaccctgccacggaccacccttgggggctgagaacttcactgtcactgtagccaatgagcaccggggcagccaggctgtcagctacacccgcagtgtcaccctgcaaatctacaaccacagcctgacactgagtgcccgctggccccggaagctacaggtggacggcgtgttcgtcactctgcccttccagctggactcgctcctgcacgcacacctgagcggcgccgacgtggtggtgaccacaacctcagggctctcgctggctttcgacggggacagcttcgtgcgcctgcgcgtgccggcggcgtacgcgggctctctctgtggcttatgcgggaactacaaccaggaccccgcagacgacctgaaggcggtgggcgggaagcccgccggatggcaggtgggcggcgcccagggctgcggggaatgtgtgtccaagccatgcccgtcgccgtgcaccccagagcagcaagagtccttcggcggcccggacgcctgcggcgtgatctccgccaccgacggcccgctggcgccctgccacggccttgtgccgcccgcgcagtacttccagggctgcttgctggacgcctgccaagttcagggccatcctggaggcctctgtcctgcagtggccacctacgtggcagcctgtcaggccgctggggcccagctccgcgagtggaggcggccggacttctgtcccttccagtgccctgcccacagccactacgagctctgcggtgactcctgtcctgggagctgcccgagcctgtcggcacccgagggctgtgagtcggcctgccgtgaaggctgtgtctgcgatgctggcttcgtgctcagtggtgacacgtgtgtacctgtgggccagtgtggctgcctccacgatgaccgctactacccactgggccagaccttctaccctggccctgggtgtgattccctttgccgctgccgggagggcggtgaggtgtcctgtgagccctccagctgcggcccgcatgagacctgccggccatccggtggcagcttgggctgcgtggccgtgggctctaccacctgccaggcgtcgggagatccccactacaccaccttcgatggccgccgcttcgacttcatgggcacctgcgtgtatgtgctggctcagacctgcggcacccggcctggcctacatcggtttgccgtcctgcaggagaacgtggcctggggtaatgggcgagtcagtgtgaccagggtgatcacggtccaggtggcaaacttcaccctgcggctggagcagagacagtggaaggtcacggtgaacggtgtggacatgaagctgcccgtggtgctggccaacggccagatccgtgcctcccagcatggttcagatgttgtgattgagaccgacttcggcctgcgtgtggcctacgaccttgtgtactatgtgcgggtcaccgtccctggaaactactaccagctgatgtgtggcctgtgtgggaactacaacggcgaccccaaggatgacttccagaagcccaatggctcgcaggcaggcaacgccaatgagttcggcaactcctgggaggaggtggtgcccgactctccctgcctgccgccgcccacctgcccgccggggagcgagggctgtatccccagcgaggagtgtcctcccgagctggagaagaagtatcagaaggaggagttctgtgggctcctctccagccccacagggccactgtcctcctgccacaagctggtggatccccagggtcccttgaaagattgcatctttgatctctgcctgggtggtgggaacctgagcattctctgcagcaacatccatgcctacgtgagtgcttgccaggcggctggaggccacgtggagccctggaggaatgaaactttctgtcccatggaatgccctcagaacagtcactacgagctctgtgcggacacctgctccctgggctgctcggctctcagtgcccctctgcagtgcccagatgggtgtgctgagggctgccagtgtgactccggcttcctctacaacggccaagcctgcgtgcccatccagcaatgtggctgctaccacaatggtgcctactatgagccggagcagacagtcctcattgacaactgtcggcagcagtgcacgtgccatgcgggtaaagtcgtggtgtgccaggaacacagctgcaagccggggcaggtgtgccagccctccggaggcatcctgagctgcgtcaccaaagacccgtgccacggcgtgacatgccggccacaggagacatgcaaggagcagggtggccagggtgtgtgcctgcccaactatgaggccacgtgctggctgtggggcgacccacactaccactccttcgatggccggaagtttgacttccagggcacctgtaactatgtgctggcaacaactggctgcccgggggtcagcacccagggcctgacacccttcaccgtcaccaccaagaaccagaaccggggcaaccctgctgtatcctacgtgagagtcgtcaccgtggctgccctcggcaccaacatctccatccacaaggacgagatcggcaaagtccgggtgaacggtgtgctcacagccttgcctgtctccgtggccgacgggcggatttcagtggcccagggtgcatcgaaggcactgctggtggctgactttggactgcaagtcagctatgactggaactggcgggtagacgtgacgctccccagcagctatcatggcgcagtgtgcgggctctgcggtaacatggaccgcaaccccaacaatgaccaggtcttccctaatggcacactggctccctccatacccatctggggcggcagctggcgagccccaggctgggacccactgtgttgggacgaatgtcgggggtcctgcccaacgtgccctgaggaccggttggagcagtacgagggccctggcttctgcggacccctggcccccggcacagggggccctttcaccacctgccatgctcatgtgccacctgagagcttcttcaagggctgtgttctggacgtctgcatgggtggtggggaccatgacattctttgcaaggctctggcttcctacgtggccgcctgccaggccgctggggttgtcatcgaagactggcgggcacaggttggctgtgagatcacctgcccagaaaacagccactatgaggtctgtggcccaccctgcccggccagctgtccgtcccctgcaccccttacgacgccagccgtatgtgagggcccctgtgtggagggctgccagtgcgacgcgggtttcgtgttaagtgctgaccgctgtgttcccctcaacaacggctgcggctgctgggccaatggcacctaccacgaggcgggcagtgagttttgggctgatggcacctgctcccagtggtgtcgctgcgggcctgggggtggctcgctggtctgcacacctgccagctgtgggctgggtgaagtgtgtggcctcctgccatccggccagcacggctgccagcccgtcagcacagctgagtgccaggcgtggggtgacccccattacgtcactctggatgggcaccgattcgatttccaaggcacctgcgagtacctgctgagtgcaccctgccacggaccacccttgggggctgagaacttcactgtcactgtagccaatgagcaccggggcagccaggctgtcagctacacccgcagtgtcaccctgcaaatctacaaccacagcctgacactgagtgcccgctggccccggaagctacaggtggacggcgtgttcgtcactctgcccttccagctggactcgctcctgcacgcacacctgagcggcgccgacgtggtggtgaccacaacctcagggctctcgctggctttcgacggggacagcttcgtgcgcctgcgcgtgccggcggcgtacgcgggctctctctgtggcttatgcgggaactacaaccaggaccccgcagacgacctgaaggcggtgggcgggaagcccgccggatggcaggtgggcggcgcccagggctgcggggaatgtgtgtccaagccatgcccgtcgccgtgcaccccagagcagcaagagtccttcggcggcccggacgcctgcggcgtgatctccgccaccgacggcccgctggcgccctgccacggccttgtgccgcccgcgcagtacttccagggctgcttgctggacgcctgccaagttcagggccatcctggaggcctctgtcctgcagtggccacctacgtggcagcctgtcaggccgctggggcccagctccgcgagtggaggcggccggacttctgtcccttccagtgccctgcccacagccactacgagctctgcggtgactcctgtcctgggagctgcccgagcctgtcggcacccgagggctgtgagtcggcctgccgtgaaggctgtgtctgcgatgctggcttcgtgctcagtggtgacacgtgtgtacctgtgggccagtgtggctgcctccacgatgaccgctactacccactgggccagaccttctaccctggccctgggtgtgattccctttgccgctgccgggagggcggtgaggtgtcctgtgagccctccagctgcggcccgcatgagacctgccggccatccggtggcagcttgggctgcgtggccgtgggctctaccacctgccaggcgtcgggagatccccactacaccaccttcgatggccgccgcttcgacttcatgggcacctgcgtgtatgtgctggctcagacctgcggcacccggcctggcctacatcggtttgccgtcctgcaggagaacgtggcctggggtaatgggcgagtcagtgtgaccagggtgatcacggtccaggtggcaaacttcaccctgcggctggagcagagacagtggaaggtcacggtgaacggtgtggacatgaagctgcccgtggtgctggccaacggccagatccgtgcctcccagcatggttcagatgttgtgattgagaccgacttcggcctgcgtgtggcctacgaccttgtgtactatgtgcgggtcaccgtccctggaaactactaccagctgatgtgtggcctgtgtgggaactacaacggcgaccccaaggatgacttccagaagcccaatggctcgcaggcaggcaacgccaatgagttcggcaactcctgggaggaggtggtgcccgactctccctgcctgccgccgcccacctgcccgccggggagcgagggctgtatccccagcgaggagtgtcctcccgagctggagaagaagtatcagaaggaggagttctgtgggctcctctccagccccacagggccactgtcctcctgccacaagctggtggatccccagggtcccttgaaagattgcatctttgatctctgcctgggtggtgggaacctgagcattctctgcagcaacatccatgcctacgtgagtgcttgccaggcggctggaggccacgtggagccctggaggaatgaaactttctgtcccatggaatgccctcagaacagtcactacgagctctgtgcggacacctgctccctgggctgctcggctctcagtgcccctctgcagtgcccagatgggtgtgctgagggctgccagtgtgactccggcttcctctacaacggccaagcctgcgtgcccatccagcaatgtggctgctaccacaatggtgtctactatgagccggagcagacagtcctcattgacaactgtcggcagcagtgcacgtgccatgtgggtaaagtcgtggtgtgccaggaacacagctgcaagccggggcaggtgtgccagccctccggaggcatcctgagctgcgtcaacaaagacccgtgccacggcgtgacatgccggccacaggagacatgcaaggagcagggtggccagggtgtgtgcctgcccaactatgaggccacgtgctggctgtggggcgacccacactaccactccttcgatggccggaagtttgacttccagggcacctgtaactatgtgctggcaacaactggctgcccgggggtcagcacccagggcctgacacccttcaccgtcaccaccaagaaccagaaccggggcaaccctgctgtatcctacgtgagagtcgtcaccgtggctgccctcggcaccaacatctccatccacaaggacgagatcggcaaagtccgggtgaacggtgtgctcacagccttgcctgtctccgtggccgacgggcggatttcagtggcccagggtgcatcgaaggcactgctggtggctgactttggactgcaagtcagctatgactggaactggcgggtagacgtgacgctccccagcagctatcatggcgcagtgtgcgggctctgcggtaacatggaccgcaaccccaacaatgaccaggtcttccctaatggcacactggctccctccatacccatctggggcggcagctggcgagccccaggctgggacccactgtgttgggacgaatgtcgggggtcctgcccaacgtgccctgaggaccggttggagcagtacgaggggcctggcttctgcggacccctggcatctggcacagggggccccttcaccacctgccatgctcatgtgccacctgagagcttcttcaagggctgtgttctggacgtctgcatgggtggtggggaccatgacattctttgcaaggctctggcttcctacgtggccgcctgccaggccgctggggttgtcatcgaagactggcgggcacaggttggctgtgagatcacctgcccagaaaacagccactatgaggtctgtggcccaccctgcccggccagctgtccgtcccctgcaccccttacgacgccagccgtatgtgagggcccctgtgtggagggctgccagtgcgacgcgggtttcgtgttaagtgctgaccgctgtgttcccctcaacaacggctgcggctgctgggccaatggcacctaccacgaggcgggcagtgagttttgggctgatggcacctgctcccagtggtgtcgctgcgggcctgggggtggctcgctggtctgcacacctgccagctgtgggctgggtgaagtgtgtggcctcctgccatccggccagcacggctgccagcccgtcagcacagctgagtgccaggcgtggggtgacccccattacgtcactctggatgggcaccgattcgatttccaaggcacctgcgagtacctgctgagtgcaccctgccacggaccacccttgggggctgagaacttcactgtcactgtagccaatgagcaccggggcagccaggctgtcagctacacccgcagtgtcaccctgcaaatctacaaccacagcctgacactgagtgcccgctggccccggaagctacaggtcgacggcgtgttcgtggctctgcctttccagctggactcgctcctgcacgcacacctgagcggcgccgacgtggtggtgaccacaacctcagggctctcgctggctttcgatggggacagcttcgtgcgcctgcgcgtgccggcggcgtacgcggcctctctctgtggcttatgcgggaactacaaccaggaccccgcagacgacctcaaggctgtgggcgggaagcccgctggatggcaggtgggcggggcccagggctgcggggaatgtgtgtccaagccatgcccgtcgccgtgcaccccagagcagcaggagtccttcggcggcccggacgcctgcggcgtgatctccgccaccgacggcccgctggcaccctgccacggccttgtgccgcccgcgcagtacttccagggctgcttgctggacgcctgccaagttcagggccatcctggaggcctctgtcctgcagtggctacctacgtggcagcctgtcaggccgctggggcccagctcggcgagtggaggcggccggacttctgtcccttgcagtgccctgcccacagccactatgagctctgcggtgactcctgccctgtgagctgcccgagcctctcagcacccgagggctgtgagtcggcctgccgtgaaggctgtgtctgcgatgctggcttcgtactcagtggtgacacctgcgtacccgtgggccagtgtggctgcctccatgatggccgctactacccactgggcgaggtcttctacccgggccctgagtgtgagcgacgctgtgagtgtgggccaggtggccatgtcacctgccaggagggcgcagcctgtgggccccatgaggagtgccggttagaggatggtgtccaggcctgtcatgccacaggctgtggccgctgcctggccaacgggggcatccactacatcacccttgatggccgtgtctacgacctgcatggctcctgctcctatgtcttggcccaagtctgccacccaaagcctggggacgaggacttttccatcgtgcttgagaagaatgcagctggacatctccaacgcctcctggttactgtggctggccaggttgtgagcctagctcaggggcagcaggtcaccgtggacggcgaggctgtggccctgcctgtggctgtgggccgcgtgcgggtgaccgccgagggccgaaacatggttctgcagacgaccaaggggctgcggcttctctttgatggcgatgcccacctcctcatgtccatccccagccccttccgtggacggctctgtggcctctgtgggaacttcaatggcaactggagtgacgactttgtcctgcccaatggctcagcagcgtccagtgtggagaccttcggggctgcatggcgggtgcccggctcctccaagggctgtggcgagggctgcgggccccaaggctgcccagtgtgcttggcagaggagactgcaccctatgagagcaacgaggcctgcgggcagctccggaacccccagggccccttcgcgacctgccaggcggtgctgagtccctctgagtacttccgccaatgcgtatacgacctgtgcgcgcaaaagggtgacaaagccttcctgtgccgcagcctggcagcctacacggcggcctgtcaggcagctggcgtggccgtgaagccctggaggacagacagcttctgcccgctccattgccccgcccacagccactactccatctgcactcgcacctgccagggatcctgtgcggctctctccggcctcacgggctgcaccacccgctgttttgagggctgtgagtgcgacgaccgcttcctgctttcccagggtgtctgcatccctgtccaagattgtggctgcacccataatggccgatacttgccggtaaactcctccctgctgacctcagactgcagcgagcgctgttcctgttcctcaagctctggcctgacatgccaggcagctggctgcccaccaggccgtgtatgtgaggtcaaggctgaagcccggaactgctgggccacccgtggtctctgtgtcctgtctgtgggtgccaacctcaccacctttgatggggcccgtggtgccaccacctctcctggtgtctatgagctctcttcccgctgcccaggactacagaataccatcccctggtaccgtgtagttgccgaagtccagatctgccatggcaaaacggaggctgtgggccaggtccacatcttcttccaggatgggatggtgacgttgactccaaacaagggtgtgtgggtgaatggtctccgagtggatctcccagctgagaagttagcatctgtgtccgtgagtcgtacacctgatggctccctgctagtccgccagaaggcaggggtccaggtgtggcttggagccaatgggaaggtggctgtgattgtcagcaatgaccatgctgggaaactgtgtggggcctgtggaaactttgacggggaccagaccaatgattggcatgactcccaggagaagccagcgatggagaaatggagagcgcaggacttctccccatgttatggctgatcagtcatccaccaggaacgaagatttcctgaagaagacctggtccctctggaggttgcagtggctgaaggatgcatcatgtgctcctaccctgctctaccgcttttctgggtcacagaggccaaatgtgagagcattgaataaatatcttaagctaagctgca

SEQ ID NO: 433528 - DNA, 9660 bp, Homo sapiens
ctgcagccatgggtgccctatggagctggtggatactctgggctggagcaaccctcctgtggggattgacccaggaggcttcagtggacctcaagaacactggcagagaggaattcctcacagccttcctgcagaactatcagctggcctacagcaaggcctacccccgcctccttatctccagtctgtcagagagccccgcttcagtctccatcctcagccaggcagacaacacctcaaagaaggtcacagtgaggcccggggagtcggtcatggtcaacatcagtgccaaggctgagatgataggcagcaagatcttccagcatgcggtggtgatccattctgactatgccatctctgtgcaggcactaaatgccaagcctgacacagcggagctgacactgctgcggcccatccaggccctaggcaccgagtattttgtgctcacaccccccggcacctcagccaggaatgtcaaggagtttgccgtggtggccggtgccgcaggtgcctcggtcagtgtcacgctgaaggggtcagtgacattcaatggcaagttctatccagcaggcgatgtcctaagagtgactctacagccctacaatgtggcccagctacagagctcagtggatctctcggggtcaaaggtcacagctagtagccccgtggctgtcctctctggccacagctgtgcgcagaaacatacgacctgcaaccatgtggttgagcagctgctacccacgtctgcctggggcacccactatgtagtacccacgctggcctcccaatctcgctatgatttggccttcgttgtggccagccaggccacaaagctgacctacaaccatgggggtatcactggctcccgtgggctccaggcaggtgatgtggtagagtttgaggtccggccatcctggccactctacctgtctgcaaatgtgggcatccaggtcctgttgtttggcacaggtgccataaggaatgaagtgacttatgacccctacctggtcctgatcccagatgtggcggcctactgcccagcctatgtggtcaagagtgtaccaggctgtgagggcgtggccctggtagtggcacagacgaaggctatcagcgggctgaccatagatgggcatgcagtgggggccaagctcacctgggaggctgtgccaggcagtgagttctcgtatgctgaagtggagctcggcacagctgacatgatccacacggccgaggccaccaccaacttgggactgctcaccttcgggctggccaaggctataggctacgcaacagctgctgattgcggccggactgtactgtccccagtggagccctcctgcgaaggcatgcagtgcgcagccgggcagcgctgccaggtggtaggcgggaaggccgggtgtgtggcggagtccaccgctgtctgccgcgcccagggcgacccccattacaccaccttcgacggccgtcgctacgacatgatgggcacctgttcgtacacgatggtggagctgtgcagcgaggacgacaccctgcccgccttcagcgtggaggccaagaacgagcaccggggcagccgccgcgtctcctacgtgggcctcgtcactgtgcgcgcctacagccactctgtgtcgctgacccgcggtgaagttggcttcgtcctggttgacaaccagcgctcgcgcctgccagtctccctgagtgagggtcgcctgcgtgtgtaccagagcggaccacgggccgtggtggagctggtctttgggctggtggtcacttatgactgggactgccagctggcactcagcctgcctgcacgcttccaagaccaggtgtgcgggctgtgtggcaactataatggtgacccagcagacgacttcctcacgcctgacggggctctggctcctgacgctgtggagttcgcaagtagctggaagctggatgatggggactacctgtgtgaggatggctgccagaacaactgtcccgcctgcaccccaggccaggcccaacactatgagggcgaccgactctgtggcatgctgaccaagctcgatggccccttcgctgtctgccatgacaccctggaccccaggcccttcctggagcagtgtgtatatgacctgtgtgtggtcggtggggagcggctcagcctgtgccgtggcctcagcgcctatgcccaggcctgtctggagcttggcatctcggttggggactggagatcaccagccaactgccccctgtcctgccctgccaacagccgctatgagctctgcggccctgcttgcccgacctcctgcaacggggctgcggcgccgtccaactgctccgggcgcccctgcgtggagggctgcgtgtgcctcccaggcttcgtggccagcggcggcgcctgcgtgccggcctcgtcgtgtggctgcaccttccagggtctccagctcgctccgggccaggaagtgtgggcggacgagttgtgccaaaggcgctgcacctgcaacggcgccacccatcaggtcacctgccgcgacaagcagagctgcccggcgggtgagcgctgcagcgtccagaacggcctcctgggctgctaccccgatcgcttcgggacctgccaggggtccggggacccacactatgtgagcttcgacggccggcgcttcgacttcatgggcacctgcacgtacctgctggtcggctcatgcggccagaacgcagcgctgcctgccttccgggtgctggtggaaaacgagcatcggggcagccagactgtgagctacacgcgcgccgtgcgggtggaggcccgcggggtgaaggtggccgtgcgccgggagtaccccgggcaagtgctggtggatgacgtccttcagtatctgcccttccaagcagcagatgggcaggtgcaggtgttccgacagggcagggatgccgtcgtgcgcacggactttggcctgactgtcacttatgactggaatgcacgagtgactgccaaggtgcccagcagctatgctgaggccctgtgtggactctgtgggaacttcaacggggacccagctgatgacctggctctgcggggtgggggtcaagctgccaatgcactggcctttgggaacagctggcaagaagagacgaggcccggctgtggagcaactgaaccgggtgactgtcccaagctggactccctggtggcccagcagctgcagagcaagaatgagtgtggaatccttgccgaccccaaggggcccttccgggagtgccatagcaagctggacccccagggtgccgtgcgcgactgtgtctatgaccgctgcctgctgccaggccagtctgggccactgtgtgacgcactggccacctatgctgctgcatgccaggctgctggagccacagtgcacccctggaggagtgaagaactttgcccactgagctgcccaccccacagccactatgaggcgtgttcctacggctgcccgctgtcctgtggagacctcccagtgcccgggggctgtggctcagaatgccatgagggctgcgtgtgcgatgagggctttgcgctcagtggtgagtcctgcctgcccctggcctcctgtggctgcgtacaccagggcacctaccacccaccaggccagaccttctaccctggccccggatgtgattccctttgccactgccaggagggcggcctggtgtcctgtgagtcctccagctgcggaccgcacgaggcctgccagccatccggtggcagcttgggctgtgtggccgtgggctctagcacctgccaggcgtcaggagacccccactacaccaccttcgatggccgccgcttcgacttcatgggcacctgcgtgtatgtgctggctcagacctgcggcacccggcctggcctgcatcggtttgccgtcctgcaggagaacgtggcctggggtaatgggcgagtcagtgtgaccagggtgatcacggtccaggtggcaaacttcaccctgcggctggagcagagacagtggaaggtcacggtgaacggtgtggacatgaagctgcccgtggtgctggccaacggccagatccgtgcctcccagcatggttcagatgttgtgattgagaccgacttcggcctgcgtgtggcctacgaccttgtgtactatgtgcgggtcaccgtccccggaaactactaccagcagatgtgtggcctgtgtgggaactacaacggcgaccccaaggatgacttccagaagcccaatggctcacaggcaggcaacgccaatgagttcggcaactcctgggaggaggtggtgcccgactctccctgcctgccgcccaccccttgcccgccggggagcgaggactgtatccccagccacaagtgtcctcccgagctggagaagaagtatcagaaggaggagttctgtgggctcctctccagccccacagggccactgtcctcctgccacaagctggtggatccccagggtcccttgaaagattgcatctttgatctctgcctgggtggtgggaacctgagcattctctgcagcaacatccatgcctacgtgagtgcttgccaggcggctggaggccacgtggagccctggaggactgaaactttctgtcccatggagtgccctccgaacagtcactacgagctctgtgcggacacctgctccctgggctgctcagctctcagtgcccctccacagtgccaggatgggtgtgctgagggctgccagtgtgactccggcttcctctacaatggccaagcctgcgtgcccatccagcaatgcggctgctaccacaatggtgtctactatgagccggagcagacagtcctcattgacaactgtcggcagcagtgcacgtgccatgcgggtaaaggcatggtgtgccaggaacacagctgcaagccggggcaggtgtgccagccctccggaggcatcctgagctgcgtcaccaaagacccgtgccacggcgtgacatgccggccacaggagacatgcaaggagcagggtggccagggcgtgtgcctgcccaactatgaggccacgtgctggctgtggggcgacccacactaccactccttcgatggccggaagtttgacttccagggcacctgtaactatgtgctggcaacaactggctgcccgggggtcagcacccagggcctgacacccttcaccgtcaccaccaagaaccagaaccggggcaaccctgctgtgtcctacgtgagagtcgtcaccgtggctgccctcggcaccaacatctccatccacaaggacgagatcggcaaagtccgggtgaacggtgtgctcacagccttgcctgtctctgtggccgacgggcggatttcagtgacccagggtgcatcgaaggcactgctggtggctgactttggactgcaagtcagctatgactggaactggcgggtagacgtgacgctgcccagcagctatcatggcgcagtgtgcgggctctgcggtaacatggaccgcaaccccaacaatgaccaggtcttccctaatggcacactggctccctccatacccatctggggcggcagctggcgagccccaggctgggacccactgtgttgggacgaatgtcgggggtcctgcccaacgtgccctgaggaccggttggagcagtacgagggccctggcttctgcggacccctggcccccggcacagggggccctttcaccacctgccatgctcatgtgccacctgagagcttcttcaagggctgtgttctggacgtctgcatgggtggtggggaccgtgacattctttgcaaggctctggcttcctatgtggccgcctgccaggctgctggggttgtcatcgaagagcactgctggtggctgactttggactgcaagtcagctatgactggaactggcgggtagacgtgacgctccccagcagctatcatggcgcagtgtgcgggctctgcggtaacatggaccgcaaccccaacaatgaccaggtcttccctaatggcacactggctccctccatacccatctggggcggcagctggcgagccccaggctgggacccactgtgttgggacgaatgtcgggggtcctgcccaacgtgccctgaggaccggttggagcagtacgaggggcctggcttctgcggacccctggcatctggcacagggggccccttcaccacctgccatgctcatgtgccacctgagagcttcttcaagggctgtgttctggacgtctgcatgggtggtggggaccatgacattctttgcaaggctctggcttcctacgtggccgcctgccaggccgctggggttgtcatcgaagactggcgggcacaggttggctgtgagatcacctgcccagaaaacagccactatgaggtctgtggcccaccctgcccggccagctgtccgtcccctgcaccccttacgacgccagccgtatgtgagggcccctgtgtggagggctgccagtgcgacgcgggtttcgtgttaagtgctgaccgctgtgttcccctcaacaacggctgcggctgctgggccaatggcacctaccacgaggcgggcagtgagttttgggctgatggcacctgctcccagtggtgtcgctgcgggcctgggggtggctcgctggtctgcacacctgccagctgtgggctgggtgaagtgtgtggcctcctgccatccggccagcacggctgccagcccgtcagcacagctgagtgccaggcgtggggtgacccccattacgtcactctggatgggcaccgattcgatttccaaggcacctgcgagtacctgctgagtgcaccctgccacggaccacccttgggggctgagaacttcactgtcactgtagccaatgagcaccggggcagccaggctgtcagctacacccgcagtgtcaccctgcaaatctacaaccacagcctgacactgagtgcccgctggccccggaagctacaggtcgacggcgtgttcgtggctctgcctttccagctggactcgctcctgcacgcacacctgagcggcgccgacgtggtggtgaccacaacctcagggctctcgctggctttcgatggggacagcttcgtgcgcctgcgcgtgccggcggcgtacgcggcctctctctgtggcttatgcgggaactacaaccaggaccccgcagacgacctcaaggctgtgggcgggaagcccgctggatggcaggtgggcggggcccagggctgcggggaatgtgtgtccaagccatgcccgtcgccgtgcaccccagagcagcaggagtccttcggcggcccggacgcctgcggcgtgatctccgccaccgacggcccgctggcaccctgccacggccttgtgccgcccgcgcagtacttccagggctgcttgctggacgcctgccaagttcagggccatcctggaggcctctgtcctgcagtggctacctacgtggcagcctgtcaggccgctggggcccagctcggcgagtggaggcggccggacttctgtcccttgcagtgccctgcccacagccactatgagctctgcggtgactcctgccctgtgagctgcccgagcctctcagcacccgagggctgtgagtcggcctgccgtgaaggctgtgtctgcgatgctggcttcgtactcagtggtgacacctgcgtacccgtgggccagtgtggctgcctccatgatggccgctactacccactgggcgaggtcttctacccgggccctgagtgtgagcgacgctgtgagtgtgggccaggtggccatgtcacctgccaggagggcgcagcctgtgggccccatgaggagtgccggttagaggatggtgtccaggcctgtcatgccacaggctgtggccgctgcctggccaacgggggcatccactacatcacccttgatggccgtgtctacgacctgcatggctcctgctcctatgtcttggcccaagtctgccacccaaagcctggggacgaggacttttccatcgtgcttgagaagaatgcagctggacatctccaacgcctcctggttactgtggctggccaggttgtgagcctagctcaggggcagcaggtcaccgtggacggcgaggctgtggccctgcctgtggctgtgggccgcgtgcgggtgaccgccgagggccgaaacatggttctgcagacgaccaaggggctgcggcttctctttgatggcgatgcccacctcctcatgtccatccccagccccttccgtggacggctctgtggcctctgtgggaacttcaatggcaactggagtgacgactttgtcctgcccaatggctcagcagcgtccagtgtggagaccttcggggctgcatggcgggtgcccggctcctccaagggctgtggcgagggctgcgggccccaaggctgcccagtgtgcttggcagaggagactgcaccctatgagagcaacgaggcctgcgggcagctccggaacccccagggccccttcgcgacctgccaggcggtgctgagtccctctgagtacttccgccaatgcgtatacgacctgtgcgcgcaaaagggtgacaaagccttcctgtgccgcagcctggcagcctacacggcggcctgtcaggcagctggcgtggccgtgaagccctggaggacagacagcttctgcccgctccattgccccgcccacagccactactccatctgcactcgcacctgccagggatcctgtgcggctctctccggcctcacgggctgcaccacccgctgttttgagggctgtgagtgcgacgaccgcttcctgctttcccagggtgtctgcatccctgtccaagattgtggctgcacccataatggccgatacttgccggtaaactcctccctgctgacctcagactgcagcgagcgctgttcctgttcctcaagctctggcctgacatgccaggcagctggctgcccaccaggccgtgtatgtgaggtcaaggctgaagcccggaactgctgggccacccgtggtctctgtgtcctgtctgtgggtgccaacctcaccacctttgatggggcccgtggtgccaccacctctcctggtgtctatgagctctcttcccgctgcccaggactacagaataccatcccctggtaccgtgtagttgccgaagtccagatctgccatggcaaaacggaggctgtgggccaggtccacatcttcttccaggatgggatggtgacgttgactccaaacaagggtgtgtgggtgaatggtctccgagtggatctcccagctgagaagttagcatctgtgtccgtgagtcgtacacctgatggctccctgctagtccgccagaaggcaggggtccaggtgtggcttggagccaatgggaaggtggctgtgattgtcagcaatgaccatgctgggaaactgtgtggggcctgtggaaactttgacggggaccagaccaatgattggcatgactcccaggagaagccagcgatggagaaatggagagcgcaggacttctccccatgttatggctgatcagtcatccaccaggaacgaagatttcctgaagaagacctggtccctctggaggttgcagtggctgaaggatgcatcatgtgctcctaccctgctctaccgcttttctgggtcacagaggccaaatgtgagagcattgaataaatatcttaagctaagctgca

SEQ ID NO: 433529 - DNA, 1488 bp, Homo sapiens
ccgcccggtcttgcgcgcaaaagggtgacaaagccttcctgtgccgcagcctggcagcctacacggcggcctgtcaggcagctggagtgacgactttgtcctgcccaatggctcagcagcgtccagtgtggagaccttcggggctgcatggcgggtgcccggctcctccaagggctgtggcgagggctgcgggccccaaggctgcccagtgtgcttggcagaggagactgcaccctatgagagcaacgaggcctgcgggcagctccggaacccccagggccccttcgcgacctgccaggcggtgctgagtccctctgagtacttccgccaatgcgtatacgacctgtgcgcgcaaaagggtgacaaagccttcctgtgccgcagcctggcagcctacacggcggcctgtcaggcagctggcgtggccgtgaagccctggaggacagacagcttctgcccgctccattgccccgcccacagccactactccatctgcactcgcacctgccagggatcctgtgcggctctctccggcctcacgggctgcaccacccgctgttttgagggctgtgagtgcgacgaccgcttcctgctttcccagggtgtctgcatccctgtccaagattgtggctgcacccataatggccgatacttgccggtaaactcctccctgctgacctcagactgcagcgagcgctgttcctgttcctcaagctctggcctgacatgccaggcagctggctgcccaccaggccgtgtatgtgaggtcaaggctgaagcccggaactgctgggccacccgtggtctctgtgtcctgtctgtgggtgccaacctcaccacctttgatggggcccgtggtgccaccacctctcctggtgtctatgagctctcttcccgctgcccaggactacagaataccatcccctggtaccgtgtagttgccgaagtccagatctgccatggcaaaacggaggctgtgggccaggtccacatcttcttccaggatgggatggtgacgttgactccaaacaagggtgtgtgggtgaatggtctccgagtggatctcccagctgagaagttagcatctgtgtccgtgagtcgtacacctgatggctccctgctagtccgccagaaggcaggggtccaggtgtggcttggagccaatgggaaggtggctgtgattgtcagcaatgaccatgctgggaaactgtgtggggcctgtggaaactttgacggggaccagaccaatgattggcatgactcccaggagaagccagcgatggagaaatggagagcgcaggacttctccccatgttatggctgatcagtcatccaccaggaacgaagatttcctgaagaagacctggtccctctggaggttgcagtggctgaaggatgcatcatgtgctcctaccctgctctaccgcttttctgggtcacagaggccaaatgtgagagcattgaataaatatcttaagctaagctgca

SEQ ID NO: 433530 - DNA, 949 bp, Homo sapiens
catgttgatctagaggatcccgttttggagcttcgtgcgacgaccgcttcctgctttcccagggtgtctgcatccctgtccaagattgtggctgcacccataatggccgatacttgccggtaaactcctccctgctgacctcagactgcagcgagcgctgttcctgttcctcaagctctggcctgacatgccaggcagctggctgcccaccaggccgtgtatgtgaggtcaaggctgaagcccggaactgctgggccacccgtggtctctgtgtcctgtctgtgggtgccaacctcaccacctttgatggggcccgtggtgccaccacctctcctggtgtctatgagctctcttcccgctgcccaggactacagaataccatcccctggtaccgtgtagttgccgaagtccagatctgccatggcaaaacggaggctgtgggccaggtccacatcttcttccaggatgggatggtgacgttgactccaaacaagggtgtgtgggtgaatggtctccgagtggatctcccagctgagaagttagcatctgtgtccgtgagtcgtacacctgatggctccctgctagtccgccagaaggcaggggtccaggtgtggcttggagccaatgggaaggtggctgtgattgtcagcaatgaccatgctgggaaactgtgtggggcctgtggaaactttgacggggaccagaccaatgattggcatgactcccaggagaagccagcgatggagaaatggagagcgcaggacttctccccatgttatggctgatcagtcatccaccaggaacgaagatttcctgaagaagacctggtccctctggaggttgcagtggctgaaggatgcatcatgtgctcctaccctgctctaccgcttttctgggtcacagaggccaaatgtgagagcattgaataaatatcttaagctaagctgca

SEQ ID NO: 433531 - DNA, 893 bp, Homo sapiens
  misc_feature (20)..(20): n is a, c, g, or t
  misc_feature (27)..(27): n is a, c, g, or t
  misc_feature (37)..(37): n is a, c, g, or t
  misc_feature (39)..(39): n is a, c, g, or t
  misc_feature (51)..(51): n is a, c, g, or t
  misc_feature (65)..(65): n is a, c, g, or t
cactacggtgtgtaagacgnggaccanaccaatgatngncatgactcccangagaagccagcganggagaaatggagagcgcaggacttctgtcccttgcagtgccctgcccacagccactatgagctctgcggtgactcctgccctgtgagctgcccgagcctctcagcacccgagggctgtgagtcggcctgccgtgaaggctgtgtctgcgatgctggcttcgtactcagtggtgacaccacctttgatggggcccgtggtgccaccacctctcctggtgtctatgagctctcttcccgctgcccaggactacagaataccatcccctggtaccgtgtagttgccgaagtccagatctgccatggcaaaacggaggctgtgggccaggtccacatcttcttccaggatgggatggtgacgttgactccaaacaagggtgtgtgggtgaatggtctccgagtggatctcccagctgagaagttagcatctgtgtccgtgagtcgtacacctgatggctccctgctagtccgccagaaggcaggggtccaggtgtggcttggagccaatgggaaggtggctgtgattgtcagcaatgaccatgctgggaaactgtgtggggcctgtggaaactttgacggggaccagaccaatgattggcatgactcccaggagaagccagcgatggagaaatggagagcgcaggacttctccccatgttatggctgatcagtcatccaccaggaacgaagatttcctgaagaagacctggtccctctggaggttgcagtggctgaaggatgcatcatgtgctcctaccctgctctaccgcttttctgggtcacagaggccaaatgtgagagcattgaataaatatcttaagctaagctgca

SEQ ID NO: 433532 - DNA, 16422 bp, Homo sapiens
ctgcagccatgggtgccctatggagctggtggatactctgggctggagcaaccctcctgtggggattgacccaggaggcttcagtggacctcaagaacactggcagagaggaattcctcacagccttcctgcagaactatcagctggcctacagcaaggcctacccccgcctccttatctccagtctgtcagagagccccgcttcagtctccatcctcagccaggcagacaacacctcaaagaaggtcacagtgaggcccggggagtcggtcatggtcaacatcagtgccaaggctgagatgataggcagcaagatcttccagcatgcggtggtgatccattctgactatgccatctctgtgcaggcactaaatgccaagcctgacacagcggagctgacactgctgcggcccatccaggccctaggcaccgagtattttgtgctcacaccccccggcacctcagccaggaatgtcaaggagtttgccgtggtggccggtgccgcaggtgcctcggtcagtgtcacgctgaaggggtcagtgacattcaatggcaagttctatccagcaggcgatgtcctaagagtgactctacagccctacaatgtggcccagctacagagctcagtggatctctcggggtcaaaggtcacagctagtagccccgtggctgtcctctctggccacagctgtgcgcagaaacatacgacctgcaaccatgtggttgagcagctgctacccacgtctgcctggggcacccactatgtagtacccacgctggcctcccaatctcgctatgatttggccttcgttgtggccagccaggccacaaagctgacctacaaccatgggggtatcactggctcccgtgggctccaggcaggtgatgtggtagagtttgaggtccggccatcctggccactctacctgtctgcaaatgtgggcatccaggtcctgttgtttggcacaggtgccataaggaatgaagtgacttatgacccctacctggtcctgatcccagatgtggcggcctactgcccagcctatgtggtcaagagtgtaccaggctgtgagggcgtggccctggtagtggcacagacgaaggctatcagcgggctgaccatagatgggcatgcagtgggggccaagctcacctgggaggctgtgccaggcagtgagttctcgtatgctgaagtggagctcggcacagctgacatgatccacacggccgaggccaccaccaacttgggactgctcaccttcgggctggccaaggctataggctacgcaacagctgctgattgcggccggactgtactgtccccagtggagccctcctgcgaaggcatgcagtgcgcagccgggcagcgctgccaggtggtaggcgggaaggccgggtgtgtggcggagtccaccgctgtctgccgcgcccagggcgacccccattacaccaccttcgacggccgtcgctacgacatgatgggcacctgttcgtacacgatggtggagctgtgcagcgaggacgacaccctgcccgccttcagcgtggaggccaagaacgagcaccggggcagccgccgcgtctcctacgtgggcctcgtcactgtgcgcgcctacagccactctgtgtcgctgacccgcggtgaagttggcttcgtcctggttgacaaccagcgctcgcgcctgccagtctccctgagtgagggtcgcctgcgtgtgtaccagagcggaccacgggccgtggtggagctggtctttgggctggtggtcacttatgactgggactgccagctggcactcagcctgcctgcacgcttccaagaccaggtgtgcgggctgtgtggcaactataatggtgacccagcagacgacttcctcacgcctgacggggctctggctcctgacgctgtggagttcgcaagtagctggaagctggatgatggggactacctgtgtgaggatggctgccagaacaactgtcccgcctgcaccccaggccaggcccaacactatgagggcgaccgactctgtggcatgctgaccaagctcgatggccccttcgctgtctgccatgacaccctggaccccaggcccttcctggagcagtgtgtatatgacctgtgtgtggtcggtggggagcggctcagcctgtgccgtggcctcagcgcctatgcccaggcctgtctggagcttggcatctcggttggggactggagatcaccagccaactgccccctgtcctgccctgccaacagccgctatgagctctgcggccctgcttgcccgacctcctgcaacggggctgcggcgccgtccaactgctccgggcgcccctgcgtggagggctgcgtgtgcctcccaggcttcgtggccagcggcggcgcctgcgtgccggcctcgtcgtgtggctgcaccttccagggtctccagctcgctccgggccaggaagtgtgggcggacgagttgtgccaaaggcgctgcacctgcaacggcgccacccatcaggtcacctgccgcgacaagcagagctgcccggcgggtgagcgctgcagcgtccagaacggcctcctgggctgctaccccgatcgcttcgggacctgccaggggtccggggacccacactatgtgagcttcgacggccggcgcttcgacttcatgggcacctgcacgtacctgctggtcggctcatgcggccagaacgcagcgctgcctgccttccgggtgctggtggaaaacgagcatcggggcagccagactgtgagctacacgcgcgccgtgcgggtggaggcccgcggggtgaaggtggccgtgcgccgggagtaccccgggcaagtgctggtggatgacgtccttcagtatctgcccttccaagcagcagatgggcaggtgcaggtgttccgacagggcagggatgccgtcgtgcgcacggactttggcctgactgtcacttatgactggaatgcacgagtgactgccaaggtgcccagcagctatgctgaggccctgtgtggactctgtgggaacttcaacggggacccagctgatgacctggctctgcggggtgggggtcaagctgccaatgcactggcctttgggaacagctggcaagaagagacgaggcccggctgtggagcaactgaaccgggtgactgtcccaagctggactccctggtggcccagcagctgcagagcaagaatgagtgtggaatccttgccgaccccaaggggcccttccgggagtgccatagcaagctggacccccagggtgccgtgcgcgactgtgtctatgaccgctgcctgctgccaggccagtctgggccactgtgtgacgcactggccacctatgctgctgcatgccaggctgctggagccacagtgcacccctggaggagtgaagaactttgcccactgagctgcccaccccacagccactatgaggcgtgttcctacggctgcccgctgtcctgtggagacctcccagtgcccgggggctgtggctcagaatgccatgagggctgcgtgtgcgatgagggctttgcgctcagtggtgagtcctgcctgcccctggcctcctgtggctgcgtacaccagggcacctaccacccaccaggccagaccttctaccctggccccggatgtgattccctttgccactgccaggagggcggcctggtgtcctgtgagtcctccagctgcggaccgcacgaggcctgccagccatccggtggcagcttgggctgtgtggccgtgggctctagcacctgccaggcgtcaggagacccccactacaccaccttcgatggccgccgcttcgacttcatgggcacctgcgtgtatgtgctggctcagacctgcggcacccggcctggcctgcatcggtttgccgtcctgcaggagaacgtggcctggggtaatgggcgagtcagtgtgaccagggtgatcacggtccaggtggcaaacttcaccctgcggctggagcagagacagtggaaggtcacggtgaacggtgtggacatgaagctgcccgtggtgctggccaacggccagatccgtgcctcccagcatggttcagatgttgtgattgagaccgacttcggcctgcgtgtggcctacgaccttgtgtactatgtgcgggtcaccgtccccggaaactactaccagcagatgtgtggcctgtgtgggaactacaacggcgaccccaaggatgacttccagaagcccaatggctcacaggcaggcaacgccaatgagttcggcaactcctgggaggaggtggtgcccgactctccctgcctgccgcccaccccttgcccgccggggagcgaggactgtatccccagccacaagtgtcctcccgagctggagaagaagtatcagaaggaggagttctgtgggctcctctccagccccacagggccactgtcctcctgccacaagctggtggatccccagggtcccttgaaagattgcatctttgatctctgcctgggtggtgggaacctgagcattctctgcagcaacatccatgcctacgtgagtgcttgccaggcggctggaggccacgtggagccctggaggactgaaactttctgtcccatggagtgccctccgaacagtcactacgagctctgtgcggacacctgctccctgggctgctcagctctcagtgcccctccacagtgccaggatgggtgtgctgagggctgccagtgtgactccggcttcctctacaatggccaagcctgcgtgcccatccagcaatgcggctgctaccacaatggtgtctactatgagccggagcagacagtcctcattgacaactgtcggcagcagtgcacgtgccatgcgggtaaaggcatggtgtgccaggaacacagctgcaagccggggcaggtgtgccagccctccggaggcatcctgagctgcgtcaccaaagacccgtgccacggcgtgacatgccggccacaggagacatgcaaggagcagggtggccagggcgtgtgcctgcccaactatgaggccacgtgctggctgtggggcgacccacactaccactccttcgatggccggaagtttgacttccagggcacctgtaactatgtgctggcaacaactggctgcccgggggtcagcacccagggcctgacacccttcaccgtcaccaccaagaaccagaaccggggcaaccctgctgtgtcctacgtgagagtcgtcaccgtggctgccctcggcaccaacatctccatccacaaggacgagatcggcaaagtccgggtgaacggtgtgctcacagccttgcctgtctctgtggccgacgggcggatttcagtgacccagggtgcatcgaaggcactgctggtggctgactttggactgcaagtcagctatgactggaactggcgggtagacgtgacgctgcccagcagctatcatggcgcagtgtgcgggctctgcggtaacatggaccgcaaccccaacaatgaccaggtcttccctaatggcacactggctccctccatacccatctggggcggcagctggcgagccccaggctgggacccactgtgttgggacgaatgtcgggggtcctgcccaacgtgccctgaggaccggttggagcagtacgagggccctggcttctgcggacccctggcccccggcacagggggccctttcaccacctgccatgctcatgtgccacctgagagcttcttcaagggctgtgttctggacgtctgcatgggtggtggggaccgtgacattctttgcaaggctctggcttcctatgtggccgcctgccaggctgctggggttgtcatcgaagactggcgggcacaggttggctgtgagatcacctgcccagaaaacagccactatgaggtctgtggcccaccctgcccggccagctgtccgtcccctgcaccccttacgacgccagccgtatgtgagggcccctgtgtggagggctgccagtgcgacgcgggtttcgtgttaagtgctgaccgctgtgttcccctcaacaacggctgcggctgctgggccaatggcacctaccacgaggcgggcagtgagttttgggctgatggcacctgctcccagtggtgtcgctgcgggcctgggggtggctcgctggtctgcacacctgccagctgtgggctgggtgaagtgtgtggcctcctgccatccggccagcacggctgccagcccgtcagcacagctgagtgccaggcgtggggtgacccccattacgtcactctggatgggcaccgattcaatttccaaggcacctgcgagtacctgctgagtgcaccctgccacggaccacccttgggggctgagaacttcactgtcactgtagccaatgagcaccggggcagccaggctgtcagctacacccgcagtgtcaccctgcaaatctacaaccacagcctgacactgagtgcccgctggccccggaagctacaggtggacggcgtgttcgtcactctgcccttccagctggactcgctcctgcacgcacacctgagcggcgccgacgtggtggtgaccacaacctcagggctctcgctggctttcgacggggacagcttcgtgcgcctgcgcgtgccggcggcgtacgcgggctctctctgtggcttatgcgggaactacaaccaggaccccgcagacgacctgaaggcggtgggcgggaagcccgccggatggcaggtgggcggcgcccagggctgcggggaatgtgtgtccaagccatgcccgtcgccgtgcaccccagagcagcaagagtccttcggcggcccggacgcctgcggcgtgatctccgccaccgacggcccgctggcgccctgccacggccttgtgccgcccgcgcagtacttccagggctgcttgctggacgcctgccaagttcagggccatcctggaggcctctgtcctgcagtggccacctacgtggcagcctgtcaggccgctggggcccagctccgcgagtggaggcggccggacttctgtcccttccagtgccctgcccacagccactacgagctctgcggtgactcctgtcctgggagctgcccgagcctgtcggcacccgagggctgtgagtcggcctgccgtgaaggctgtgtctgcgatgctggcttcgtgctcagtggtgacacgtgtgtacctgtgggccagtgtggctgcctccacgatgaccgctactacccactgggccagaccttctaccctggccctgggtgtgattccctttgccgctgccgggagggcggtgaggtgtcctgtgagccctccagctgcggcccgcatgagacctgccggccatccggtggcagcttgggctgcgtggccgtgggctctaccacctgccaggcgtcgggagatccccactacaccaccttcgatggccgccgcttcgacttcatgggcacctgcgtgtatgtgctggctcagacctgcggcacccggcctggcctacatcggtttgccgtcctgcaggagaacgtggcctggggtaatgggcgagtcagtgtgaccagggtgatcacggtccaggtggcaaacttcaccctgcggctggagcagagacagtggaaggtcacggtgaacggtgtggacatgaagctgcccgtggtgctggccaacggccagatccgtgcctcccagcatggttcagatgttgtgattgagaccgacttcggcctgcgtgtggcctacgaccttgtgtactatgtgcgggtcaccgtccctggaaactactaccagctgatgtgtggcctgtgtgggaactacaacggcgaccccaaggatgacttccagaagcccaatggctcgcaggcaggcaacgccaatgagttcggcaactcctgggaggaggtggtgcccgactctccctgcctgccgccgcccacctgcccgccggggagcgagggctgtatccccagcgaggagtgtcctcccgagctggagaagaagtatcagaaggaggagttctgtgggctcctctccagccccacagggccactgtcctcctgccacaagctggtggatccccagggtcccttgaaagattgcatctttgatctctgcctgggtggtgggaacctgagcattctctgcagcaacatccatgcctacgtgagtgcttgccaggcggctggaggccacgtggagccctggaggaatgaaactttctgtcccatggaatgccctcagaacagtcactacgagctctgtgcggacacctgctccctgggctgctcggctctcagtgcccctctgcagtgcccagatgggtgtgctgagggctgccagtgtgactccggcttcctctacaacggccaagcctgcgtgcccatccagcaatgtggctgctaccacaatggtgcctactatgagccggagcagacagtcctcattgacaactgtcggcagcagtgcacgtgccatgcgggtaaagtcgtggtgtgccaggaacacagctgcaagccggggcaggtgtgccagccctccggaggcatcctgagctgcgtcaccaaagacccgtgccacggcgtgacatgccggccacaggagacatgcaaggagcagggtggccagggtgtgtgcctgcccaactatgaggccacgtgctggctgtggggcgacccacactaccactccttcgatggccggaagtttgacttccagggcacctgtaactatgtgctggcaacaactggctgcccgggggtcagcacccagggcctgacacccttcaccgtcaccaccaagaaccagaaccggggcaaccctgctgtatcctacgtgagagtcgtcaccgtggctgccctcggcaccaacatctccatccacaaggacgagatcggcaaagtccgggtgaacggtgtgctcacagccttgcctgtctccgtggccgacgggcggatttcagtggcccagggtgcatcgaaggcactgctggtggctgactttggactgcaagtcagctatgactggaactggcgggtagacgtgacgctccccagcagctatcatggcgcagtgtgcgggctctgcggtaacatggaccgcaaccccaacaatgaccaggtcttccctaatggcacactggctccctccatacccatctggggcggcagctggcgagccccaggctgggacccactgtgttgggacgaatgtcgggggtcctgcccaacgtgccctgaggaccggttggagcagtacgagggccctggcttctgcggacccctggcccccggcacagggggccctttcaccacctgccatgctcatgtgccacctgagagcttcttcaagggctgtgttctggacgtctgcatgggtggtggggaccatgacattctttgcaaggctctggcttcctacgtggccgcctgccaggccgctggggttgtcatcgaagactggcgggcacaggttggctgtgagatcacctgcccagaaaacagccactatgaggtctgtggcccaccctgcccggccagctgtccgtcccctgcaccccttacgacgccagccgtatgtgagggcccctgtgtggagggctgccagtgcgacgcgggtttcgtgttaagtgctgaccgctgtgttcccctcaacaacggctgcggctgctgggccaatggcacctaccacgaggcgggcagtgagttttgggctgatggcacctgctcccagtggtgtcgctgcgggcctgggggtggctcgctggtctgcacacctgccagctgtgggctgggtgaagtgtgtggcctcctgccatccggccagcacggctgccagcccgtcagcacagctgagtgccaggcgtggggtgacccccattacgtcactctggatgggcaccgattcgatttccaaggcacctgcgagtacctgctgagtgcaccctgccacggaccacccttgggggctgagaacttcactgtcactgtagccaatgagcaccggggcagccaggctgtcagctacacccgcagtgtcaccctgcaaatctacaaccacagcctgacactgagtgcccgctggccccggaagctacaggtggacggcgtgttcgtcactctgcccttccagctggactcgctcctgcacgcacacctgagcggcgccgacgtggtggtgaccacaacctcagggctctcgctggctttcgacggggacagcttcgtgcgcctgcgcgtgccggcggcgtacgcgggctctctctgtggcttatgcgggaactacaaccaggaccccgcagacgacctgaaggcggtgggcgggaagcccgccggatggcaggtgggcggcgcccagggctgcggggaatgtgtgtccaagccatgcccgtcgccgtgcaccccagagcagcaagagtccttcggcggcccggacgcctgcggcgtgatctccgccaccgacggcccgctggcgccctgccacggccttgtgccgcccgcgcagtacttccagggctgcttgctggacgcctgccaagttcagggccatcctggaggcctctgtcctgcagtggccacctacgtggcagcctgtcaggccgctggggcccagctccgcgagtggaggcggccggacttctgtcccttccagtgccctgcccacagccactacgagctctgcggtgactcctgtcctgggagctgcccgagcctgtcggcacccgagggctgtgagtcggcctgccgtgaaggctgtgtctgcgatgctggcttcgtgctcagtggtgacacgtgtgtacctgtgggccagtgtggctgcctccacgatgaccgctactacccactgggccagaccttctaccctggccctgggtgtgattccctttgccgctgccgggagggcggtgaggtgtcctgtgagccctccagctgcggcccgcatgagacctgccggccatccggtggcagcttgggctgcgtggccgtgggctctaccacctgccaggcgtcgggagatccccactacaccaccttcgatggccgccgcttcgacttcatgggcacctgcgtgtatgtgctggctcagacctgcggcacccggcctggcctacatcggtttgccgtcctgcaggagaacgtggcctggggtaatgggcgagtcagtgtgaccagggtgatcacggtccaggtggcaaacttcaccctgcggctggagcagagacagtggaaggtcacggtgaacggtgtggacatgaagctgcccgtggtgctggccaacggccagatccgtgcctcccagcatggttcagatgttgtgattgagaccgacttcggcctgcgtgtggcctacgaccttgtgtactatgtgcgggtcaccgtccctggaaactactaccagctgatgtgtggcctgtgtgggaactacaacggcgaccccaaggatgacttccagaagcccaatggctcgcaggcaggcaacgccaatgagttcggcaactcctgggaggaggtggtgcccgactctccctgcctgccgccgcccacctgcccgccggggagcgagggctgtatccccagcgaggagtgtcctcccgagctggagaagaagtatcagaaggaggagttctgtgggctcctctccagccccacagggccactgtcctcctgccacaagctggtggatccccagggtcccttgaaagattgcatctttgatctctgcctgggtggtgggaacctgagcattctctgcagcaacatccatgcctacgtgagtgcttgccaggcggctggaggccacgtggagccctggaggaatgaaactttctgtcccatggaatgccctcagaacagtcactacgagctctgtgcggacacctgctccctgggctgctcggctctcagtgcccctctgcagtgcccagatgggtgtgctgagggctgccagtgtgactccggcttcctctacaacggccaagcctgcgtgcccatccagcaatgtggctgctaccacaatggtgtctactatgagccggagcagacagtcctcattgacaactgtcggcagcagtgcacgtgccatgtgggtaaagtcgtggtgtgccaggaacacagctgcaagccggggcaggtgtgccagccctccggaggcatcctgagctgcgtcaacaaagacccgtgccacggcgtgacatgccggccacaggagacatgcaaggagcagggtggccagggtgtgtgcctgcccaactatgaggccacgtgctggctgtggggcgacccacactaccactccttcgatggccggaagtttgacttccagggcacctgtaactatgtgctggcaacaactggctgcccgggggtcagcacccagggcctgacacccttcaccgtcaccaccaagaaccagaaccggggcaaccctgctgtatcctacgtgagagtcgtcaccgtggctgccctcggcaccaacatctccatccacaaggacgagatcggcaaagtccgggtgaacggtgtgctcacagccttgcctgtctccgtggccgacgggcggatttcagtggcccagggtgcatcgaaggcactgctggtggctgactttggactgcaagtcagctatgactggaactggcgggtagacgtgacgctccccagcagctatcatggcgcagtgtgcgggctctgcggtaacatggaccgcaaccccaacaatgaccaggtcttccctaatggcacactggctccctccatacccatctggggcggcagctggcgagccccaggctgggacccactgtgttgggacgaatgtcgggggtcctgcccaacgtgccctgaggaccggttggagcagtacgaggggcctggcttctgcggacccctggcatctggcacagggggccccttcaccacctgccatgctcatgtgccacctgagagcttcttcaagggctgtgttctggacgtctgcatgggtggtggggaccatgacattctttgcaaggctctggcttcctacgtggccgcctgccaggccgctggggttgtcatcgaagactggcgggcacaggttggctgtgagatcacctgcccagaaaacagccactatgaggtctgtggcccaccctgcccggccagctgtccgtcccctgcaccccttacgacgccagccgtatgtgagggcccctgtgtggagggctgccagtgcgacgcgggtttcgtgttaagtgctgaccgctgtgttcccctcaacaacggctgcggctgctgggccaatggcacctaccacgaggcgggcagtgagttttgggctgatggcacctgctcccagtggtgtcgctgcgggcctgggggtggctcgctggtctgcacacctgccagctgtgggctgggtgaagtgtgtggcctcctgccatccggccagcacggctgccagcccgtcagcacagctgagtgccaggcgtggggtgacccccattacgtcactctggatgggcaccgattcgatttccaaggcacctgcgagtacctgctgagtgcaccctgccacggaccacccttgggggctgagaacttcactgtcactgtagccaatgagcaccggggcagccaggctgtcagctacacccgcagtgtcaccctgcaaatctacaaccacagcctgacactgagtgcccgctggccccggaagctacaggtcgacggcgtgttcgtggctctgcctttccagctggactcgctcctgcacgcacacctgagcggcgccgacgtggtggtgaccacaacctcagggctctcgctggctttcgatggggacagcttcgtgcgcctgcgcgtgccggcggcgtacgcggcctctctctgtggcttatgcgggaactacaaccaggaccccgcagacgacctcaaggctgtgggcgggaagcccgctggatggcaggtgggcggggcccagggctgcggggaatgtgtgtccaagccatgcccgtcgccgtgcaccccagagcagcaggagtccttcggcggcccggacgcctgcggcgtgatctccgccaccgacggcccgctggcaccctgccacggccttgtgccgcccgcgcagtacttccagggctgcttgctggacgcctgccaagttcagggccatcctggaggcctctgtcctgcagtggctacctacgtggcagcctgtcaggccgctggggcccagctcggcgagtggaggcggccggacttctgtcccttgcagtgccctgcccacagccactatgagctctgcggtgactcctgccctgtgagctgcccgagcctctcagcacccgagggctgtgagtcggcctgccgtgaaggctgtgtctgcgatgctggcttcgtactcagtggtgacacctgcgtacccgtgggccagtgtggctgcctccatgatggccgctactacccactgggcgaggtcttctacccgggccctgagtgtgagcgacgctgtgagtgtgggccaggtggccatgtcacctgccaggagggcgcagcctgtgggccccatgaggagtgccggttagaggatggtgtccaggcctgtcatgccacaggctgtggccgctgcctggccaacgggggcatccactacatcacccttgatggccgtgtctacgacctgcatggctcctgctcctatgtcttggcccaagtctgccacccaaagcctggggacgaggacttttccatcgtgcttgagaagaatgcagctggacatctccaacgcctcctggttactgtggctggccaggttgtgagcctagctcaggggcagcaggtcaccgtggacggcgaggctgtggccctgcctgtggctgtgggccgcgtgcgggtgaccgccgagggccgaaacatggttctgcagacgaccaaggggctgcggcttctctttgatggcgatgcccacctcctcatgtccatccccagccccttccgtggacggctctgtggcctctgtgggaacttcaatggcaactggagtgacgactttgtcctgcccaatggctcagcagcgtccagtgtggagaccttcggggctgcatggcgggtgcccggctcctccaagggctgtggcgagggctgcgggccccaaggctgcccagtgtgcttggcagaggagactgcaccctatgagagcaacgaggcctgcgggcagctccggaacccccagggccccttcgcgacctgccaggcggtgctgagtccctctgagtacttccgccaatgcgtatacgacctgtgcgcgcaaaagggtgacaaagccttcctgtgccgcagcctggcagcctacacggcggcctgtcaggcagctggcgtggccgtgaagccctggaggacagacagcttctgcccgctccattgccccgcccacagccactactccatctgcactcgcacctgccagggatcctgtgcggctctctccggcctcacgggctgcaccacccgctgttttgagggctgtgagtgcgacgaccgcttcctgctttcccagggtgtctgcatccctgtccaagattgtggctgcacccataatggccgatacttgccggtaaactcctccctgctgacctcagactgcagcgagcgctgttcctgttcctcaagctctggcctgacatgccaggcagctggctgcccaccaggccgtgtatgtgaggtcaaggctgaagcccggaactgctgggccacccgtggtctctgtgtcctgtctgtgggtgccaacctcaccacctttgatggggcccgtggtgccaccacctctcctggtgtctatgagctctcttcccgctgcccaggactacagaataccatcccctggtaccgtgtagttgccgaagtccagatctgccatggcaaaacggaggctgtgggccaggtccacatcttcttccaggatgggatggtgacgttgactccaaacaagggtgtgtgggtgaatggtctccgagtggatctcccagctgagaagttagcatctgtgtccgtgagtcgtacacctgatggctccctgctagtccgccagaaggcaggggtccaggtgtggcttggagccaatgggaaggtggctgtgattgtcagcaatgaccatgctgggaaactgtgtggggcctgtggaaactttgacggggaccagaccaatgattggcatgactcccaggagaagccagcgatggagaaatggagagcgcaggacttctccccatgttatggctgatcagtcatccaccaggaacgaagatttcctgaagaagacctggtccctctggaggttgcagtggctgaaggatgcatcatgtgctcctaccctgctctaccgcttttctgggtcacagaggccaaatgtgagagcattgaataaatatcttaagctaagctgcaaaaaaaaaaaaataatcacaaaacaaccacaa

SEQ ID NO: 433533 - DNA, 16163 bp, Homo sapiens
ctgcagccatgggtgccctatggagctggtggatactctgggctggagcaaccctcctgtggggattgacccaggaggcttcagtggacctcaagaacactggcagagaggaattcctcacagccttcctgcagaactatcagctggcctacagcaaggcctacccccgcctccttatctccagtctgtcagagagccccgcttcagtctccatcctcagccaggcagacaacacctcaaagaaggtcacagtgaggcccggggagtcggtcatggtcaacatcagtgccaaggctgagatgataggcagcaagatcttccagcatgcggtggtgatccattctgactatgccatctctgtgcaggcactaaatgccaagcctgacacagcggagctgacactgctgcggcccatccaggccctaggcaccgagtattttgtgctcacaccccccggcacctcagccaggaatgtcaaggagtttgccgtggtggccggtgccgcaggtgcctcggtcagtgtcacgctgaaggggtcagtgacattcaatggcaagttctatccagcaggcgatgtcctaagagtgactctacagccctacaatgtggcccagctacagagctcagtggatctctcggggtcaaaggtcacagctagtagccccgtggctgtcctctctggccacagctgtgcgcagaaacatacgacctgcaaccatgtggttgagcagctgctacccacgtctgcctggggcacccactatgtagtacccacgctggcctcccaatctcgctatgatttggccttcgttgtggccagccaggccacaaagctgacctacaaccatgggggtatcactggctcccgtgggctccaggcaggtgatgtggtagagtttgaggtccggccatcctggccactctacctgtctgcaaatgtgggcatccaggtcctgttgtttggcacaggtgccataaggaatgaagtgacttatgacccctacctggtcctgatcccagatgtggcggcctactgcccagcctatgtggtcaagagtgtaccaggctgtgagggcgtggccctggtagtggcacagacgaaggctatcagcgggctgaccatagatgggcatgcagtgggggccaagctcacctgggaggctgtgccaggcagtgagttctcgtatgctgaagtggagctcggcacagctgacatgatccacacggccgaggccaccaccaacttgggactgctcaccttcgggctggccaaggctataggctacgcaacagctgctgattgcggccggactgtactgtccccagtggagccctcctgcgaaggcatgcagtgcgcagccgggcagcgctgccaggtggtaggcgggaaggccgggtgtgtggcggagtccaccgctgtctgccgcgcccagggcgacccccattacaccaccttcgacggccgtcgctacgacatgatgggcacctgttcgtacacgatggtggagctgtgcagcgaggacgacaccctgcccgccttcagcgtggaggccaagaacgagcaccggggcagccgccgcgtctcctacgtgggcctcgtcactgtgcgcgcctacagccactctgtgtcgctgacccgcggtgaagttggcttcgtcctggttgacaaccagcgctcgcgcctgccagtctccctgagtgagggtcgcctgcgtgtgtaccagagcggaccacgggccgtggtggagctggtctttgggctggtggtcacttatgactgggactgccagctggcactcagcctgcctgcacgcttccaagaccaggtgtgcgggctgtgtggcaactataatggtgacccagcagacgacttcctcacgcctgacggggctctggctcctgacgctgtggagttcgcaagtagctggaagctggatgatggggactacctgtgtgaggatggctgccagaacaactgtcccgcctgcaccccaggccaggcccaacactatgagggcgaccgactctgtggcatgctgaccaagctcgatggccccttcgctgtctgccatgacaccctggaccccaggcccttcctggagcagtgtgtatatgacctgtgtgtggtcggtggggagcggctcagcctgtgccgtggcctcagcgcctatgcccaggcctgtctggagcttggcatctcggttggggactggagatcaccagccaactgccccctgtcctgccctgccaacagccgctatgagctctgcggccctgcttgcccgacctcctgcaacggggctgcggcgccgtccaactgctccgggcgcccctgcgtggagggctgcgtgtgcctcccaggcttcgtggccagcggcggcgcctgcgtgccggcctcgtcgtgtggctgcaccttccagggtctccagctcgctccgggccaggaagtgtgggcggacgagttgtgccaaaggcgctgcacctgcaacggcgccacccatcaggtcacctgccgcgacaagcagagctgcccggcgggtgagcgctgcagcgtccagaacggcctcctgggctgctaccccgatcgcttcgggacctgccaggggtccggggacccacactatgtgagcttcgacggccggcgcttcgacttcatgggcacctgcacgtacctgctggtcggctcatgcggccagaacgcagcgctgcctgccttccgggtgctggtggaaaacgagcatcggggcagccagactgtgagctacacgcgcgccgtgcgggtggaggcccgcggggtgaaggtggccgtgcgccgggagtaccccgggcaagtgctggtggatgacgtccttcagtatctgcccttccaagcagcagatgggcaggtgcaggtgttccgacagggcagggatgccgtcgtgcgcacggactttggcctgactgtcacttatgactggaatgcacgagtgactgccaaggtgcccagcagctatgctgaggccctgtgtggactctgtgggaacttcaacggggacccagctgatgacctggctctgcggggtgggggtcaagctgccaatgcactggcctttgggaacagctggcaagaagagacgaggcccggctgtggagcaactgaaccgggtgactgtcccaagctggactccctggtggcccagcagctgcagagcaagaatgagtgtggaatccttgccgaccccaaggggcccttccgggagtgccatagcaagctggacccccagggtgccgtgcgcgactgtgtctatgaccgctgcctgctgccaggccagtctgggccactgtgtgacgcactggccacctatgctgctgcatgccaggctgctggagccacagtgcacccctggaggagtgaagaactttgcccactgagctgcccaccccacagccactatgaggcgtgttcctacggctgcccgctgtcctgtggagacctcccagtgcccgggggctgtggctcagaatgccatgagggctgcgtgtgcgatgagggctttgcgctcagtggtgagtcctgcctgcccctggcctcctgtggctgcgtacaccagggcacctaccacccaccaggccagaccttctaccctggccccggatgtgattccctttgccactgccaggagggcggcctggtgtcctgtgagtcctccagctgcggaccgcacgaggcctgccagccatccggtggcagcttgggctgtgtggccgtgggctctagcacctgccaggcgtcaggagacccccactacaccaccttcgatggccgccgcttcgacttcatgggcacctgcgtgtatgtgctggctcagacctgcggcacccggcctggcctgcatcggtttgccgtcctgcaggagaacgtggcctggggtaatgggcgagtcagtgtgaccagggtgatcacggtccaggtggcaaacttcaccctgcggctggagcagagacagtggaaggtcacggtgaacggtgtggacatgaagctgcccgtggtgctggccaacggccagatccgtgcctcccagcatggttcagatgttgtgattgagaccgacttcggcctgcgtgtggcctacgaccttgtgtactatgtgcgggtcaccgtccccggaaactactaccagcagatgtgtggcctgtgtgggaactacaacggcgaccccaaggatgacttccagaagcccaatggctcacaggcaggcaacgccaatgagttcggcaactcctgggaggaggtggtgcccgactctccctgcctgccgcccaccccttgcccgccggggagcgaggactgtatccccagccacaagtgtcctcccgagctggagaagaagtatcagaaggaggagttctgtgggctcctctccagccccacagggccactgtcctcctgccacaagctggtggatccccagggtcccttgaaagattgcatctttgatctctgcctgggtggtgggaacctgagcattctctgcagcaacatccatgcctacgtgagtgcttgccaggcggctggaggccacgtggagccctggaggactgaaactttctgtcccatggagtgccctccgaacagtcactacgagctctgtgcggacacctgctccctgggctgctcagctctcagtgcccctccacagtgccaggatgggtgtgctgagggctgccagtgtgactccggcttcctctacaatggccaagcctgcgtgcccatccagcaatgcggctgctaccacaatggtgtctactatgagccggagcagacagtcctcattgacaactgtcggcagcagtgcacgtgccatgcgggtaaaggcatggtgtgccaggaacacagctgcaagccggggcaggtgtgccagccctccggaggcatcctgagctgcgtcaccaaagacccgtgccacggcgtgacatgccggccacaggagacatgcaaggagcagggtggccagggcgtgtgcctgcccaactatgaggccacgtgctggctgtggggcgacccacactaccactccttcgatggccggaagtttgacttccagggcacctgtaactatgtgctggcaacaactggctgcccgggggtcagcacccagggcctgacacccttcaccgtcaccaccaagaaccagaaccggggcaaccctgctgtgtcctacgtgagagtcgtcaccgtggctgccctcggcaccaacatctccatccacaaggacgagatcggcaaagtccgggtgaacggtgtgctcacagccttgcctgtctctgtggccgacgggcggatttcagtgacccagggtgcatcgaaggcactgctggtggctgactttggactgcaagtcagctatgactggaactggcgggtagacgtgacgctgcccagcagctatcatggcgcagtgtgcgggctctgcggtaacatggaccgcaaccccaacaatgaccaggtcttccctaatggcacactggctccctccatacccatctggggcggcagctggcgagccccaggctgggacccactgtgttgggacgaatgtcgggggtcctgcccaacgtgccctgaggaccggttggagcagtacgagggccctggcttctgcggacccctggcccccggcacagggggccctttcaccacctgccatgctcatgtgccacctgagagcttcttcaagggctgtgttctggacgtctgcatgggtggtggggaccgtgacattctttgcaaggctctggcttcctatgtggccgcctgccaggctgctggggttgtcatcgaagactggcgggcacaggttggctgtgagatcacctgcccagaaaacagccactatgaggtctgtggcccaccctgcccggccagctgtccgtcccctgcaccccttacgacgccagccgtatgtgagggcccctgtgtggagggctgccagtgcgacgcgggtttcgtgttaagtgctgaccgctgtgttcccctcaacaacggctgcggctgctgggccaatggcacctaccacgaggcgggcagtgagttttgggctgatggcacctgctcccagtggtgtcgctgcgggcctgggggtggctcgctggtctgcacacctgccagctgtgggctgggtgaagtgtgtggcctcctgccatccggccagcacggctgccagcccgtcagcacagctgagtgccaggcgtggggtgacccccattacgtcactctggatgggcaccgattcaatttccaaggcacctgcgagtacctgctgagtgcaccctgccacggaccacccttgggggctgagaacttcactgtcactgtagccaatgagcaccggggcagccaggctgtcagctacacccgcagtgtcaccctgcaaatctacaaccacagcctgacactgagtgcccgctggccccggaagctacaggtggacggcgtgttcgtcactctgcccttccagctggactcgctcctgcacgcacacctgagcggcgccgacgtggtggtgaccacaacctcagggctctcgctggctttcgacggggacagcttcgtgcgcctgcgcgtgccggcggcgtacgcgggctctctctgtggcttatgcgggaactacaaccaggaccccgcagacgacctgaaggcggtgggcgggaagcccgccggatggcaggtgggcggcgcccagggctgcggggaatgtgtgtccaagccatgcccgtcgccgtgcaccccagagcagcaagagtccttcggcggcccggacgcctgcggcgtgatctccgccaccgacggcccgctggcgccctgccacggccttgtgccgcccgcgcagtacttccagggctgcttgctggacgcctgccaagttcagggccatcctggaggcctctgtcctgcagtggccacctacgtggcagcctgtcaggccgctggggcccagctccgcgagtggaggcggccggacttctgtcccttccagtgccctgcccacagccactacgagctctgcggtgactcctgtcctgggagctgcccgagcctgtcggcacccgagggctgtgagtcggcctgccgtgaaggctgtgtctgcgatgctggcttcgtgctcagtggtgacacgtgtgtacctgtgggccagtgtggctgcctccacgatgaccgctactacccactgggccagaccttctaccctggccctgggtgtgattccctttgccgctgccgggagggcggtgaggtgtcctgtgagccctccagctgcggcccgcatgagacctgccggccatccggtggcagcttgggctgcgtggccgtgggctctaccacctgccaggcgtcgggagatccccactacaccaccttcgatggccgccgcttcgacttcatgggcacctgcgtgtatgtgctggctcagacctgcggcacccggcctggcctacatcggtttgccgtcctgcaggagaacgtggcctggggtaatgggcgagtcagtgtgaccagggtgatcacggtccaggtggcaaacttcaccctgcggctggagcagagacagtggaaggtcacggtgaacggtgtggacatgaagctgcccgtggtgctggccaacggccagatccgtgcctcccagcatggttcagatgttgtgattgagaccgacttcggcctgcgtgtggcctacgaccttgtgtactatgtgcgggtcaccgtccctggaaactactaccagctgatgtgtggcctgtgtgggaactacaacggcgaccccaaggatgacttccagaagcccaatggctcgcaggcaggcaacgccaatgagttcggcaactcctgggaggaggtggtgcccgactctccctgcctgccgccgcccacctgcccgccggggagcgagggctgtatccccagcgaggagtgtcctcccgagctggagaagaagtatcagaaggaggagttctgtgggctcctctccagccccacagggccactgtcctcctgccacaagctggtggatccccagggtcccttgaaagattgcatctttgatctctgcctgggtggtgggaacctgagcattctctgcagcaacatccatgcctacgtgagtgcttgccaggcggctggaggccacgtggagccctggaggaatgaaactttctgtcccatggaatgccctcagaacagtcactacgagctctgtgcggacacctgctccctgggctgctcggctctcagtgcccctctgcagtgcccagatgggtgtgctgagggctgccagtgtgactccggcttcctctacaacggccaagcctgcgtgcccatccagcaatgtggctgctaccacaatggtgcctactatgagccggagcagacagtcctcattgacaactgtcggcagcagtgcacgtgccatgcgggtaaagtcgtggtgtgccaggaacacagctgcaagccggggcaggtgtgccagccctccggaggcatcctgagctgcgtcaccaaagacccgtgccacggcgtgacatgccggccacaggagacatgcaaggagcagggtggccagggtgtgtgcctgcccaactatgaggccacgtgctggctgtggggcgacccacactaccactccttcgatggccggaagtttgacttccagggcacctgtaactatgtgctggcaacaactggctgcccgggggtcagcacccagggcctgacacccttcaccgtcaccaccaagaaccagaaccggggcaaccctgctgtatcctacgtgagagtcgtcaccgtggctgccctcggcaccaacatctccatccacaaggacgagatcggcaaagtccgggtgaacggtgtgctcacagccttgcctgtctccgtggccgacgggcggatttcagtggcccagggtgcatcgaaggcactgctggtggctgactttggactgcaagtcagctatgactggaactggcgggtagacgtgacgctccccagcagctatcatggcgcagtgtgcgggctctgcggtaacatggaccgcaaccccaacaatgaccaggtcttccctaatggcacactggctccctccatacccatctggggcggcagctggcgagccccaggctgggacccactgtgttgggacgaatgtcgggggtcctgcccaacgtgccctgaggaccggttggagcagtacgagggccctggcttctgcggacccctggcccccggcacagggggccctttcaccacctgccatgctcatgtgccacctgagagcttcttcaagggctgtgttctggacgtctgcatgggtggtggggaccatgacattctttgcaaggctctggcttcctacgtggccgcctgccaggccgctggggttgtcatcgaagactggcgggcacaggttggctgtgagatcacctgcccagaaaacagccactatgaggtctgtggcccaccctgcccggccagctgtccgtcccctgcaccccttacgacgccagccgtatgtgagggcccctgtgtggagggctgccagtgcgacgcgggtttcgtgttaagtgctgaccgctgtgttcccctcaacaacggctgcggctgctgggccaatggcacctaccacgaggcgggcagtgagttttgggctgatggcacctgctcccagtggtgtcgctgcgggcctgggggtggctcgctggtctgcacacctgccagctgtgggctgggtgaagtgtgtggcctcctgccatccggccagcacggctgccagcccgtcagcacagctgagtgccaggcgtggggtgacccccattacgtcactctggatgggcaccgattcgatttccaaggcacctgcgagtacctgctgagtgcaccctgccacggaccacccttgggggctgagaacttcactgtcactgtagccaatgagcaccggggcagccaggctgtcagctacacccgcagtgtcaccctgcaaatctacaaccacagcctgacactgagtgcccgctggccccggaagctacaggtggacggcgtgttcgtcactctgcccttccagctggactcgctcctgcacgcacacctgagcggcgccgacgtggtggtgaccacaacctcagggctctcgctggctttcgacggggacagcttcgtgcgcctgcgcgtgccggcggcgtacgcgggctctctctgtggcttatgcgggaactacaaccaggaccccgcagacgacctgaaggcggtgggcgggaagcccgccggatggcaggtgggcggcgcccagggctgcggggaatgtgtgtccaagccatgcccgtcgccgtgcaccccagagcagcaagagtccttcggcggcccggacgcctgcggcgtgatctccgccaccgacggcccgctggcgccctgccacggccttgtgccgcccgcgcagtacttccagggctgcttgctggacgcctgccaagttcagggccatcctggaggcctctgtcctgcagtggccacctacgtggcagcctgtcaggccgctggggcccagctccgcgagtggaggcggccggacttctgtcccttccagtgccctgcccacagccactacgagctctgcggtgactcctgtcctgggagctgcccgagcctgtcggcacccgagggctgtgagtcggcctgccgtgaaggctgtgtctgcgatgctggcttcgtgctcagtggtgacacgtgtgtacctgtgggccagtgtggctgcctccacgatgaccgctactacccactgggccagaccttctaccctggccctgggtgtgattccctttgccgctgccgggagggcggtgaggtgtcctgtgagccctccagctgcggcccgcatgagacctgccggccatccggtggcagcttgggctgcgtggccgtgggctctaccacctgccaggcgtcgggagatccccactacaccaccttcgatggccgccgcttcgacttcatgggcacctgcgtgtatgtgctggctcagacctgcggcacccggcctggcctacatcggtttgccgtcctgcaggagaacgtggcctggggtaatgggcgagtcagtgtgaccagggtgatcacggtccaggtggcaaacttcaccctgcggctggagcagagacagtggaaggtcacggtgaacggtgtggacatgaagctgcccgtggtgctggccaacggccagatccgtgcctcccagcatggttcagatgttgtgattgagaccgacttcggcctgcgtgtggcctacgaccttgtgtactatgtgcgggtcaccgtccctggaaactactaccagctgatgtgtggcctgtgtgggaactacaacggcgaccccaaggatgacttccagaagcccaatggctcgcaggcaggcaacgccaatgagttcggcaactcctgggaggaggtggtgcccgactctccctgcctgccgccgcccacctgcccgccggggagcgagggctgtatccccagcgaggagtgtcctcccgagctggagaagaagtatcagaaggaggagttctgtgggctcctctccagccccacagggccactgtcctcctgccacaagctggtggatccccagggtcccttgaaagattgcatctttgatctctgcctgggtggtgggaacctgagcattctctgcagcaacatccatgcctacgtgagtgcttgccaggcggctggaggccacgtggagccctggaggaatgaaactttctgtcccatggaatgccctcagaacagtcactacgagctctgtgcggacacctgctccctgggctgctcggctctcagtgcccctctgcagtgcccagatgggtgtgctgagggctgccagtgtgactccggcttcctctacaacggccaagcctgcgtgcccatccagcaatgtggctgctaccacaatggtgtctactatgagccggagcagacagtcctcattgacaactgtcggcagcagtgcacgtgccatgtgggtaaagtcgtggtgtgccaggaacacagctgcaagccggggcaggtgtgccagccctccggaggcatcctgagctgcgtcaacaaagacccgtgccacggcgtgacatgccggccacaggagacatgcaaggagcagggtggccagggtgtgtgcctgcccaactatgaggccacgtgctggctgtggggcgacccacactaccactccttcgatggccggaagtttgacttccagggcacctgtaactatgtgctggcaacaactggctgcccgggggtcagcacccagggcctgacacccttcaccgtcaccaccaagaaccagaaccggggcaaccctgctgtatcctacgtgagagtcgtcaccgtggctgccctcggcaccaacatctccatccacaaggacgagatcggcaaagtccgggtgaacggtgtgctcacagccttgcctgtctccgtggccgacgggcggatttcagtggcccagggtgcatcgaaggcactgctggtggctgactttggactgcaagtcagctatgactggaactggcgggtagacgtgacgctccccagcagctatcatggcgcagtgtgcgggctctgcggtaacatggaccgcaaccccaacaatgaccaggtcttccctaatggcacactggctccctccatacccatctggggcggcagctggcgagccccaggctgggacccactgtgttgggacgaatgtcgggggtcctgcccaacgtgccctgaggaccggttggagcagtacgaggggcctggcttctgcggacccctggcatctggcacagggggccccttcaccacctgccatgctcatgtgccacctgagagcttcttcaagggctgtgttctggacgtctgcatgggtggtggggaccatgacattctttgcaaggctctggcttcctacgtggccgcctgccaggccgctggggttgtcatcgaagactggcgggcacaggttggctgtgagatcacctgcccagaaaacagccactatgaggtctgtggcccaccctgcccggccagctgtccgtcccctgcaccccttacgacgccagccgtatgtgagggcccctgtgtggagggctgccagtgcgacgcgggtttcgtgttaagtgctgaccgctgtgttcccctcaacaacggctgcggctgctgggccaatggcacctaccacgaggcgggcagtgagttttgggctgatggcacctgctcccagtggtgtcgctgcgggcctgggggtggctcgctggtctgcacacctgccagctgtgggctgggtgaagtgtgtggcctcctgccatccggccagcacggctgccagcccgtcagcacagctgagtgccaggcgtggggtgacccccattacgtcactctggatgggcaccgattcgatttccaaggcacctgcgagtacctgctgagtgcaccctgccacggaccacccttgggggctgagaacttcactgtcactgtagccaatgagcaccggggcagccaggctgtcagctacacccgcagtgtcaccctgcaaatctacaaccacagcctgacactgagtgcccgctggccccggaagctacaggtcgacggcgtgttcgtggctctgcctttccagctggactcgctcctgcacgcacacctgagcggcgccgacgtggtggtgaccacaacctcagggctctcgctggctttcgatggggacagcttcgtgcgcctgcgcgtgccggcggcgtacgcggcctctctctgtggcttatgcgggaactacaaccaggaccccgcagacgacctcaaggctgtgggcgggaagcccgctggatggcaggtgggcggggcccagggctgcggggaatgtgtgtccaagccatgcccgtcgccgtgcaccccagagcagcaggagtccttcggcggcccggacgcctgcggcgtgatctccgccaccgacggcccgctggcaccctgccacggccttgtgccgcccgcgcagtacttccagggctgcttgctggacgcctgccaagttcagggccatcctggaggcctctgtcctgcagtggctacctacgtggcagcctgtcaggccgctggggcccagctcggcgagtggaggcggccggacttctgtcccttgcagtgccctgcccacagccactatgagctctgcggtgactcctgccctgtgagctgcccgagcctctcagcacccgagggctgtgagtcggcctgccgtgaaggctgtgtctgcgatgctggcttcgtactcagtggtgacacctgcgtacccgtgggccagtgtggctgcctccatgatggccgctactacccactgggcgaggtcttctacccgggccctgagtgtgagcgacgctgtgagtgtgggccaggtggccatgtcacctgccaggagggcgcagcctgtgggccccatgaggagtgccggttagaggatggtgtccaggcctgtcatgccacaggctgtggccgctgcctggccaacgggggcatccactacatcacccttgatggccgtgtctacgacctgcatggctcctgctcctatgtcttggcccaagtctgccacccaaagcctggggacgaggacttttccatcgtgcttgagaagaatgcagctggacatctccaacgcctcctggttactgtggctggccaggttgtgagcctagctcaggggcagcaggtcaccgtggacggcgaggctgtggccctgcctgtggctgtgggccgcgtgcgggtgaccgccgagggccgaaacatggttctgcagacgaccaaggggctgcggcttctctttgatggcgatgcccacctcctcatgtccatccccagccccttccgtggacggctctgtggcctctgtgggaacttcaatggcaactggagtgacgactttgtcctgcccaatggctcagcagcgtccagtgtggagaccttcggggctgcatggcgggtgcccggctcctccaagggctgtggcgagggctgcgggccccaaggctgcccagtgtgcttggcagaggagactgcaccctatgagagcaacgaggcctgcgggcagctccggaacccccagggccccttcgcgacctgccaggcggtgctgagtccctctgagtacttccgccaatgcgtatacgacctgtgcgcgcaaaagggtgacaaagccttcctgtgccgcagcctggcagcctacacggcggcctgtcaggcagctggcgtggccgtgaagccctggaggacagacagcttctgcccgctccattgccccgcccacagccactactccatctgcactcgcacctgccagggatcctgtgcggctctctccggcctcacgggctgcaccacccgctgttttgagggctgtgagtgcgacgaccgcttcctgctttcccagggtgtctgcatccctgtccaagattgtggctgcacccataatggccgatacttgccggtaaactcctccctgctgacctcagactgcagcgagcgctgttcctgttcctcaagctctggcctgacatgccaggcagctggctgcccaccaggccgtgtatgtgaggtcaaggctgaagcccggaactgctgggccacccgtggtctctgtgtcctgtctgtgggtgccaacctcaccacctttgatggggcccgtggtgccaccacctctcctggtgtctatgagctctcttcccgctgcccaggactacagaataccatcccctggtaccgtgtagttgccgaagtccagatctgccatggcaaaacggaggctgtgggccaggtccacatcttcttccaggatgggatggtgacgttgactccaaacaagggtgtgtgggtgaatggtctccgagtggatctcccagctgagaagttagcatctgtgtccgtgagtcgtacacctgatggctccctgctagtccgccagaaggcaggggtccaggtgtggcttggagccaatgggaaggtggctgtgattgtcagcaatgaccatgctgggaaactctggctctacagcgtctgcagtactgacgttcgccctccgtgaccctccgaa

SEQ ID NO: 433534 - DNA, 14281 bp, Homo sapiens
ctgcagccatgggtgccctatggagctggtggatactctgggctggagcaaccctcctgtggggattgacccaggaggcttcagtggacctcaagaacactggcagagaggaattcctcacagccttcctgcagaactatcagctggcctacagcaaggcctacccccgcctccttatctccagtctgtcagagagccccgcttcagtctccatcctcagccaggcagacaacacctcaaagaaggtcacagtgaggcccggggagtcggtcatggtcaacatcagtgccaaggctgagatgataggcagcaagatcttccagcatgcggtggtgatccattctgactatgccatctctgtgcaggcactaaatgccaagcctgacacagcggagctgacactgctgcggcccatccaggccctaggcaccgagtattttgtgctcacaccccccggcacctcagccaggaatgtcaaggagtttgccgtggtggccggtgccgcaggtgcctcggtcagtgtcacgctgaaggggtcagtgacattcaatggcaagttctatccagcaggcgatgtcctaagagtgactctacagccctacaatgtggcccagctacagagctcagtggatctctcggggtcaaaggtcacagctagtagccccgtggctgtcctctctggccacagctgtgcgcagaaacatacgacctgcaaccatgtggttgagcagctgctacccacgtctgcctggggcacccactatgtagtacccacgctggcctcccaatctcgctatgatttggccttcgttgtggccagccaggccacaaagctgacctacaaccatgggggtatcactggctcccgtgggctccaggcaggtgatgtggtagagtttgaggtccggccatcctggccactctacctgtctgcaaatgtgggcatccaggtcctgttgtttggcacaggtgccataaggaatgaagtgacttatgacccctacctggtcctgatcccagatgtggcggcctactgcccagcctatgtggtcaagagtgtaccaggctgtgagggcgtggccctggtagtggcacagacgaaggctatcagcgggctgaccatagatgggcatgcagtgggggccaagctcacctgggaggctgtgccaggcagtgagttctcgtatgctgaagtggagctcggcacagctgacatgatccacacggccgaggccaccaccaacttgggactgctcaccttcgggctggccaaggctataggctacgcaacagctgctgattgcggccggactgtactgtccccagtggagccctcctgcgaaggcatgcagtgcgcagccgggcagcgctgccaggtggtaggcgggaaggccgggtgtgtggcggagtccaccgctgtctgccgcgcccagggcgacccccattacaccaccttcgacggccgtcgctacgacatgatgggcacctgttcgtacacgatggtggagctgtgcagcgaggacgacaccctgcccgccttcagcgtggaggccaagaacgagcaccggggcagccgccgcgtctcctacgtgggcctcgtcactgtgcgcgcctacagccactctgtgtcgctgacccgcggtgaagttggcttcgtcctggttgacaaccagcgctcgcgcctgccagtctccctgagtgagggtcgcctgcgtgtgtaccagagcggaccacgggccgtggtggagctggtctttgggctggtggtcacttatgactgggactgccagctggcactcagcctgcctgcacgcttccaagaccaggtgtgcgggctgtgtggcaactataatggtgacccagcagacgacttcctcacgcctgacggggctctggctcctgacgctgtggagttcgcaagtagctggaagctggatgatggggactacctgtgtgaggatggctgccagaacaactgtcccgcctgcaccccaggccaggcccaacactatgagggcgaccgactctgtggcatgctgaccaagctcgatggccccttcgctgtctgccatgacaccctggaccccaggcccttcctggagcagtgtgtatatgacctgtgtgtggtcggtggggagcggctcagcctgtgccgtggcctcagcgcctatgcccaggcctgtctggagcttggcatctcggttggggactggagatcaccagccaactgccccctgtcctgccctgccaacagccgctatgagctctgcggccctgcttgcccgacctcctgcaacggggctgcggcgccgtccaactgctccgggcgcccctgcgtggagggctgcgtgtgcctcccaggcttcgtggccagcggcggcgcctgcgtgccggcctcgtcgtgtggctgcaccttccagggtctccagctcgctccgggccaggaagtgtgggcggacgagttgtgccaaaggcgctgcacctgcaacggcgccacccatcaggtcacctgccgcgacaagcagagctgcccggcgggtgagcgctgcagcgtccagaacggcctcctgggctgctaccccgatcgcttcgggacctgccaggggtccggggacccacactatgtgagcttcgacggccggcgcttcgacttcatgggcacctgcacgtacctgctggtcggctcatgcggccagaacgcagcgctgcctgccttccgggtgctggtggaaaacgagcatcggggcagccagactgtgagctacacgcgcgccgtgcgggtggaggcccgcggggtgaaggtggccgtgcgccgggagtaccccgggcaagtgctggtggatgacgtccttcagtatctgcccttccaagcagcagatgggcaggtgcaggtgttccgacagggcagggatgccgtcgtgcgcacggactttggcctgactgtcacttatgactggaatgcacgagtgactgccaaggtgcccagcagctatgctgaggccctgtgtggactctgtgggaacttcaacggggacccagctgatgacctggctctgcggggtgggggtcaagctgccaatgcactggcctttgggaacagctggcaagaagagacgaggcccggctgtggagcaactgaaccgggtgactgtcccaagctggactccctggtggcccagcagctgcagagcaagaatgagtgtggaatccttgccgaccccaaggggcccttccgggagtgccatagcaagctggacccccagggtgccgtgcgcgactgtgtctatgaccgctgcctgctgccaggccagtctgggccactgtgtgacgcactggccacctatgctgctgcatgccaggctgctggagccacagtgcacccctggaggagtgaagaactttgcccactgagctgcccaccccacagccactatgaggcgtgttcctacggctgcccgctgtcctgtggagacctcccagtgcccgggggctgtggctcagaatgccatgagggctgcgtgtgcgatgagggctttgcgctcagtggtgagtcctgcctgcccctggcctcctgtggctgcgtacaccagggcacctaccacccaccaggccagaccttctaccctggccccggatgtgattccctttgccactgccaggagggcggcctggtgtcctgtgagtcctccagctgcggaccgcacgaggcctgccagccatccggtggcagcttgggctgtgtggccgtgggctctagcacctgccaggcgtcaggagacccccactacaccaccttcgatggccgccgcttcgacttcatgggcacctgcgtgtatgtgctggctcagacctgcggcacccggcctggcctgcatcggtttgccgtcctgcaggagaacgtggcctggggtaatgggcgagtcagtgtgaccagggtgatcacggtccaggtggcaaacttcaccctgcggctggagcagagacagtggaaggtcacggtgaacggtgtggacatgaagctgcccgtggtgctggccaacggccagatccgtgcctcccagcatggttcagatgttgtgattgagaccgacttcggcctgcgtgtggcctacgaccttgtgtactatgtgcgggtcaccgtccccggaaactactaccagcagatgtgtggcctgtgtgggaactacaacggcgaccccaaggatgacttccagaagcccaatggctcacaggcaggcaacgccaatgagttcggcaactcctgggaggaggtggtgcccgactctccctgcctgccgcccaccccttgcccgccggggagcgaggactgtatccccagccacaagtgtcctcccgagctggagaagaagtatcagaaggaggagttctgtgggctcctctccagccccacagggccactgtcctcctgccacaagctggtggatccccagggtcccttgaaagattgcatctttgatctctgcctgggtggtgggaacctgagcattctctgcagcaacatccatgcctacgtgagtgcttgccaggcggctggaggccacgtggagccctggaggactgaaactttctgtcccatggagtgccctccgaacagtcactacgagctctgtgcggacacctgctccctgggctgctcagctctcagtgcccctccacagtgccaggatgggtgtgctgagggctgccagtgtgactccggcttcctctacaatggccaagcctgcgtgcccatccagcaatgcggctgctaccacaatggtgtctactatgagccggagcagacagtcctcattgacaactgtcggcagcagtgcacgtgccatgcgggtaaaggcatggtgtgccaggaacacagctgcaagccggggcaggtgtgccagccctccggaggcatcctgagctgcgtcaccaaagacccgtgccacggcgtgacatgccggccacaggagacatgcaaggagcagggtggccagggcgtgtgcctgcccaactatgaggccacgtgctggctgtggggcgacccacactaccactccttcgatggccggaagtttgacttccagggcacctgtaactatgtgctggcaacaactggctgcccgggggtcagcacccagggcctgacacccttcaccgtcaccaccaagaaccagaaccggggcaaccctgctgtgtcctacgtgagagtcgtcaccgtggctgccctcggcaccaacatctccatccacaaggacgagatcggcaaagtccgggtgaacggtgtgctcacagccttgcctgtctctgtggccgacgggcggatttcagtgacccagggtgcatcgaaggcactgctggtggctgactttggactgcaagtcagctatgactggaactggcgggtagacgtgacgctgcccagcagctatcatggcgcagtgtgcgggctctgcggtaacatggaccgcaaccccaacaatgaccaggtcttccctaatggcacactggctccctccatacccatctggggcggcagctggcgagccccaggctgggacccactgtgttgggacgaatgtcgggggtcctgcccaacgtgccctgaggaccggttggagcagtacgagggccctggcttctgcggacccctggcccccggcacagggggccctttcaccacctgccatgctcatgtgccacctgagagcttcttcaagggctgtgttctggacgtctgcatgggtggtggggaccgtgacattctttgcaaggctctggcttcctatgtggccgcctgccaggctgctggggttgtcatcgaagactggcgggcacaggttggctgtgagatcacctgcccagaaaacagccactatgaggtctgtggcccaccctgcccggccagctgtccgtcccctgcaccccttacgacgccagccgtatgtgagggcccctgtgtggagggctgccagtgcgacgcgggtttcgtgttaagtgctgaccgctgtgttcccctcaacaacggctgcggctgctgggccaatggcacctaccacgaggcgggcagtgagttttgggctgatggcacctgctcccagtggtgtcgctgcgggcctgggggtggctcgctggtctgcacacctgccagctgtgggctgggtgaagtgtgtggcctcctgccatccggccagcacggctgccagcccgtcagcacagctgagtgccaggcgtggggtgacccccattacgtcactctggatgggcaccgattcaatttccaaggcacctgcgagtacctgctgagtgcaccctgccacggaccacccttgggggctgagaacttcactgtcactgtagccaatgagcaccggggcagccaggctgtcagctacacccgcagtgtcaccctgcaaatctacaaccacagcctgacactgagtgcccgctggccccggaagctacaggtggacggcgtgttcgtcactctgcccttccagctggactcgctcctgcacgcacacctgagcggcgccgacgtggtggtgaccacaacctcagggctctcgctggctttcgacggggacagcttcgtgcgcctgcgcgtgccggcggcgtacgcgggctctctctgtggcttatgcgggaactacaaccaggaccccgcagacgacctgaaggcggtgggcgggaagcccgccggatggcaggtgggcggcgcccagggctgcggggaatgtgtgtccaagccatgcccgtcgccgtgcaccccagagcagcaagagtccttcggcggcccggacgcctgcggcgtgatctccgccaccgacggcccgctggcgccctgccacggccttgtgccgcccgcgcagtacttccagggctgcttgctggacgcctgccaagttcagggccatcctggaggcctctgtcctgcagtggccacctacgtggcagcctgtcaggccgctggggcccagctccgcgagtggaggcggccggacttctgtcccttccagtgccctgcccacagccactacgagctctgcggtgactcctgtcctgggagctgcccgagcctgtcggcacccgagggctgtgagtcggcctgccgtgaaggctgtgtctgcgatgctggcttcgtgctcagtggtgacacgtgtgtacctgtgggccagtgtggctgcctccacgatgaccgctactacccactgggccagaccttctaccctggccctgggtgtgattccctttgccgctgccgggagggcggtgaggtgtcctgtgagccctccagctgcggcccgcatgagacctgccggccatccggtggcagcttgggctgcgtggccgtgggctctaccacctgccaggcgtcgggagatccccactacaccaccttcgatggccgccgcttcgacttcatgggcacctgcgtgtatgtgctggctcagacctgcggcacccggcctggcctacatcggtttgccgtcctgcaggagaacgtggcctggggtaatgggcgagtcagtgtgaccagggtgatcacggtccaggtggcaaacttcaccctgcggctggagcagagacagtggaaggtcacggtgaacggtgtggacatgaagctgcccgtggtgctggccaacggccagatccgtgcctcccagcatggttcagatgttgtgattgagaccgacttcggcctgcgtgtggcctacgaccttgtgtactatgtgcgggtcaccgtccctggaaactactaccagctgatgtgtggcctgtgtgggaactacaacggcgaccccaaggatgacttccagaagcccaatggctcgcaggcaggcaacgccaatgagttcggcaactcctgggaggaggtggtgcccgactctccctgcctgccgccgcccacctgcccgccggggagcgagggctgtatccccagcgaggagtgtcctcccgagctggagaagaagtatcagaaggaggagttctgtgggctcctctccagccccacagggccactgtcctcctgccacaagctggtggatccccagggtcccttgaaagattgcatctttgatctctgcctgggtggtgggaacctgagcattctctgcagcaacatccatgcctacgtgagtgcttgccaggcggctggaggccacgtggagccctggaggaatgaaactttctgtcccatggaatgccctcagaacagtcactacgagctctgtgcggacacctgctccctgggctgctcggctctcagtgcccctctgcagtgcccagatgggtgtgctgagggctgccagtgtgactccggcttcctctacaacggccaagcctgcgtgcccatccagcaatgtggctgctaccacaatggtgcctactatgagccggagcagacagtcctcattgacaactgtcggcagcagtgcacgtgccatgcgggtaaagtcgtggtgtgccaggaacacagctgcaagccggggcaggtgtgccagccctccggaggcatcctgagctgcgtcaccaaagacccgtgccacggcgtgacatgccggccacaggagacatgcaaggagcagggtggccagggtgtgtgcctgcccaactatgaggccacgtgctggctgtggggcgacccacactaccactccttcgatggccggaagtttgacttccagggcacctgtaactatgtgctggcaacaactggctgcccgggggtcagcacccagggcctgacacccttcaccgtcaccaccaagaaccagaaccggggcaaccctgctgtatcctacgtgagagtcgtcaccgtggctgccctcggcaccaacatctccatccacaaggacgagatcggcaaagtccgggtgaacggtgtgctcacagccttgcctgtctccgtggccgacgggcggatttcagtggcccagggtgcatcgaaggcactgctggtggctgactttggactgcaagtcagctatgactggaactggcgggtagacgtgacgctccccagcagctatcatggcgcagtgtgcgggctctgcggtaacatggaccgcaaccccaacaatgaccaggtcttccctaatggcacactggctccctccatacccatctggggcggcagctggcgagccccaggctgggacccactgtgttgggacgaatgtcgggggtcctgcccaacgtgccctgaggaccggttggagcagtacgagggccctggcttctgcggacccctggcccccggcacagggggccctttcaccacctgccatgctcatgtgccacctgagagcttcttcaagggctgtgttctggacgtctgcatgggtggtggggaccatgacattctttgcaaggctctggcttcctacgtggccgcctgccaggccgctggggttgtcatcgaagactggcgggcacaggttggctgtgagatcacctgcccagaaaacagccactatgaggtctgtggcccaccctgcccggccagctgtccgtcccctgcaccccttacgacgccagccgtatgtgagggcccctgtgtggagggctgccagtgcgacgcgggtttcgtgttaagtgctgaccgctgtgttcccctcaacaacggctgcggctgctgggccaatggcacctaccacgaggcgggcagtgagttttgggctgatggcacctgctcccagtggtgtcgctgcgggcctgggggtggctcgctggtctgcacacctgccagctgtgggctgggtgaagtgtgtggcctcctgccatccggccagcacggctgccagcccgtcagcacagctgagtgccaggcgtggggtgacccccattacgtcactctggatgggcaccgattcgatttccaaggcacctgcgagtacctgctgagtgcaccctgccacggaccacccttgggggctgagaacttcactgtcactgtagccaatgagcaccggggcagccaggctgtcagctacacccgcagtgtcaccctgcaaatctacaaccacagcctgacactgagtgcccgctggccccggaagctacaggtggacggcgtgttcgtcactctgcccttccagctggactcgctcctgcacgcacacctgagcggcgccgacgtggtggtgaccacaacctcagggctctcgctggctttcgacggggacagcttcgtgcgcctgcgcgtgccggcggcgtacgcgggctctctctgtggcttatgcgggaactacaaccaggaccccgcagacgacctgaaggcggtgggcgggaagcccgccggatggcaggtgggcggcgcccagggctgcggggaatgtgtgtccaagccatgcccgtcgccgtgcaccccagagcagcaagagtccttcggcggcccggacgcctgcggcgtgatctccgccaccgacggcccgctggcgccctgccacggccttgtgccgcccgcgcagtacttccagggctgcttgctggacgcctgccaagttcagggccatcctggaggcctctgtcctgcagtggccacctacgtggcagcctgtcaggccgctggggcccagctccgcgagtggaggcggccggacttctgtcccttccagtgccctgcccacagccactacgagctctgcggtgactcctgtcctgggagctgcccgagcctgtcggcacccgagggctgtgagtcggcctgccgtgaaggctgtgtctgcgatgctggcttcgtgctcagtggtgacacgtgtgtacctgtgggccagtgtggctgcctccacgatgaccgctactacccactgggccagaccttctaccctggccctgggtgtgattccctttgccgctgccgggagggcggtgaggtgtcctgtgagccctccagctgcggcccgcatgagacctgccggccatccggtggcagcttgggctgcgtggccgtgggctctaccacctgccaggcgtcgggagatccccactacaccaccttcgatggccgccgcttcgacttcatgggcacctgcgtgtatgtgctggctcagacctgcggcacccggcctggcctacatcggtttgccgtcctgcaggagaacgtggcctggggtaatgggcgagtcagtgtgaccagggtgatcacggtccaggtggcaaacttcaccctgcggctggagcagagacagtggaaggtcacggtgaacggtgtggacatgaagctgcccgtggtgctggccaacggccagatccgtgcctcccagcatggttcagatgttgtgattgagaccgacttcggcctgcgtgtggcctacgaccttgtgtactatgtgcgggtcaccgtccctggaaactactaccagctgatgtgtggcctgtgtgggaactacaacggcgaccccaaggatgacttccagaagcccaatggctcgcaggcaggcaacgccaatgagttcggcaactcctgggaggaggtggtgcccgactctccctgcctgccgccgcccacctgcccgccggggagcgagggctgtatccccagcgaggagtgtcctcccgagctggagaagaagtatcagaaggaggagttctgtgggctcctctccagccccacagggccactgtcctcctgccacaagctggtggatccccagggtcccttgaaagattgcatctttgatctctgcctgggtggtgggaacctgagcattctctgcagcaacatccatgcctacgtgagtgcttgccaggcggctggaggccacgtggagccctggaggaatgaaactttctgtcccatggaatgccctcagaacagtcactacgagctctgtgcggacacctgctccctgggctgctcggctctcagtgcccctctgcagtgcccagatgggtgtgctgagggctgccagtgtgactccggcttcctctacaacggccaagcctgcgtgcccatccagcaatgtggctgctaccacaatggtgtctactatgagccggagcagacagtcctcattgacaactgtcggcagcagtgcacgtgccatgtgggtaaagtcgtggtgtgccaggaacacagctgcaagccggggcaggtgtgccagccctccggaggcatcctgagctgcgtcaacaaagacccgtgccacggcgtgacatgccggccacaggagacatgcaaggagcagggtggccagggtgtgtgcctgcccaactatgaggccacgtgctggctgtggggcgacccacactaccactccttcgatggccggaagtttgacttccagggcacctgtaactatgtgctggcaacaactggctgcccgggggtcagcacccagggcctgacacccttcaccgtcaccaccaagaaccagaaccggggcaaccctgctgtatcctacgtgagagtcgtcaccgtggctgccctcggcaccaacatctccatccacaaggacgagatcggcaaagtccgggtgaacggtgtgctcacagccttgcctgtctccgtggccgacgggcggatttcagtggcccagggtgcatcgaaggcactgctggtggctgactttggactgcaagtcagctatgactggaactggcgggtagacgtgacgctccccagcagctatcatggcgcagtgtgcgggctctgcggtaacatggaccgcaaccccaacaatgaccaggtcttccctaatggcacactggctccctccatacccatctggggcggcagctggcgagccccaggctgggacccactgtgttgggacgaatgtcgggggtcctgcccaacgtgccctgaggaccggttggagcagtacgaggggcctggcttctgcggacccctggcatctggcacagggggccccttcaccacctgccatgctcatgtgccacctgagagcttcttcaagggctgtgttctggacgtctgcatgggtggtggggaccatgacattctttgcaaggctctggcttcctacgtggccgcctgccaggccgctggggttgtcatcgaagactggcgggcacaggttggctgtgagatcacctgcccagaaaacagccactatgaggtctgtggcccaccctgcccggccagctgtccgtcccctgcaccccttacgacgccagccgtatgtgagggcccctgtgtggagggctgccagtgcgacgcgggtttcgtgttaagtgctgaccgctgtgttcccctcaacaacggctgcggctgctgggccaatggcacctaccacgaggcgggcagtgagttttgggctgatggcacctgctcccagtggtgtcgctgcgggcctgggggtggctcgctggtctgcacacctgccagctgtgggctgggtgaagtgtgtggcctcctgccatccggccagcacggctgccagcccgtcagcacagctgagtgccaggcgtggggtgacccccattacgtcactctggatgggcaccgattcgatttccaaggcacctgcgagtacctgctgagtgcaccctgccacggaccacccttgggggctgagaacttcactgtcactgtagccaatgagcaccggggcagccaggctgtcagctacacccgcagtgtcaccctgcaaatctacaaccacagcctgacactgagtgcccgctggccccggaagctacaggtcgacggcgtgttcgtggctctgcctttccagctggactcgctcctgcacgcacacctgagcggcgccgacgtggtggtgaccacaacctcagggctctcgctggctttcgatggggacagcttcgtgcgcctgcgcgtgccggcggcgtacgcggcctctctctgtggcttatgcgggaactacaaccaggaccccgcagacgacctcaaggctgtgggcgggaagcccgctggatggcaggtgggcggggcccagggctgcggggaatgtgtgtccaagccatgcccgtcgccgtgcaccccagagcagcaggagtccttcggcggcccggacgcctgcggcgtgatctccgccaccgacggcccgctggcaccctgccacggccttgtgccgcccgcgcagtacttccagggctgcttgctggacgcctgccaagttcagggccatcctggaggcctctgtctgggtggtactacggggagcttgtggggggtggggcccgtcgggatggggggcgggtttgtccttgggtgctgcacgcatatggctggggccttgctggatgcgcttaacagggggggtggcgcgaggggtgagggtgacagggg

SEQ ID NO: 433535 - DNA, 644 bp, Homo sapiens
cgaggatgtaagcaccatgaggatgtcagcaccaggatgggatggtgacgttgactccaaacaagggtgtgtgggtgaatggtctccgagtggatctcccagctgagaagttagcatctgtgtccgtgagtcgtacacctgatggctccctgctagtccgccagaaggcaggggtccaggtgtggcttggagccaatgggaaggtggctgtgattgtcagcaatgaccatgctgggaaactgtgtggggcctgtggaaactttgacggggaccagaccaatgattggcatgactcccaggagaagccagcgatggagaaatggagagcgcaggacttctccccatggtgagggatgtagtatggaaaccaggcttcttggggcaaaggcacctggatcctcatgggatgagggcagtcagggtgggtgtttagtctgcaagcggaggtgctaaatgtctgtgtcttgcagttatggctgatcagtcatccaccaggaacgaagatttcctgaagaagacctggtccctctggaggttgcagtggctgaaggatgcatcatgtgctcctaccctgctctaccgcttttctgggtcacagaggccaaatgtgagagcattgaataaatatcttaagctaagctgca

SEQ ID NO: 433536 - DNA, 257 bp, Homo sapiens
cacctgctccctgggctgctcagctctcagtgcccctccacagtgccaggatgggtgtgctgagggctgccagtgtgactccggcttcctctacaatggccaagcctgcgtgcccatccagcaatgcggctgctaccacaatggtgtctactatgaggtaggaacctagtcatctggggcagaatatggggcctcacccctcccactgctcatcagccccacggcctgtctacttggcctcttatttatttctttta

SEQ ID NO: 433537 - DNA, 16514 bp, Homo sapiens
ctgcagccatgggtgccctatggagctggtggatactctgggctggagcaaccctcctgtggggattgacccaggaggcttcagtggacctcaagaacactggcagagaggaattcctcacagccttcctgcagaactatcagctggcctacagcaaggcctacccccgcctccttatctccagtctgtcagagagccccgcttcagtctccatcctcagccaggcagacaacacctcaaagaaggtcacagtgaggcccggggagtcggtcatggtcaacatcagtgccaaggctgagatgataggcagcaagatcttccagcatgcggtggtgatccattctgactatgccatctctgtgcaggcactaaatgccaagcctgacacagcggagctgacactgctgcggcccatccaggccctaggcaccgagtattttgtgctcacaccccccggcacctcagccaggaatgtcaaggagtttgccgtggtggccggtgccgcaggtgcctcggtcagtgtcacgctgaaggggtcagtgacattcaatggcaagttctatccagcaggcgatgtcctaagagtgactctacagccctacaatgtggcccagctacagagctcagtggatctctcggggtcaaaggtcacagctagtagccccgtggctgtcctctctggccacagctgtgcgcagaaacatacgacctgcaaccatgtggttgagcagctgctacccacgtctgcctggggcacccactatgtagtacccacgctggcctcccaatctcgctatgatttggccttcgttgtggccagccaggccacaaagctgacctacaaccatgggggtatcactggctcccgtgggctccaggcaggtgatgtggtagagtttgaggtccggccatcctggccactctacctgtctgcaaatgtgggcatccaggtcctgttgtttggcacaggtgccataaggaatgaagtgacttatgacccctacctggtcctgatcccagatgtggcggcctactgcccagcctatgtggtcaagagtgtaccaggctgtgagggcgtggccctggtagtggcacagacgaaggctatcagcgggctgaccatagatgggcatgcagtgggggccaagctcacctgggaggctgtgccaggcagtgagttctcgtatgctgaagtggagctcggcacagctgacatgatccacacggccgaggccaccaccaacttgggactgctcaccttcgggctggccaaggctataggctacgcaacagctgctgattgcggccggactgtactgtccccagtggagccctcctgcgaaggcatgcagtgcgcagccgggcagcgctgccaggtggtaggcgggaaggccgggtgtgtggcggagtccaccgctgtctgccgcgcccagggcgacccccattacaccaccttcgacggccgtcgctacgacatgatgggcacctgttcgtacacgatggtggagctgtgcagcgaggacgacaccctgcccgccttcagcgtggaggccaagaacgagcaccggggcagccgccgcgtctcctacgtgggcctcgtcactgtgcgcgcctacagccactctgtgtcgctgacccgcggtgaagttggcttcgtcctggttgacaaccagcgctcgcgcctgccagtctccctgagtgagggtcgcctgcgtgtgtaccagagcggaccacgggccgtggtggagctggtctttgggctggtggtcacttatgactgggactgccagctggcactcagcctgcctgcacgcttccaagaccaggtgtgcgggctgtgtggcaactataatggtgacccagcagacgacttcctcacgcctgacggggctctggctcctgacgctgtggagttcgcaagtagctggaagctggatgatggggactacctgtgtgaggatggctgccagaacaactgtcccgcctgcaccccaggccaggcccaacactatgagggcgaccgactctgtggcatgctgaccaagctcgatggccccttcgctgtctgccatgacaccctggaccccaggcccttcctggagcagtgtgtatatgacctgtgtgtggtcggtggggagcggctcagcctgtgccgtggcctcagcgcctatgcccaggcctgtctggagcttggcatctcggttggggactggagatcaccagccaactgccccctgtcctgccctgccaacagccgctatgagctctgcggccctgcttgcccgacctcctgcaacggggctgcggcgccgtccaactgctccgggcgcccctgcgtggagggctgcgtgtgcctcccaggcttcgtggccagcggcggcgcctgcgtgccggcctcgtcgtgtggctgcaccttccagggtctccagctcgctccgggccaggaagtgtgggcggacgagttgtgccaaaggcgctgcacctgcaacggcgccacccatcaggtcacctgccgcgacaagcagagctgcccggcgggtgagcgctgcagcgtccagaacggcctcctgggctgctaccccgatcgcttcgggacctgccaggggtccggggacccacactatgtgagcttcgacggccggcgcttcgacttcatgggcacctgcacgtacctgctggtcggctcatgcggccagaacgcagcgctgcctgccttccgggtgctggtggaaaacgagcatcggggcagccagactgtgagctacacgcgcgccgtgcgggtggaggcccgcggggtgaaggtggccgtgcgccgggagtaccccgggcaagtgctggtggatgacgtccttcagtatctgcccttccaagcagcagatgggcaggtgcaggtgttccgacagggcagggatgccgtcgtgcgcacggactttggcctgactgtcacttatgactggaatgcacgagtgactgccaaggtgcccagcagctatgctgaggccctgtgtggactctgtgggaacttcaacggggacccagctgatgacctggctctgcggggtgggggtcaagctgccaatgcactggcctttgggaacagctggcaagaagagacgaggcccggctgtggagcaactgaaccgggtgactgtcccaagctggactccctggtggcccagcagctgcagagcaagaatgagtgtggaatccttgccgaccccaaggggcccttccgggagtgccatagcaagctggacccccagggtgccgtgcgcgactgtgtctatgaccgctgcctgctgccaggccagtctgggccactgtgtgacgcactggccacctatgctgctgcatgccaggctgctggagccacagtgcacccctggaggagtgaagaactttgcccactgagctgcccaccccacagccactatgaggcgtgttcctacggctgcccgctgtcctgtggagacctcccagtgcccgggggctgtggctcagaatgccatgagggctgcgtgtgcgatgagggctttgcgctcagtggtgagtcctgcctgcccctggcctcctgtggctgcgtacaccagggcacctaccacccaccaggccagaccttctaccctggccccggatgtgattccctttgccactgccaggagggcggcctggtgtcctgtgagtcctccagctgcggaccgcacgaggcctgccagccatccggtggcagcttgggctgtgtggccgtgggctctagcacctgccaggcgtcaggagacccccactacaccaccttcgatggccgccgcttcgacttcatgggcacctgcgtgtatgtgctggctcagacctgcggcacccggcctggcctgcatcggtttgccgtcctgcaggagaacgtggcctggggtaatgggcgagtcagtgtgaccagggtgatcacggtccaggtggcaaacttcaccctgcggctggagcagagacagtggaaggtcacggtgaacggtgtggacatgaagctgcccgtggtgctggccaacggccagatccgtgcctcccagcatggttcagatgttgtgattgagaccgacttcggcctgcgtgtggcctacgaccttgtgtactatgtgcgggtcaccgtccccggaaactactaccagcagatgtgtggcctgtgtgggaactacaacggcgaccccaaggatgacttccagaagcccaatggctcacaggcaggcaacgccaatgagttcggcaactcctgggaggaggtggtgcccgactctccctgcctgccgcccaccccttgcccgccggggagcgaggactgtatccccagccacaagtgtcctcccgagctggagaagaagtatcagaaggaggagttctgtgggctcctctccagccccacagggccactgtcctcctgccacaagctggtggatccccagggtcccttgaaagattgcatctttgatctctgcctgggtggtgggaacctgagcattctctgcagcaacatccatgcctacgtgagtgcttgccaggcggctggaggccacgtggagccctggaggactgaaactttctgtcccatggagtgccctccgaacagtcactacgagctctgtgcggacacctgctccctgggctgctcagctctcagtgcccctccacagtgccaggatgggtgtgctgagggctgccagtgtgactccggcttcctctacaatggccaagcctgcgtgcccatccagcaatgcggctgctaccacaatggtgtctactatgagccggagcagacagtcctcattgacaactgtcggcagcagtgcacgtgccatgcgggtaaaggcatggtgtgccaggaacacagctgcaagccggggcaggtgtgccagccctccggaggcatcctgagctgcgtcaccaaagacccgtgccacggcgtgacatgccggccacaggagacatgcaaggagcagggtggccagggcgtgtgcctgcccaactatgaggccacgtgctggctgtggggcgacccacactaccactccttcgatggccggaagtttgacttccagggcacctgtaactatgtgctggcaacaactggctgcccgggggtcagcacccagggcctgacacccttcaccgtcaccaccaagaaccagaaccggggcaaccctgctgtgtcctacgtgagagtcgtcaccgtggctgccctcggcaccaacatctccatccacaaggacgagatcggcaaagtccgggtgaacggtgtgctcacagccttgcctgtctctgtggccgacgggcggatttcagtgacccagggtgcatcgaaggcactgctggtggctgactttggactgcaagtcagctatgactggaactggcgggtagacgtgacgctgcccagcagctatcatggcgcagtgtgcgggctctgcggtaacatggaccgcaaccccaacaatgaccaggtcttccctaatggcacactggctccctccatacccatctggggcggcagctggcgagccccaggctgggacccactgtgttgggacgaatgtcgggggtcctgcccaacgtgccctgaggaccggttggagcagtacgagggccctggcttctgcggacccctggcccccggcacagggggccctttcaccacctgccatgctcatgtgccacctgagagcttcttcaagggctgtgttctggacgtctgcatgggtggtggggaccgtgacattctttgcaaggctctggcttcctatgtggccgcctgccaggctgctggggttgtcatcgaagactggcgggcacaggttggctgtgagatcacctgcccagaaaacagccactatgaggtctgtggcccaccctgcccggccagctgtccgtcccctgcaccccttacgacgccagccgtatgtgagggcccctgtgtggagggctgccagtgcgacgcgggtttcgtgttaagtgctgaccgctgtgttcccctcaacaacggctgcggctgctgggccaatggcacctaccacgaggcgggcagtgagttttgggctgatggcacctgctcccagtggtgtcgctgcgggcctgggggtggctcgctggtctgcacacctgccagctgtgggctgggtgaagtgtgtggcctcctgccatccggccagcacggctgccagcccgtcagcacagctgagtgccaggcgtggggtgacccccattacgtcactctggatgggcaccgattcaatttccaaggcacctgcgagtacctgctgagtgcaccctgccacggaccacccttgggggctgagaacttcactgtcactgtagccaatgagcaccggggcagccaggctgtcagctacacccgcagtgtcaccctgcaaatctacaaccacagcctgacactgagtgcccgctggccccggaagctacaggtggacggcgtgttcgtcactctgcccttccagctggactcgctcctgcacgcacacctgagcggcgccgacgtggtggtgaccacaacctcagggctctcgctggctttcgacggggacagcttcgtgcgcctgcgcgtgccggcggcgtacgcgggctctctctgtggcttatgcgggaactacaaccaggaccccgcagacgacctgaaggcggtgggcgggaagcccgccggatggcaggtgggcggcgcccagggctgcggggaatgtgtgtccaagccatgcccgtcgccgtgcaccccagagcagcaagagtccttcggcggcccggacgcctgcggcgtgatctccgccaccgacggcccgctggcgccctgccacggccttgtgccgcccgcgcagtacttccagggctgcttgctggacgcctgccaagttcagggccatcctggaggcctctgtcctgcagtggccacctacgtggcagcctgtcaggccgctggggcccagctccgcgagtggaggcggccggacttctgtcccttccagtgccctgcccacagccactacgagctctgcggtgactcctgtcctgggagctgcccgagcctgtcggcacccgagggctgtgagtcggcctgccgtgaaggctgtgtctgcgatgctggcttcgtgctcagtggtgacacgtgtgtacctgtgggccagtgtggctgcctccacgatgaccgctactacccactgggccagaccttctaccctggccctgggtgtgattccctttgccgctgccgggagggcggtgaggtgtcctgtgagccctccagctgcggcccgcatgagacctgccggccatccggtggcagcttgggctgcgtggccgtgggctctaccacctgccaggcgtcgggagatccccactacaccaccttcgatggccgccgcttcgacttcatgggcacctgcgtgtatgtgctggctcagacctgcggcacccggcctggcctacatcggtttgccgtcctgcaggagaacgtggcctggggtaatgggcgagtcagtgtgaccagggtgatcacggtccaggtggcaaacttcaccctgcggctggagcagagacagtggaaggtcacggtgaacggtgtggacatgaagctgcccgtggtgctggccaacggccagatccgtgcctcccagcatggttcagatgttgtgattgagaccgacttcggcctgcgtgtggcctacgaccttgtgtactatgtgcgggtcaccgtccctggaaactactaccagctgatgtgtggcctgtgtgggaactacaacggcgaccccaaggatgacttccagaagcccaatggctcgcaggcaggcaacgccaatgagttcggcaactcctgggaggaggtggtgcccgactctccctgcctgccgccgcccacctgcccgccggggagcgagggctgtatccccagcgaggagtgtcctcccgagctggagaagaagtatcagaaggaggagttctgtgggctcctctccagccccacagggccactgtcctcctgccacaagctggtggatccccagggtcccttgaaagattgcatctttgatctctgcctgggtggtgggaacctgagcattctctgcagcaacatccatgcctacgtgagtgcttgccaggcggctggaggccacgtggagccctggaggaatgaaactttctgtcccatggaatgccctcagaacagtcactacgagctctgtgcggacacctgctccctgggctgctcggctctcagtgcccctctgcagtgcccagatgggtgtgctgagggctgccagtgtgactccggcttcctctacaacggccaagcctgcgtgcccatccagcaatgtggctgctaccacaatggtgcctactatgagccggagcagacagtcctcattgacaactgtcggcagcagtgcacgtgccatgcgggtaaagtcgtggtgtgccaggaacacagctgcaagccggggcaggtgtgccagccctccggaggcatcctgagctgcgtcaccaaagacccgtgccacggcgtgacatgccggccacaggagacatgcaaggagcagggtggccagggtgtgtgcctgcccaactatgaggccacgtgctggctgtggggcgacccacactaccactccttcgatggccggaagtttgacttccagggcacctgtaactatgtgctggcaacaactggctgcccgggggtcagcacccagggcctgacacccttcaccgtcaccaccaagaaccagaaccggggcaaccctgctgtatcctacgtgagagtcgtcaccgtggctgccctcggcaccaacatctccatccacaaggacgagatcggcaaagtccgggtgaacggtgtgctcacagccttgcctgtctccgtggccgacgggcggatttcagtggcccagggtgcatcgaaggcactgctggtggctgactttggactgcaagtcagctatgactggaactggcgggtagacgtgacgctccccagcagctatcatggcgcagtgtgcgggctctgcggtaacatggaccgcaaccccaacaatgaccaggtcttccctaatggcacactggctccctccatacccatctggggcggcagctggcgagccccaggctgggacccactgtgttgggacgaatgtcgggggtcctgcccaacgtgccctgaggaccggttggagcagtacgagggccctggcttctgcggacccctggcccccggcacagggggccctttcaccacctgccatgctcatgtgccacctgagagcttcttcaagggctgtgttctggacgtctgcatgggtggtggggaccatgacattctttgcaaggctctggcttcctacgtggccgcctgccaggccgctggggttgtcatcgaagactggcgggcacaggttggctgtgagatcacctgcccagaaaacagccactatgaggtctgtggcccaccctgcccggccagctgtccgtcccctgcaccccttacgacgccagccgtatgtgagggcccctgtgtggagggctgccagtgcgacgcgggtttcgtgttaagtgctgaccgctgtgttcccctcaacaacggctgcggctgctgggccaatggcacctaccacgaggcgggcagtgagttttgggctgatggcacctgctcccagtggtgtcgctgcgggcctgggggtggctcgctggtctgcacacctgccagctgtgggctgggtgaagtgtgtggcctcctgccatccggccagcacggctgccagcccgtcagcacagctgagtgccaggcgtggggtgacccccattacgtcactctggatgggcaccgattcgatttccaaggcacctgcgagtacctgctgagtgcaccctgccacggaccacccttgggggctgagaacttcactgtcactgtagccaatgagcaccggggcagccaggctgtcagctacacccgcagtgtcaccctgcaaatctacaaccacagcctgacactgagtgcccgctggccccggaagctacaggtggacggcgtgttcgtcactctgcccttccagctggactcgctcctgcacgcacacctgagcggcgccgacgtggtggtgaccacaacctcagggctctcgctggctttcgacggggacagcttcgtgcgcctgcgcgtgccggcggcgtacgcgggctctctctgtggcttatgcgggaactacaaccaggaccccgcagacgacctgaaggcggtgggcgggaagcccgccggatggcaggtgggcggcgcccagggctgcggggaatgtgtgtccaagccatgcccgtcgccgtgcaccccagagcagcaagagtccttcggcggcccggacgcctgcggcgtgatctccgccaccgacggcccgctggcgccctgccacggccttgtgccgcccgcgcagtacttccagggctgcttgctggacgcctgccaagttcagggccatcctggaggcctctgtcctgcagtggccacctacgtggcagcctgtcaggccgctggggcccagctccgcgagtggaggcggccggacttctgtcccttccagtgccctgcccacagccactacgagctctgcggtgactcctgtcctgggagctgcccgagcctgtcggcacccgagggctgtgagtcggcctgccgtgaaggctgtgtctgcgatgctggcttcgtgctcagtggtgacacgtgtgtacctgtgggccagtgtggctgcctccacgatgaccgctactacccactgggccagaccttctaccctggccctgggtgtgattccctttgccgctgccgggagggcggtgaggtgtcctgtgagccctccagctgcggcccgcatgagacctgccggccatccggtggcagcttgggctgcgtggccgtgggctctaccacctgccaggcgtcgggagatccccactacaccaccttcgatggccgccgcttcgacttcatgggcacctgcgtgtatgtgctggctcagacctgcggcacccggcctggcctacatcggtttgccgtcctgcaggagaacgtggcctggggtaatgggcgagtcagtgtgaccagggtgatcacggtccaggtggcaaacttcaccctgcggctggagcagagacagtggaaggtcacggtgaacggtgtggacatgaagctgcccgtggtgctggccaacggccagatccgtgcctcccagcatggttcagatgttgtgattgagaccgacttcggcctgcgtgtggcctacgaccttgtgtactatgtgcgggtcaccgtccctggaaactactaccagctgatgtgtggcctgtgtgggaactacaacggcgaccccaaggatgacttccagaagcccaatggctcgcaggcaggcaacgccaatgagttcggcaactcctgggaggaggtggtgcccgactctccctgcctgccgccgcccacctgcccgccggggagcgagggctgtatccccagcgaggagtgtcctcccgagctggagaagaagtatcagaaggaggagttctgtgggctcctctccagccccacagggccactgtcctcctgccacaagctggtggatccccagggtcccttgaaagattgcatctttgatctctgcctgggtggtgggaacctgagcattctctgcagcaacatccatgcctacgtgagtgcttgccaggcggctggaggccacgtggagccctggaggaatgaaactttctgtcccatggaatgccctcagaacagtcactacgagctctgtgcggacacctgctccctgggctgctcggctctcagtgcccctctgcagtgcccagatgggtgtgctgagggctgccagtgtgactccggcttcctctacaacggccaagcctgcgtgcccatccagcaatgtggctgctaccacaatggtgtctactatgagccggagcagacagtcctcattgacaactgtcggcagcagtgcacgtgccatgtgggtaaagtcgtggtgtgccaggaacacagctgcaagccggggcaggtgtgccagccctccggaggcatcctgagctgcgtcaacaaagacccgtgccacggcgtgacatgccggccacaggagacatgcaaggagcagggtggccagggtgtgtgcctgcccaactatgaggccacgtgctggctgtggggcgacccacactaccactccttcgatggccggaagtttgacttccagggcacctgtaactatgtgctggcaacaactggctgcccgggggtcagcacccagggcctgacacccttcaccgtcaccaccaagaaccagaaccggggcaaccctgctgtatcctacgtgagagtcgtcaccgtggctgccctcggcaccaacatctccatccacaaggacgagatcggcaaagtccgggtgaacggtgtgctcacagccttgcctgtctccgtggccgacgggcggatttcagtggcccagggtgcatcgaaggcactgctggtggctgactttggactgcaagtcagctatgactggaactggcgggtagacgtgacgctccccagcagctatcatggcgcagtgtgcgggctctgcggtaacatggaccgcaaccccaacaatgaccaggtcttccctaatggcacactggctccctccatacccatctggggcggcagctggcgagccccaggctgggacccactgtgttgggacgaatgtcgggggtcctgcccaacgtgccctgaggaccggttggagcagtacgaggggcctggcttctgcggacccctggcatctggcacagggggccccttcaccacctgccatgctcatgtgccacctgagagcttcttcaagggctgtgttctggacgtctgcatgggtggtggggaccatgacattctttgcaaggctctggcttcctacgtggccgcctgccaggccgctggggttgtcatcgaagactggcgggcacaggttggctgtgagatcacctgcccagaaaacagccactatgaggtctgtggcccaccctgcccggccagctgtccgtcccctgcaccccttacgacgccagccgtatgtgagggcccctgtgtggagggctgccagtgcgacgcgggtttcgtgttaagtgctgaccgctgtgttcccctcaacaacggctgcggctgctgggccaatggcacctaccacgaggcgggcagtgagttttgggctgatggcacctgctcccagtggtgtcgctgcgggcctgggggtggctcgctggtctgcacacctgccagctgtgggctgggtgaagtgtgtggcctcctgccatccggccagcacggctgccagcccgtcagcacagctgagtgccaggcgtggggtgacccccattacgtcactctggatgggcaccgattcgatttccaaggcacctgcgagtacctgctgagtgcaccctgccacggaccacccttgggggctgagaacttcactgtcactgtagccaatgagcaccggggcagccaggctgtcagctacacccgcagtgtcaccctgcaaatctacaaccacagcctgacactgagtgcccgctggccccggaagctacaggtcgacggcgtgttcgtggctctgcctttccagctggactcgctcctgcacgcacacctgagcggcgccgacgtggtggtgaccacaacctcagggctctcgctggctttcgatggggacagcttcgtgcgcctgcgcgtgccggcggcgtacgcggcctctctctgtggcttatgcgggaactacaaccaggaccccgcagacgacctcaaggctgtgggcgggaagcccgctggatggcaggtgggcggggcccagggctgcggggaatgtgtgtccaagccatgcccgtcgccgtgcaccccagagcagcaggagtccttcggcggcccggacgcctgcggcgtgatctccgccaccgacggcccgctggcaccctgccacggccttgtgccgcccgcgcagtacttccagggctgcttgctggacgcctgccaagttcagggccatcctggaggcctctgtcctgcagtggctacctacgtggcagcctgtcaggccgctggggcccagctcggcgagtggaggcggccggacttctgtcccttgcagtgccctgcccacagccactatgagctctgcggtgactcctgccctgtgagctgcccgagcctctcagcacccgagggctgtgagtcggcctgccgtgaaggctgtgtctgcgatgctggcttcgtactcagtggtgacacctgcgtacccgtgggccagtgtggctgcctccatgatggccgctactacccactgggcgaggtcttctacccgggccctgagtgtgagcgacgctgtgagtgtgggccaggtggccatgtcacctgccaggagggcgcagcctgtgggccccatgaggagtgccggttagaggatggtgtccaggcctgtcatgccacaggctgtggccgctgcctggccaacgggggcatccactacatcacccttgatggccgtgtctacgacctgcatggctcctgctcctatgtcttggcccaagtctgccacccaaagcctggggacgaggacttttccatcgtgcttgagaagaatgcagctggacatctccaacgcctcctggttactgtggctggccaggttgtgagcctagctcaggggcagcaggtcaccgtggacggcgaggctgtggccctgcctgtggctgtgggccgcgtgcgggtgaccgccgagggccgaaacatggttctgcagacgaccaaggggctgcggcttctctttgatggcgatgcccacctcctcatgtccatccccagccccttccgtggacggctctgtggcctctgtgggaacttcaatggcaactggagtgacgactttgtcctgcccaatggctcagcagcgtccagtgtggagaccttcggggctgcatggcgggtgcccggctcctccaagggctgtggcgagggctgcgggccccaaggctgcccagtgtgcttggcagaggagactgcaccctatgagagcaacgaggcctgcgggcagctccggaacccccagggccccttcgcgacctgccaggcggtgctgagtccctctgagtacttccgccaatgcgtatacgacctgtgcgcgcaaaagggtgacaaagccttcctgtgccgcagcctggcagcctacacggcggcctgtcaggcagctggcgtggccgtgaagccctggaggacagacagcttctgcccgctccattgccccgcccacagccactactccatctgcactcgcacctgccagggatcctgtgcggctctctccggcctcacgggctgcaccacccgctgttttgagggctgtgagtgcgacgaccgcttcctgctttcccagggtgtctgcatccctgtccaagattgtggctgcacccataatggccgatacttgccggtaaactcctccctgctgacctcagactgcagcgagcgctgttcctgttcctcaagctctggcctgacatgccaggcagctggctgcccaccaggccgtgtatgtgaggtcaaggctgaagcccggaactgctgggccacccgtggtctctgtgtcctgtctgtgggtgccaacctcaccacctttgatggggcccgtggtgccaccacctctcctggtgtctatgagctctcttcccgctgcccaggactacagaataccatcccctggtaccgtgtagttgccgaagtccagatctgccatggcaaaacggaggctgtgggccaggtccacatcttcttccaggatgggatggtgacgttgactccaaacaagggtgtgtgggtgaatggtctccgagtggatctcccagctgagaagttagcatctgtgtccgtgagtcgtacacctgatggctccctgctagtccgccagaaggcaggggtccaggtgtggcttggagccaatgggaaggtggctgtgattgtcagcaatgaccatgctgggaaactgtgtggggcctgtggaaactttgacggggaccagaccaatgattggcatgactcccaggagaagccagcgatggagaaatggagagcgcaggacttctccccatggtgagggatgtagtatggaaaccaggcttcttggggcaaaggcacctggatcctcatgggatgagggcagtcagggtgggtgtttagtctgcaagcggaggtgctaaatgtctgtgtcttgcagttatggctgatcagtcatccaccaggaacgaagatttcctgaagaagacctggtccctctggaggttgcagtggctgaaggatgcatcatgtgctcctaccctgctctaccgcttttctgggtcacagaggccaaatgtgagagcattgaataaatatcttaagctaagctgca

SEQ ID NO: 433538 - DNA, 4196 bp, Homo sapiens
ctgcagccatgggtgccctatggagctggtggatactctgggctggagcaaccctcctgtggggattgacccaggaggcttcagtggacctcaagaacactggcagagaggaattcctcacagccttcctgcagaactatcagctggcctacagcaaggcctacccccgcctccttatctccagtctgtcagagagccccgcttcagtctccatcctcagccaggcagacaacacctcaaagaaggtcacagtgaggcccggggagtcggtcatggtcaacatcagtgccaaggctgagatgataggcagcaagatcttccagcatgcggtggtgatccattctgactatgccatctctgtgcaggcactaaatgccaagcctgacacagcggagctgacactgctgcggcccatccaggccctaggcaccgagtattttgtgctcacaccccccggcacctcagccaggaatgtcaaggagtttgccgtggtggccggtgccgcaggtgcctcggtcagtgtcacgctgaaggggtcagtgacattcaatggcaagttctatccagcaggcgatgtcctaagagtgactctacagccctacaatgtggcccagctacagagctcagtggatctctcggggtcaaaggtcacagctagtagccccgtggctgtcctctctggccacagctgtgcgcagaaacatacgacctgcaaccatgtggttgagcagctgctacccacgtctgcctggggcacccactatgtagtacccacgctggcctcccaatctcgctatgatttggccttcgttgtggccagccaggccacaaagctgacctacaaccatgggggtatcactggctcccgtgggctccaggcaggtgatgtggtagagtttgaggtccggccatcctggccactctacctgtctgcaaatgtgggcatccaggtcctgttgtttggcacaggtgccataaggaatgaagtgacttatgacccctacctggtcctgatcccagatgtggcggcctactgcccagcctatgtggtcaagagtgtaccaggctgtgagggcgtggccctggtagtggcacagacgaaggctatcagcgggctgaccatagatgggcatgcagtgggggccaagctcacctgggaggctgtgccaggcagtgagttctcgtatgctgaagtggagctcggcacagctgacatgatccacacggccgaggccaccaccaacttgggactgctcaccttcgggctggccaaggctataggctacgcaacagctgctgattgcggccggactgtactgtccccagtggagccctcctgcgaaggcatgcagtgcgcagccgggcagcgctgccaggtggtaggcgggaaggccgggtgtgtggcggagtccaccgctgtctgccgcgcccagggcgacccccattacaccaccttcgacggccgtcgctacgacatgatgggcacctgttcgtacacgatggtggagctgtgcagcgaggacgacaccctgcccgccttcagcgtggaggccaagaacgagcaccggggcagccgccgcgtctcctacgtgggcctcgtcactgtgcgcgcctacagccactctgtgtcgctgacccgcggtgaagttggcttcgtcctggttgacaaccagcgctcgcgcctgccagtctccctgagtgagggtcgcctgcgtgtgtaccagagcggaccacgggccgtggtggagctggtctttgggctggtggtcacttatgactgggactgccagctggcactcagcctgcctgcacgcttccaagaccaggtgtgcgggctgtgtggcaactataatggtgacccagcagacgacttcctcacgcctgacggggctctggctcctgacgctgtggagttcgcaagtagctggaagctggatgatggggactacctgtgtgaggatggctgccagaacaactgtcccgcctgcaccccaggccaggcccaacactatgagggcgaccgactctgtggcatgctgaccaagctcgatggccccttcgctgtctgccatgacaccctggaccccaggcccttcctggagcagtgtgtatatgacctgtgtgtggtcggtggggagcggctcagcctgtgccgtggcctcagcgcctatgcccaggcctgtctggagcttggcatctcggttggggactggagatcaccagccaactgccccctgtcctgccctgccaacagccgctatgagctctgcggccctgcttgcccgacctcctgcaacggggctgcggcgccgtccaactgctccgggcgcccctgcgtggagggctgcgtgtgcctcccaggcttcgtggccagcggcggcgcctgcgtgccggcctcgtcgtgtggctgcaccttccagggtctccagctcgctccgggccaggaagtgtgggcggacgagttgtgccaaaggcgctgcacctgcaacggcgccacccatcaggtcacctgccgcgacaagcagagctgcccggcgggtgagcgctgcagcgtccagaacggcctcctgggctgctaccccgatcgcttcgggacctgccaggggtccggggacccacactatgtgagcttcgacggccggcgcttcgacttcatgggcacctgcacgtacctgctggtcggctcatgcggccagaacgcagcgctgcctgccttccgggtgctggtggaaaacgagcatcggggcagccagactgtgagctacacgcgcgccgtgcgggtggaggcccgcggggtgaaggtggccgtgcgccgggagtaccccgggcaagtgctggtggatgacgtccttcagtatctgcccttccaagcagcagatgggcaggtgcaggtgttccgacagggcagggatgccgtcgtgcgcacggactttggcctgactgtcacttatgactggaatgcacgagtgactgccaaggtgcccagcagctatgctgaggccctgtgtggactctgtgggaacttcaacggggacccagctgatgacctggctctgcggggtgggggtcaagctgccaatgcactggcctttgggaacagctggcaagaagagacgaggcccggctgtggagcaactgaaccgggtgactgtcccaagctggactccctggtggcccagcagctgcagagcaagaatgagtgtggaatccttgccgaccccaaggggcccttccgggagtgccatagcaagctggacccccagggtgccgtgcgcgactgtgtctatgaccgctgcctgctgccaggccagtctgggccactgtgtgacgcactggccacctatgctgctgcatgccaggctgctggagccacagtgcacccctggaggagtgaagaactttgcccactgagctgcccaccccacagccactatgaggcgtgttcctacggctgcccgctgtcctgtggagacctcccagtgcccgggggctgtggctcagaatgccatgagggctgcgtgtgcgatgagggctttgcgctcagtggtgagtcctgcctgcccctggcctcctgtggctgcgtacaccagggcacctaccacccaccaggccagaccttctaccctggccccggatgtgattccctttgccactgccaggagggcggcctggtgtcctgtgagtcctccagctgcggaccgcacgaggcctgccagccatccggtggcagcttgggctgtgtggccgtgggctctagcacctgccaggcgtcaggagacccccactacaccaccttcgatggccgccgcttcgacttcatgggcacctgcgtgtatgtgctggctcagacctgcggcacccggcctggcctgcatcggtttgccgtcctgcaggagaacgtggcctggggtaatgggcgagtcagtgtgaccagggtgatcacggtccaggtggcaaacttcaccctgcggctggagcagagacagtggaaggtcacggtgaacggtgtggacatgaagctgcccgtggtgctggccaacggccagatccgtgcctcccagcatggttcagaatatagccaccctgacctggaagaggccagtgcttgtgtcctagcagagcctgtctgctgtaaacagcatgacaatttctcggcacctgggagccatccccacctgtgagccatcacggaccga

SEQ ID NO: 433539 - DNA, 223 bp, Homo sapiens
aacgaaaatactggttttgttttactgagaggcactgtgggtttttgttttgttttgctttgctttgtttagtttacagccgggaaatcccaatatggaccctaaggaactgcagaagacatccttagacggagagttactctcacgaaagagtaggggattctgaagccgatgatccccttgagctctaaactgccaagtcccgccctttctgtctcgtcac

SEQ ID NO: 433540 - DNA, 1610 bp, Homo sapiens
ggttctgagcgtgtctgtgtttaaccttgatttcagtcttgcctccctgctttccgcgtcctgacattacggctaaaattgcagttacagcttcttttacaaggagaagaatgtggaaagaataaccaatttgatgtaatttataagagctaccgggaggggtgaagggaagtcgtttgattggctaaaagcggagccgtatctaacagccaatagaaaagcagaaagccgcctcttggtttgcgtcctgcactgaaaggaaatgacggattttactttctgaccaccttaccagtggggagaatccgagactacagttcccatgagccctcagggcaccacgtggtgcctgcccgtgctaccaacgcgcagcgaggactccatttcccagcgtgcctcaggaagggcgccaggactgcattttgctccggagcgtccagagtcctggccctgagcgggaatcgcagtggccgaggctgagcggcaggtagaaggggcgtctccggggcttcacagggaacacaggggcttcggccaaccacaagtacgcagttgcacatgccctacttttgcccattctttgcaaatcccctaaggaacgaacgcgcctcggtgcgggcctttctaatcttcgcttgtcccttcacttccacagctggaggtcgaattcaccacgtcacgtagagaaaaggggcggtgtctcgggtctccccgtgtgggcatcaaggcgggctccctataggagctggtgtggacgtccgggcgtggggttagggcggatgcgggggatcgcggggcgggtgttgacattgtgctctcaccaggcggatcgccccgaccctcactcctggcgtctgagtctctggcgtagcccatgctgagtgggcggctggtcctgggtctggtctccatggctggccgcgtttgtttgtgccagggcagcgcgggatccggggccatcggtccggtggaggccgccattcgcacgaagttggaggaggccctgagccccgaggtgctagagcttcgcaacgagagcggtggccacgcggtcccgcctggcagtgagactcacttccgcgtggctgtggtgagctctcgtttcgagggactgagccccctacaacgacaccggctggtccacgcagcgctggccgaggagctgggaggtccggtccatgcgctggccatccaggcacggacccccgcccagtggagagagaactctcagctggacactagccccccatgcctgggtgggaacaagaaaactctaggaaccccctgaaccccaagagagggaggaccaggatccgaatgggctgggtgagcacgaattaccgaggccttccctttgatacagtccaggatttgtaagggatgaagacccctgggccccattctgttggggtccatacatactctccgaagatagcaacttgcttcaggtcaaagtgaacccgagaaaagagaagaatcactcactactgctcttgccctggactattcaggaagggcagcccggatgttccatgttaaatcgtgacagaattgcaccagacctgatgagttggaaacaatcctatacattaaaagaaattacactatga

SEQ ID NO: 433541 - DNA, 1442 bp, Homo sapiens
ggttctgagcgtgtctgtgtttaaccttgatttcagtcttgcctccctgctttccgcgtcctgacattacggctaaaattgcagttacagcttcttttacaaggagaagaatgtggaaagaataaccaatttgatgtaatttataagagctaccgggaggggtgaagggaagtcgtttgattggctaaaagcggagccgtatctaacagccaatagaaaagcagaaagccgcctcttggtttgcgtcctgcactgaaaggaaatgacggattttactttctgaccaccttaccagtggggagaatccgagactacagttcccatgagccctcagggcaccacgtggtgcctgcccgtgctaccaacgcgcagcgaggactccatttcccagcgtgcctcaggaagggcgccaggactgcattttgctccggagcgtccagagtcctggccctgagcgggaatcgcagtggccgaggctgagcggcagctggaggtcgaattcaccacgtcacgtagagaaaaggggcggtgtctcgggtctccccgtgtgggcatcaaggcgggctccctataggagctggtgtggacgtccgggcgtggggttagggcggatgcgggggatcgcggggcgggtgttgacattgtgctctcaccaggcggatcgccccgaccctcactcctggcgtctgagtctctggcgtagcccatgctgagtgggcggctggtcctgggtctggtctccatggctggccgcgtttgtttgtgccagggcagcgcgggatccggggccatcggtccggtggaggccgccattcgcacgaagttggaggaggccctgagccccgaggtgctagagcttcgcaacgagagcggtggccacgcggtcccgcctggcagtgagactcacttccgcgtggctgtggtgagctctcgtttcgagggactgagccccctacaacgacaccggctggtccacgcagcgctggccgaggagctgggaggtccggtccatgcgctggccatccaggcacggacccccgcccagtggagagagaactctcagctggacactagccccccatgcctgggtgggaacaagaaaactctaggaaccccctgaaccccaagagagggaggaccaggatccgaatgggctgggtgagcacgaattaccgaggccttccctttgatacagtccaggatttgtaagggatgaagacccctgggccccattctgttggggtccatacatactctccgaagatagcaacttgcttcaggtcaaagtgaacccgagaaaagagaagaatcactcactactgctcttgccctggactattcaggaagggcagcccggatgttccatgttaaatcgtgacagaattgcaccagacctgatgagttggaaacaatcctatacattaaaagaaattacactatga

SEQ ID NO: 433542 - DNA, 1160 bp, Homo sapiens
ggttctgagcgtgtctgtgtttaaccttgatttcagtcttgcctccctgctttccgcgtcctgacattacggctaaaattgcagttacagcttcttttacaaggagaagaatgtggaaagaataaccaatttgatgtaatttataagagctaccgggaggggtgaagggaagtcgtttgattggctaaaagcggagccgtatctaacagccaatagaaaagcagaaagccgcctcttggtttgcgtcctgcactgaaaggaaatgacggattttactttctgaccaccttaccagtggggagaatccgagactacagttcccatgagccctcagggcaccacgtggtgcctgcccgtgctaccaacgcgcagcgaggactccatttcccagcgtgcctcaggaagggcgccaggactgcattttgctccggagcgtccagagtcctggccctgagcgggaatcgcagtggccgaggctgagcggcagggcagcgcgggatccggggccatcggtccggtggaggccgccattcgcacgaagttggaggaggccctgagccccgaggtgctagagcttcgcaacgagagcggtggccacgcggtcccgcctggcagtgagactcacttccgcgtggctgtggtgagctctcgtttcgagggactgagccccctacaacgacaccggctggtccacgcagcgctggccgaggagctgggaggtccggtccatgcgctggccatccaggcacggacccccgcccagtggagagagaactctcagctggacactagccccccatgcctgggtgggaacaagaaaactctaggaaccccctgaaccccaagagagggaggaccaggatccgaatgggctgggtgagcacgaattaccgaggccttccctttgatacagtccaggatttgtaagggatgaagacccctgggccccattctgttggggtccatacatactctccgaagatagcaacttgcttcaggtcaaagtgaacccgagaaaagagaagaatcactcactactgctcttgccctggactattcaggaagggcagcccggatgttccatgttaaatcgtgacagaattgcaccagacctgatgagttggaaacaatcctatacattaaaagaaattacactatga

SEQ ID NO: 433543 - DNA, 1538 bp, Homo sapiens
ggttctgagcgtgtctgtgtttaaccttgatttcagtcttgcctccctgctttccgcgtcctgacattacggctaaaattgcagttacagcttcttttacaaggagaagaatgtggaaagaataaccaatttgatgtaatttataagagctaccgggaggggtgaagggaagtcgtttgattggctaaaagcggagccgtatctaacagccaatagaaaagcagaaagccgcctcttggtttgcgtcctgcactgaaaggaaatgacggattttactttctgaccaccttaccagtggggagaatccgagactacagttcccatgagccctcagggcaccacgtggtgcctgcccgtgctaccaacgcgcagcgaggactccatttcccagcgtgcctcaggaagggcgccaggactgcattttgctccggagcgtccagagtcctggccctgagcgggaatcgcagtggccgaggctgagcggcaggtagaaggggcgtctccggggcttcacagggaacacaggggcttcggccaaccacaagtacgcagttgcacatgccctacttttgcccattctttgcaaatcccctaaggaacgaacgcgcctcggtgcgggcctttctaatcttcgcttgtcccttcacttccacagctggaggtcgaattcaccacgtcacgtagagaaaaggggcggtgtctcgggtctccccgtgtgggcatcaaggcgggctccctataggagctggtgtggacgtccgggcgtggggttagggcggatgcgggggatcgcggggcgggtgttgacattgtgctctcaccaggcggatcgccccgaccctcactcctggcgtctgagtctctggcgtagcccatgctgagtgggcggctggtcctgggtctggtctccatggctggccgcgtttgtttgtgccagggcagcgcgggatccggggccatcggtccggtggaggccgccattcgcacgaagttggaggaggccctgagccccgaggtgctagactctcgtttcgagggactgagccccctacaacgacaccggctggtccacgcagcgctggccgaggagctgggaggtccggtccatgcgctggccatccaggcacggacccccgcccagtggagagagaactctcagctggacactagccccccatgcctgggtgggaacaagaaaactctaggaaccccctgaaccccaagagagggaggaccaggatccgaatgggctgggtgagcacgaattaccgaggccttccctttgatacagtccaggatttgtaagggatgaagacccctgggccccattctgttggggtccatacatactctccgaagatagcaacttgcttcaggtcaaagtgaacccgagaaaagagaagaatcactcactactgctcttgccctggactattcaggaagggcagcccggatgttccatgttaaatcgtgacagaattgcaccagacctgatgagttggaaacaatcctatacattaaaagaaattacactatga

SEQ ID NO: 433544 - DNA, 1273 bp, Homo sapiens
ggttctgagcgtgtctgtgtttaaccttgatttcagtcttgcctccctgctttccgcgtcctgacattacggctaaaattgcagttacagcttcttttacaaggagaagaatgtggaaagaataaccaatttgatgtaatttataagagctaccgggaggggtgaagggaagtcgtttgattggctaaaagcggagccgtatctaacagccaatagaaaagcagaaagccgcctcttggtttgcgtcctgcactgaaaggaaatgacggattttactttctgaccaccttaccagtggggagaatccgagactacagttcccatgagccctcagggcaccacgtggtgcctgcccgtgctaccaacgcgcagcgaggactccatttcccagcgtgcctcaggaagggcgccaggactgcattttgctccggagcgtccagagtcctggccctgagcgggaatcgcagtggccgaggctgagcggcaggcggatcgccccgaccctcactcctggcgtctgagtctctggcgtagcccatgctgagtgggcggctggtcctgggtctggtctccatggctggccgcgtttgtttgtgccagggcagcgcgggatccggggccatcggtccggtggaggccgccattcgcacgaagttggaggaggccctgagccccgaggtgctagagcttcgcaacgagagcggtggccacgcggtcccgcctggcagtgagactcacttccgcgtggctgtggtgagctctcgtttcgagggactgagccccctacaacgacaccggctggtccacgcagcgctggccgaggagctgggaggtccggtccatgcgctggccatccaggcacggacccccgcccagtggagagagaactctcagctggacactagccccccatgcctgggtgggaacaagaaaactctaggaaccccctgaaccccaagagagggaggaccaggatccgaatgggctgggtgagcacgaattaccgaggccttccctttgatacagtccaggatttgtaagggatgaagacccctgggccccattctgttggggtccatacatactctccgaagatagcaacttgcttcaggtcaaagtgaacccgagaaaagagaagaatcactcactactgctcttgccctggactattcaggaagggcagcccggatgttccatgttaaatcgtgacagaattgcaccagacctgatgagttggaaacaatcctatacattaaaagaaattacactatga

SEQ ID NO: 433545 - DNA, 1499 bp, Homo sapiens
ggttctgagcgtgtctgtgtttaaccttgatttcagtcttgcctccctgctttccgcgtcctgacattacggctaaaattgcagttacagcttcttttacaaggagaagaatgtggaaagaataaccaatttgatgtaatttataagagctaccgggaggggtgaagggaagtcgtttgattggctaaaagcggagccgtatctaacagccaatagaaaagcagaaagccgcctcttggtttgcgtcctgcactgaaaggaaatgacggattttactttctgaccaccttaccagtggggagaatccgagactacagttcccatgagccctcagggcaccacgtggtgcctgcccgtgctaccaacgcgcagcgaggactccatttcccagcgtgcctcaggaagggcgccaggactgcattttgctccggagcgtccagagtcctggccctgagcgggaatcgcagtggccgaggctgagcggcaggtagaaggggcgtctccggggcttcacagggaacacaggggcttcggccaaccacaactggaggtcgaattcaccacgtcacgtagagaaaaggggcggtgtctcgggtctccccgtgtgggcatcaaggcgggctccctataggagctggtgtggacgtccgggcgtggggttagggcggatgcgggggatcgcggggcgggtgttgacattgtgctctcaccaggcggatcgccccgaccctcactcctggcgtctgagtctctggcgtagcccatgctgagtgggcggctggtcctgggtctggtctccatggctggccgcgtttgtttgtgccagggcagcgcgggatccggggccatcggtccggtggaggccgccattcgcacgaagttggaggaggccctgagccccgaggtgctagagcttcgcaacgagagcggtggccacgcggtcccgcctggcagtgagactcacttccgcgtggctgtggtgagctctcgtttcgagggactgagccccctacaacgacaccggctggtccacgcagcgctggccgaggagctgggaggtccggtccatgcgctggccatccaggcacggacccccgcccagtggagagagaactctcagctggacactagccccccatgcctgggtgggaacaagaaaactctaggaaccccctgaaccccaagagagggaggaccaggatccgaatgggctgggtgagcacgaattaccgaggccttccctttgatacagtccaggatttgtaagggatgaagacccctgggccccattctgttggggtccatacatactctccgaagatagcaacttgcttcaggtcaaagtgaacccgagaaaagagaagaatcactcactactgctcttgccctggactattcaggaagggcagcccggatgttccatgttaaatcgtgacagaattgcaccagacctgatgagttggaaacaatcctatacattaaaagaaattacactatga

SEQ ID NO: 433546 - DNA, 391 bp, Homo sapiens
ccccaccgggaactggagaccagcgcgggacgagcgcgacttggccttagcgcgggccttgcctccctgctttccgcgtcctgacattacggctaaaattgcagttacagcttcttttacaaggagaagaatgtggaaagaataaccaatttgatgtaatttataagagctaccgggaggggtgaagggaagtcgtttgattggctaaaagcggagccgtatctaacagccaatagaaaagcagaaagccgcctcttggtttgcgtcctgcactgaaaggaaatgacggattttgtaagtatctaccaatcgctgagagccacattaaagccccttatttgcatgccaggatctttaaagagagcaggctttcaaacgaaaatactggttt

SEQ ID NO: 433547 - DNA, 883 bp, Homo sapiens
tattgctgttgaaggcaaggatgggcctgtacaaagcagccttggaccaggagggaaaaccccaaggctctgcagcctccctgctcccctccgtttaaggctgtggtcagggagggatgggcagggtgccagccgcatggaggcagcagagacacccgtgttccagctggggcaaggggaactgatatgtgggctgtgggctgttccactaggcgtggccacctctgcacatgggccttggcacttaggaaatatgggtgctgctgcattgggaccttgtgtgggtgcagagcaggatggctgctgcgtggagggtaattttgtcccctggagagtgattggtgaccctcttccctgctgctgctgtttgcaggctcctggcctatactacctctgacgccctgatcctgagttcctctgccctcctctgctgccagcagcgctgttggtggcctcaccctcctccagtacccaggcaccaaagatggcaccaccatcctcctgcttgtaccacagggtgctgctccctgggccaactcctgtgaacttgctcacttcccatggagaccgaggccagggcctgcccctctgaggcccctgttttgtggtcctgctgcctctgctgtgctgcgttcaggaggttgtccactgctcgacgtgggtcaccatgcagcccttgctgttcccacaatttaacagaaaaggaaactgaacggatgagtaaggctgcccagggtcactcagctggaaaagagtagagctggactcaaacccgggactgtctgtctctggtgcctgagttgggaagacgctgttgatgtccccttctgcctcgctttgagcttcctcctccgtgggccctccccctactctagagaaacta

SEQ ID NO: 433548 - DNA, 924 bp, Homo sapiens
cgcgcgcgtgtagagagtgagtttgtttcgcctggaaaaaagaatagtcgcccgctagaagcgttgggaattatgttcttgcgccgaaccgacgggcgtcgaatcgtatgttgcgtgtggtgttgggccgcccagttgtcacatagtatgacggcgagtctactcgctcgaaagatctattgtggcggtcgctttgtttctggtatacagtctcgatctcgcgtggaggaggtcgggtgttgcgtcatcaactagtggtctagccggtctgtagatttattatatagaggtgcgcttcccctcgtcccggatagttatttctgcgttcgttgttgtgtcgctcctcgtgctgtttcttatagtgtcgctgcggccgtcggtcgccccggcggcctgtattagtgccgccccccctctcttcttttttttttttgttcttttttttttttgtgtctcttttgtttgttttttttttttttttgtttctttttttttttttttttttttttttttttttttttttttttttttttttttttttttttttttttttttttttttttgggaatgagaaaataactttatttcattgtgaggagcggagcttgctaggcatcaggaactcaagaaaggcttttaactactttatgatttgtgaaccacatgaatggattacctattcaaaacattaagaaagaaatattcagcactgaacaaccaagtcagagttcactgtgggcaaaggcagagatgaccaaggaagaaaggggccaggtgaacctgggcctcagggaaagcccctacagctcaggaagctttttggctgaggttctgttcctatcaatcatgatggcagaggagcccatgtaacccagatgatgttatgtggtatcagcagaccccatgacaccagtgctgctggct

SEQ ID NO: 433549 - DNA, 1385 bp, Homo sapiens
aactaaaaaaattattggccgggcgcagtggctcacgcctgtaatcccagcactttgggagttacaggcgtgagccatcgcgcccgaccagaagcattttcttttcaaagtgtgtgcacagagtgaggaggccagcctgggcaacttagtgagttgagacctgtctctacaaaaaaataattacgaaaattagccaggtgtgctggtgtgcacctgtagacgcagctacagactgaggcgggaggatcacttgagtccaggaagttgaggctgcagtgagctacaatggtgccactgcactccagtctgggtaacaagaccctgtctcaacaacaacgaaaagttgggagggaaagggagtagctccatgaactgacgctggacattcaggcatatccacatgagactcactgtgcacttgctcagtagctaagatgtctgccccacaaaatagaagccttcagttgctgctgctcaaactcctgcatcaaagacacaagagcttgcctaagtgaccacaacagttgcagccacacatcaccactggtcctcacttggaactggccaaggtaggggaggggccagcagctgtccaggcacctgcagaggctgctcagagctgggagaggcctgtgccactgctgtcagctacagagcctgatcttgagcatcctgtcgcagatagaaagtcaatcagaaaaatctggttgtgctcttggattagctgggcatttggggtaagggagggactgcagattctgatttgtacagaaaactaaaatttcagtatgttgcaataaaatgaaaatatgtcttactcaacaggagtgtgattgcaaaaacatcccccaattctgggttcacattttgtattctgatttctgggatggctcttcccacattagtaggagcgttccttgaatacacttgtctggtatcacatgagtagaaaaggagaaaaattatatagacacacatacacatgtgtgtacatgcataaatgatctctggaaggatacccaaggaacaaaccaatagtaggtattcatggagtgaggagcggagcttgctaggcatcaggaactcaagaaaggcttttaactactttatgatttgtgaaccacatgaatggattacctattcaaaacattaagaaagaaatattcagcactgaacaaccaagtcagagttcactgtgggcaaaggcagagatgaccaaggaagaaaggggccaggtgaacctgggcctcagggaaagcccctacagctcaggaagctttttggctgaggttctgttcctatcaatcatgatggcagaggagcccatgtaacccagatgatgttatgtggtatcagcagaccccatgacaccagtgctgctggct

SEQ ID NO: 433550 - DNA, 1279 bp, Homo sapiens
aactaaaaaaattattggccgggcgcagtggctcacgcctgtaatcccagcactttgggagttacaggcgtgagccatcgcgcccgaccagaagcattttcttttcaaagtgtgtgcacagagtgaggaggccagcctgggcaacttagtgagttgagacctgtctctacaaaaaaataattacgaaaattagccaggtgtgctggtgtgcacctgtagacgcagctacagactgaggcgggagggaaagggagtagctccatgaactgacgctggacattcaggcatatccacatgagactcactgtgcacttgctcagtagctaagatgtctgccccacaaaatagaagccttcagttgctgctgctcaaactcctgcatcaaagacacaagagcttgcctaagtgaccacaacagttgcagccacacatcaccactggtcctcacttggaactggccaaggtaggggaggggccagcagctgtccaggcacctgcagaggctgctcagagctgggagaggcctgtgccactgctgtcagctacagagcctgatcttgagcatcctgtcgcagatagaaagtcaatcagaaaaatctggttgtgctcttggattagctgggcatttggggtaagggagggactgcagattctgatttgtacagaaaactaaaatttcagtatgttgcaataaaatgaaaatatgtcttactcaacaggagtgtgattgcaaaaacatcccccaattctgggttcacattttgtattctgatttctgggatggctcttcccacattagtaggagcgttccttgaatacacttgtctggtatcacatgagtagaaaaggagaaaaattatatagacacacatacacatgtgtgtacatgcataaatgatctctggaaggatacccaaggaacaaaccaatagtaggtattcatggagtgaggagcggagcttgctaggcatcaggaactcaagaaaggcttttaactactttatgatttgtgaaccacatgaatggattacctattcaaaacattaagaaagaaatattcagcactgaacaaccaagtcagagttcactgtgggcaaaggcagagatgaccaaggaagaaaggggccaggtgaacctgggcctcagggaaagcccctacagctcaggaagctttttggctgaggttctgttcctatcaatcatgatggcagaggagcccatgtaacccagatgatgttatgtggtatcagcagaccccatgacaccagtgctgctggct

SEQ ID NO: 433551 - DNA, 1349 bp, Homo sapiens
tattgctgttgaaggcaaggatgggcctgtacaaagcagccttggaccaggagggaaaaccccaaggctctgcagcctccctgctcccctccgtttaaggctgtggtcagggagggatgggcagggtgccagccgcatggaggcagcagagacacccgtgttccagctggggcaaggggaactgatatgtgggctgtgggctgttccactaggcgtggccacctctgcacatgggccttggcacttaggaaatatgggtgctgctgcattgggaccttgtgtgggtgcagagcaggatggctgctgcgtggagggtaattttgtcccctggagagtgattggtgaccctcttccctgctgctgctgtttgcaggctcctggcctatactacctctgacgccctgatcctgagttcctctgccctcctctgctgccagcagcgctgttggtggcctcaccctcctccagtacccaggcaccaaagatggcaccaccatcctcctgcttgtaccacagggtgctgctccctgggccaactcctgtgaacttgctcacttcccatggagaccgaggctgctcagagctgggagaggcctgtgccactgctgtcagctacagagcctgatcttgagcatcctgtcgcagatagaaagtcaatcagaaaaatctggttgtgctcttggattagctgggcatttggggtaagggagggactgcagattctgatttgtacagaaaactaaaatttcagtatgttgcaataaaatgaaaatatgtcttactcaacaggagtgtgattgcaaaaacatcccccaattctgggttcacattttgtattctgatttctgggatggctcttcccacattagtaggagcgttccttgaatacacttgtctggtatcacatgagtagaaaaggagaaaaattatatagacacacatacacatgtgtgtacatgcataaatgatctctggaaggatacccaaggaacaaaccaatagtaggtattcatggagtgaggagcggagcttgctaggcatcaggaactcaagaaaggcttttaactactttatgatttgtgaaccacatgaatggattacctattcaaaacattaagaaagaaatattcagcactgaacaaccaagtcagagttcactgtgggcaaaggcagagatgaccaaggaagaaaggggccaggtgaacctgggcctcagggaaagcccctacagctcaggaagctttttggctgaggttctgttcctatcaatcatgatggcagaggagcccatgtaacccagatgatgttatgtggtatcagcagaccccatgacaccagtgctgctggct

SEQ ID NO: 433552 - DNA, 1708 bp, Homo sapiens
cttcagcctatggaatgctttaaaaaatgttaatggaaagccccaggagaccattttaggtaagacttttgtttgaattttaaaatgcatagaacgttaaaaaaaaccagcaatttattttctaaaatattgctctacttttgggaataatagcattggtaatacgcacaggtttacctcattctatgcaagaggggttaataacataaggttttataatagctactggaagtaaaatttgttactttatagtgtaagaatgtatggaatcgcatgtcaccatttcttaatactgactctttaggggcataaatgcagatcacatcaacgcaagttgattctcatgtgtcaaatatatgtgaattcagctgttaaattactggatatttatcttaacattgctgagagggacctactgtaaatgtgacatcctcacacttcccatatctttaactttgaaaaatcttcttgtaaacttaaagcctagaagtattccaaagcaagggttacagcagtctttattctcaggctcactgaattaaacccaggactaattccacagcacaggcacaagaagcctgttgtgtagtgtactctgccagtaccttggatttaggagctccatggggaactgactaaaccaggagagagaggatttggagctagtcagtcctggtaatctatgaaatgctcatttatacccaggtttcataagcttccaattctatagcaaacccaggctctgagtgttttagaatttcctaattcatgaagtgtttcttgtcttgatcccgtgaccaacagttgaaggttggtaaggacttttctacagtctgaacacaacctaaagccctctttcattgttcacacactaactcctactgccgacgaaccgaaaaataattaatgcagaggagatttatgtcttagccataactccagttgtacaactcaatcgccccattctcttttacggttcaaaatgtactgctgaccttgggtttgtttttgttttgttttgtttttcctgttaggatttatttggggacttttggtagtttaaactctttaaccttttccttgccgtgtatgaggaaagctaaagctgttatcaacttcttattctacgatactaacacgggttttcagtgtttgtttgtttttattattattattaattttgcgtgatgtgaataccctctcccatcaatatttgtattatggtgctatatattggtaatgatcctttaatattgggaagggattttaaaaatactgtgattaaactgggtttcttcctttgattttcatattttaaataaagccacagtcatttatacaaaagaaaagcatctgtccctgggcaaatcttttgaggacagaggtcaaagtaaactgcataaggtttttacatcatttctgtatgtatttgatatatagatcaatatctgtacaaatttaatcttttattttcttggtaactcgtgatcattgagaaagtgtttgaaactttctcatgaagtgtatatataatggcgtgaaaaattcctttggaaaaatttatgttcctttcatttttaccaaattgcaaattttcagcatggatgtgaaaagcattaaaattataactttgtgtacaagatgaaaataattcactaaatttgcccttttttacacaaaataaaatgttaaagttaaaaaaaaaaaa

SEQ ID NO: 433553 - DNA, 374 bp, Homo sapiens
ttttggtaatcaaatatttcaaaaggtgagtctcctttggggtgattctctcacacagaaagatgattcttggaggaaacatatctaagcatcctccaaggtagtgtcagcattcaaagttgatcctgaattatctctgcagacactttttgtgttgggcattatgctgaagccatttgttgtagagcaagttgatttttatggctgagcttatctgaatttagtttgatatattgtattctttatttattcattcattgattcactgattcattcatttttcctgacattcaaacaaatgtttcttgaacacattgtgaaagggccaggcatttgtcaggtaatgagggtataatggtaaacaaggtagacac

SEQ ID NO: 433554 - DNA, 1847 bp, Homo sapiens
gtccaccccatgggtggagtctcgctttttctttccagtgttggctgacttacagctcttataaactagtggcaatttctgaacccagccggctccatctcagcttctggtttctaagtccatgtgccaaaggctgccaggaaggagacgccttcctgagtcctggatctttcttccttctggaaatctttgactgtgggtagttatttatttctgaataagagcgtccacgcatcatggacctcgcgggactgctgaagtctcagttcctgtgccacctggtcttctgctacgtctttattgcctcagggctaatcatcaacaccattcagctcttcactctcctcctctggcccattaacaagcagctcttccggaagatcaactgcagactgtcctattgcatctcaagccagctggtgatgctgctggagtggtggtcgggcacggaatgcaccatcttcacggacccgcgcgcctacctcaagtatgggaaggaaaatgccatcgtggttctcaaccacaagtttgaaattgactttctgtgtggctggagcctgtccgaacgctttgggctgttagggggctccaaggtcctggccaagaaagagctggcctatgtcccaattatcggctggatgtggtacttcaccgagatggtcttctgttcgcgcaagtgggagcaggatcgcaagacggttgccaccagtttgcagcacctccgggactaccccgagaagtattttttcctgattcactgtgagggcacacggttcacggagaagaagcatgagatcagcatgcaggtggcccgggccaaggggctgcctcgcctcaagcatcacctgttgccacgaaccaagggcttcgccatcaccgtgaggagcttgagaaatgtagtttcagctgtatatgactgtacactcaatttcagaaataatgaaaatccaacactgctgggagtcctaaacggaaagaaataccatgcagatttgtatgttaggaggatcccactggaagacatccctgaagacgatgacgagtgctcggcctggctgcacaagctctaccaggagaaggatgcctttcaggaggagtactacaggacgggcaccttcccagagacgcccatggtgcccccccggcggccctggaccctcgtgaactggctgttttgggcctcgctggtgctctaccctttcttccagttcctggtcagcatgatcaggagcgggtcttccctgacgctggccagcttcatcctcgtcttctttgtggcctccgtgggagttcgatggatgattggtgtgacggaaattgacaagggctctgcctacggcaactctgacagcaagcagaaactgaatgactgactcagggaggtgtcaccatccgaagggaaccttggggaactggtggcctctgcatatcctccttagtgggacacggtgacaaaggctgggtgagcccctgctgggcacggcggaagtcacgacctctccagccagggagtctggtctcaaggccggatggggaggaagatgttttgtaatctttttttccccatgtgctttagtgggctttggttttctttttgtgcgagtgtgtgtgagaatggctgtgtggtgagtgtgaactttgttctgtgatcatagaaagggtattttaggctgcaggggagggcagggctggggaccgaaggggacaagttcccctttcatcctttggtgctgagttttctgtaacccttggttgccagagataaagtgaaaagtgctttaggtgagatgactaaattatgcctccaagaaaaaaaaattaaagtgcttttctgggtcaaaaaaagt

SEQ ID NO: 433555 - DNA, 994 bp, Homo sapiens
gtccaccccatgggtggagtctcgctttttctttccagtgttggctgacttacagctcttataaactagtggcaatttctgaacccagccggctccatctcagcttctggtttctaagtccatgtgccaaaggctgccaggaaggagacgccttcctgagtcctggatctttcttccttctggaaatctttgactgtgggtagttatttatttctgaataagagcgtccacgcatcatggacctcgcgggactgctgaagtctcagttcctgtgccacctggtcttctgctacgtctttattgcctcagggctaatcatcaacaccattcagctcttcactctcctcctctggcccattaacaagcagctcttccggaagatcaactgcagactgtcctattgcatctcaagccagctggtgatgctgctggagtggtggtcgggcacggaatgcaccatcttcacggacccgcgcgcctacctcaagtatgggaaggaaaatgccatcgtggttctcaaccacaagtttgaaattgactttctgtgtggctggagcctgtccgaacgctttgggctgttaggggtaagtcagaagtgcattcccccctgcctcacacatttctctggttcagccccaccacttgtctttttgctcctggtcattcagaacttgcagaagaatcaacagagtttctacttgatgaaatggtcctaataaactgctttttattcttgctgggagtcagtcttaacagcttcttatgggcaatcataagaggtactcaacaattgctacctgccggccattttacatatgattcatttatttaatccttacagcaacatgaatagatgatgtgccacactccattttttaaaaactaagttatatagagcttaatattcggctcagagtcacacagctgtaattagatttggatttcactcccatccatatttcttaattccatgctctactgcctccttggctaa

SEQ ID NO: 433556 - DNA, 1950 bp, Homo sapiens
gtccaccccatgggtggagtctcgctttttctttccagtgttggctgacttacagctcttataaactagtggcaatttctgaacccagccggctccatctcagcttctggtttctaagtccatgtgccaaaggctgccaggaaggagacgccttcctgagtcctggatctttcttccttctggaaatctttgactgtgggtagttatttatttctgaataagagcgtccacgcatcatggacctcgcgggactgctgaagtctcagttcctgtgccacctggtcttctgctacgtctttattgcctcagggctaatcatcaacaccattcagctcttcactctcctcctctggcccattaacaagcagctcttccggaagatcaactgcagactgtcctattgcatctcaagccagctggtgatgctgctggagtggtggtcgggcacggaatgcaccatcttcacggacccgcgcgcctacctcaagtatgggaaggaaaatgccatcgtggttctcaaccacaagtttgaaattgactttctgtgtggctggagcctgtccgaacgctttgggctgttagggtttgacctcttgcacgtagcttgcatgcctttggaactgggtctcttcagttgacttttgtcgtcttcaacacactgcagcgtgtagcggttgagcctgtgtcacatagctgaatcagagtcatctgcggtactcagggctccaaggtcctggccaagaaagagctggcctatgtcccaattatcggctggatgtggtacttcaccgagatggtcttctgttcgcgcaagtgggagcaggatcgcaagacggttgccaccagtttgcagcacctccgggactaccccgagaagtattttttcctgattcactgtgagggcacacggttcacggagaagaagcatgagatcagcatgcaggtggcccgggccaaggggctgcctcgcctcaagcatcacctgttgccacgaaccaagggcttcgccatcaccgtgaggagcttgagaaatgtagaaataatgaaaatccaacactgctgggagtcctaaacggaaagaaataccatgcagatttgtatgttaggaggatcccactggaagacatccctgaagacgatgacgagtgctcggcctggctgcacaagctctaccaggagaaggatgcctttcaggaggagtactacaggacgggcaccttcccagagacgcccatggtgcccccccggcggccctggaccctcgtgaactggctgttttgggcctcgctggtgctctaccctttcttccagttcctggtcagcatgatcaggagcgggtcttccctgacgctggccagcttcatcctcgtcttctttgtggcctccgtgggagttcgatggatgattggtgtgacggaaattgacaagggctctgcctacggcaactctgacagcaagcagaaactgaatgactgactcagggaggtgtcaccatccgaagggaaccttggggaactggtggcctctgcatatcctccttagtgggacacggtgacaaaggctgggtgagcccctgctgggcacggcggaagtcacgacctctccagccagggagtctggtctcaaggccggatggggaggaagatgttttgtaatctttttttccccatgtgctttagtgggctttggttttctttttgtgcgagtgtgtgtgagaatggctgtgtggtgagtgtgaactttgttctgtgatcatagaaagggtattttaggctgcaggggagggcagggctggggaccgaaggggacaagttcccctttcatcctttggtgctgagttttctgtaacccttggttgccagagataaagtgaaaagtgctttaggtgagatgactaaattatgcctccaagaaaaaaaaattaaagtgcttttctgggtcaaaaaaagt

SEQ ID NO: 433557 - DNA, 1651 bp, Homo sapiens
gtccaccccatgggtggagtctcgctttttctttccagtgttggctgacttacagctcttataaactagtggcaatttctgaacccagccggctccatctcagcttctggtttctaagtccatgtgccaaaggctgccaggaaggagacgccttcctgagtcctggatctttcttccttctggaaatctttgactgtgggtagttatttatttctgaataagagcgtccacgcatcatggacctcgcgggactgctgaagtctcagttcctgtgccacctggtcttctgctacgtctttattgcctcagggctaatcatcaacaccattcagctcttcactctcctcctctggcccattaacaagcagctcttccggaagatcaactgcagactgtcctattgcatctcaagccagctggtgatgctgctggagtggtggtcgggcacggaatgcaccatcttcacggacccgcgcgcctacctcaagtatgggaaggaaaatgccatcgtggttctcaaccacaagtttgaaattgactttctgtgtggctggagcctgtccgaacgctttgggctgttagggtttgacctcttgcacgtagcttgcatgcctttggaactgggtctcttcagttgacttttgtcgtcttcaacacactgcagcgtgtagcggttgagcctgtgtcacatagctgaatcagagtcatctgcggtactcagggctccaaggtcctggccaagaaagagctggcctatgtcccaattatcggctggatgtggtacttcaccgagatggtcttctgttcgcgcaagtgggagcaggatcgcaagacggttgccaccagtttgcagcacctccgggactaccccgagaagtattttttcctgattcactgtgagggcacacggttcacggagaagaagcatgagatcagcatgcaggtggcccgggccaaggggctgcctcgcctcaagcatcacctgttgccacgaaccaagggcttcgccatcaccgtgaggagcttgagaaatgtagaaataatgaaaatccaacactgctgggagtcctaaacggaaagaaataccatgcagatttgtatgttaggaggatcccactggaagacatccctgaagacgatgacgagtgctcggcctggctgcacaagctctaccaggagaaggatgcctttcaggaggagtactacaggacgggcaccttcccagagacgcccatggtgcccccccggcggccctggaccctcgtgaactggctgttttgggcacggcggaagtcacgacctctccagccagggagtctggtctcaaggccggatggggaggaagatgttttgtaatctttttttccccatgtgctttagtgggctttggttttctttttgtgcgagtgtgtgtgagaatggctgtgtggtgagtgtgaactttgttctgtgatcatagaaagggtattttaggctgcaggggagggcagggctggggaccgaaggggacaagttcccctttcatcctttggtgctgagttttctgtaacccttggttgccagagataaagtgaaaagtgctttaggtgagatgactaaattatgcctccaagaaaaaaaaattaaagtgcttttctgggtcaaaaaaagt

SEQ ID NO: 433558 - DNA, 1378 bp, Homo sapiens
gtccaccccatgggtggagtctcgctttttctttccagtgttggctgacttacagctcttataaactagtggcaatttctgaacccagccggctccatctcagcttctggtttctaagtccatgtgccaaaggctgccaggaaggagacgccttcctgagtcctggatctttcttccttctggaaatctttgactgtgggtagttatttatttctgaataagagcgtccacgcatcatggacctcgcgggactgctgaagtctcagttcctgtgccacctggtcttctgctacgtctttattgcctcagggctaatcatcaacaccattcagctcttcactctcctcctctggcccattaacaagcagctcttccggaagatcaactgcagactgtcctattgcatctcaagccagctggtgatgctgctggagtggtggtcgggcacggaatgcaccatcttcacggacccgcgcgcctacctcaagtatgggaaggaaaatgccatcgtggttctcaaccacaagtttgaaattgactttctgtgtggctggagcctgtccgaacgctttgggctgttagggggctccaaggtcctggccaagaaagagctggcctatgtcccaattatcggctggatgtggtacttcaccgagatggtcttctgttcgcgcaagtgggagcaggatcgcaagacggttgccaccagtttgcagcacctccgggactaccccgagaagtattttttcctgattcactgtgagggcacacggttcacggagaagaagcatgagatcagcatgcaggtggcccgggccaaggggctgcctcgcctcaagcatcacctgttgccacgaaccaagggcttcgccatcaccgtgaggagcttgagaaatgtagtttcagctgtatatgactgtacactcaatttcagaaataatgaaaatccaacactgctgggagtcctaaacggaaagaaataccatgcagatttgtatgttaggaggatcccactggaagacatccctgaagacgatgacgagtgctcggcctggctgcacaagctctaccaggagaagggctggggcgacaccgagttctctaagcagtatgtgtctgtgagcaggcctgggaggctggccctttgcccttccgagaagatcgctgagcagcaagtggaagtggtgcatggtttctccaagcagagtggtgaatagacatcaagggacaattcctttctgtatcagcctattttgctaggagcctagatctaaagctttacgtgccccaaatctgggtgcccgacccagtttgtcaaagtgggatttcattttaatgatcaaccttgcagtcagaagtgtggtgtatgtcaaaagac

SEQ ID NO: 433559 - DNA, 1243 bp, Homo sapiens
gtccaccccatgggtggagtctcgctttttctttccagtgttggctgacttacagctcttataaactagtggcaatttctgaacccagccggctccatctcagcttctggtttctaagtccatgtgccaaaggctgccaggaaggagacgccttcctgagtcctggatctttcttccttctggaaatctttgactgtgggtagttatttatttctgaataagagcgtccacgcatcatggacctcgcgggactgctgaagtctcagttcctgtgccacctggtcttctgctacgtctttattgcctcagggctaatcatcaacaccattcagctcttcactctcctcctctggcccattaacaagcagctcttccggaagatcaactgcagactgtcctattgcatctcaagccagctggtgatgctgctggagtggtggtcgggcacggaatgcaccatcttcacggacccgcgcgcctacctcaagtatgggaaggaaaatgccatcgtggttctcaaccacaagtttgaaattgactttctgtgtggctggagcctgtccgaacgctttgggctgttagggggctccaaggtcctggccaagaaagagctggcctatgtcccaattatcggctggatgtggtacttcaccgagatggtcttctgttcgcgcaagtgggagcaggatcgcaagacggttgccaccagtttgcagcacctccgggactaccccgagaagtattttgtatgtaggcaccagagcagctgtgtcccaagggctcctgcaggactgtgaccgtgggacccccatgtgacttccacaggacacgtgactgtgtggtcctgtgcgactccagggctgtgtgtgaccatagggctgtgtataacctcagggatgtatgtgaccatggggccgtgtgtgaccgtggggccacgtatgactgtggggccgtgtatgaccatggggccgtgtgtgaccccagggctgtgtgtgaccccagggctgtgtgtgaccatggggccgtgtgtgatcatgtggccatatgtgaccctggggctatgtgtgaccccagggctgtgtgtgaccccagggctatgtgtgacctcagggctgtatgtaaccatggggccctgtgtgatcgtgtggccatatgtgcccctggggctgtgtgtgaccccagggccaggcatgacaccagggctgtgtgtgaccccagggctgtatgtgaccccagggctgtg

SEQ ID NO: 433560 - DNA, 1073 bp, Homo sapiens
gtccaccccatgggtggagtctcgctttttctttccagtgttggctgacttacagctcttataaactagtggcaatttctgaacccagccggctccatctcagcttctggtttctaagtccatgtgccaaaggctgccaggaaggagacgccttcctgagtcctggatctttcttccttctggaaatctttgactgtgggtagttatttatttctgaataagagcgtccacgcatcatggacctcgcgggactgctgaagtctcagttcctgtgccacctggtcttctgctacgtctttattgcctcagggctaatcatcaacaccattcagctcttcactctcctcctctggcccattaacaagcagctcttccggaagatcaactgcagactgtcctattgcatctcaagccggctccaaggtcctggccaagaaagagctggcctatgtcccaattatcggctggatgtggtacttcaccgagatggtcttctgttcgcgcaagtgggagcaggatcgcaagacggttgccaccagtttgcagcacctccgggactaccccgagaagtattttgtatgtaggcaccagagcagctgtgtcccaagggctcctgcaggactgtgaccgtgggacccccatgtgacttccacaggacacgtgactgtgtggtcctgtgcgactccagggctgtgtgtgaccatagggctgtgtataacctcagggatgtatgtgaccatggggccgtgtgtgaccgtggggccacgtatgactgtggggccgtgtatgaccatggggccgtgtgtgaccccagggctgtgtgtgaccccagggctgtgtgtgaccatggggccgtgtgtgatcatgtggccatatgtgaccctggggctatgtgtgaccccagggctgtgtgtgaccccagggctatgtgtgacctcagggctgtatgtaaccatggggccctgtgtgatcgtgtggccatatgtgcccctggggctgtgtgtgaccccagggccaggcatgacaccagggctgtgtgtgaccccagggctgtatgtgaccccagggctgtg

SEQ ID NO: 433561 - DNA, 1258 bp, Homo sapiens
gtccaccccatgggtggagtctcgctttttctttccagtgttggctgacttacagctcttataaactagtggcaatttctgaacccagccggctccatctcagcttctggtttctaagtccatgtgccaaaggctgccaggaaggagacgccttcctgagtcctggatctttcttccttctggaaatctttgactgtgggtagttatttatttctgaataagagcgtccacgcatcatggacctcgcgggactgctgaagtctcagttcctgtgccacctggtcttctgctacgtctttattgcctcagggctaatcatcaacaccattcagctcttcactctcctcctctggcccattaacaagcagctcttccggaagatcaactgcagactgtcctattgcatctcaagccgaggatcccactggaagacatccctgaagacgatgacgagtgctcggcctggctgcacaagctctaccaggagaaggatgcctttcaggaggagtactacaggacgggcaccttcccagagacgcccatggtgcccccccggcggccctggaccctcgtgaactggctgttttgggcctcgctggtgctctaccctttcttccagttcctggtcagcatgatcaggagcgggtcttccctgacgctggccagcttcatcctcgtcttctttgtggcctccgtgggagttcgatggatgattggtgtgacggaaattgacaagggctctgcctacggcaactctgacagcaagcagaaactgaatgactgactcagggaggtgtcaccatccgaagggaaccttggggaactggtggcctctgcatatcctccttagtgggacacggtgacaaaggctgggtgagcccctgctgggcacggcggaagtcacgacctctccagccagggagtctggtctcaaggccggatggggaggaagatgttttgtaatctttttttccccatgtgctttagtgggctttggttttctttttgtgcgagtgtgtgtgagaatggctgtgtggtgagtgtgaactttgttctgtgatcatagaaagggtattttaggctgcaggggagggcagggctggggaccgaaggggacaagttcccctttcatcctttggtgctgagttttctgtaacccttggttgccagagataaagtgaaaagtgctttaggtgagatgactaaattatgcctccaagaaaaaaaaattaaagtgcttttctgggtcaaaaaaagt

SEQ ID NO: 433562 - DNA, 742 bp, Homo sapiens
gtccaccccatgggtggagtctcgctttttctttccagtgttggctgacttacagctcttataaactagtggcaatttctgaacccagccggctccatctcagcttctggtttctaagtccatgtgccaaaggctgccaggaaggagacgccttcctgagtcctggatctttcttccttctggaaatctttgactgtgggtagttatttatttctgaataagagcgtccacgcatcatggacctcgcgggactgctgaagtctcagttcctgtgccacctggtcttctgctacgtctttattgcctcagggctaatcatcaacaccattcagctcttcactctcctcctctggcccattaacaagcagctcttccggaagatcaactgcagactgtcctattgcatctcaagccagctggtgatgctgctggagtggtggtcgggcacggaatgcaccatcttcacggacccgcgcgcctacctcaagtatgggaaggaaaatgccatcgtggttctcaaccacaagtttgaaattgactttctgtgtggctggagcctgtccgaacgctttgggctgttaggggtaagtcagaagtgcattcccccctgcctcacacatttctctggttcagccccaccacttgtctttttgctcctggtcattcagaacttgcagaagaatcaacagagtttctacttgatgaaatggtcctaataaactgctttttattcttgctggga

SEQ ID NO: 433563 - DNA, 3644 bp, Homo sapiens
aagagagacagcccaagccggtcggggtgggggcgcgagagcgaaggctgcggggagcggcgctgggaccggtgcgggcagcggggaggggagcggcggccgaggcaaagggccgccgagcggcggaggcaccgagtgcagagcattgtagaccaaggagccatggataggagaagtatgggtgaaacagaaagtggagatgctttccttgacctgaagaagcctcctgcctccaaatgcccccatcgctatacaaaagaagaactcttggatataaaagaactcccccattccaaacagaggccttcatgcctttctgaaaaatatgacagtgatggtgtctgggaccctgagaagtggcatgcctctctctacccagcttcagggcggagctcaccagtggaaagtctgaagaaagagttggatacagaccggccttccctggtgcgcaggatagtagatccacgagagcgtgtgaaagaagatgacttagatgttgttctcagccctcagagacggagctttggagggggctgccacgtgacagccgctgttagctcccggcgctcaggaagtccattagagaaagatagtgatgggcttcgtctgcttggtggacgtaggattggcagtgggaggataatctctgcccggacctttgagaaggatcaccgtcttagcgataaggacctgcgggacttgagagacagagaccgagagagggacttcaaggacaagcgtttcaggagagagtttggagatagtaagcgtgtctttggtgagcgtagaagaaatgattcttacacagaagaagaaccagagtggttctctgctggacccacaagtcagtctgaaaccatcgaactgactggctttgatgataagatactagaagaagatcacaaagggagaaaaagaacaaggcgacggacagcctctgtgaaggaaggtatagtagagtgcaatggaggagtggccgaagaggatgaagtggaggtcatccttgcacaggagcctgcggctgatcaggaagtgccaagggatgctgtcttgcctgagcagtccccaggagactttgactttaatgagttctttaaccttgataaggtgccatgcttggcttcgatgatagaagatgttttgggagaagggtcagtctctgccagtcggttcagtaggtggttctctaacccgagcagatcaggaagccgatccagcagtcttgggtcaacaccacatgaagagctagagagacttgcaggtctggagcaagccatcctctctcctggacagaactcggggaattactttgctcctataccattggaagaccatgctgaaaataaagtggatattttagaaatgctacagaaagccaaagtggatttgaaacctcttctttccagcctttctgcaaataaagaaaaacttaaagaaagctcacattcaggggttgtgctttcagtggaggaggtagaagcaggtctgaagggcttgaaggttgaccagcaagtgaagaattcaactcccttcatggcagaacacctagaagagaccttgagtgccgtaaccaacaatcgacaactgaagaaagacggagacatgactgcgttcaacaagctagtgagcacaatgaaggcaagtgggactttgccttctcagcccaaagtcagccgaaaccttgaaagccatttgatgtcccctgctgagattccaggccagcctgtccctaagaacatcctgcaggaacttctgggtcaaccagttcagagacctgcttcttccaatcttctgagtggccttatggggagcttggagcctacaacatctttactgggccaaagagcaccctctcctcccttgtcacaggtgtttcaaactcgagcagcctcagctgactaccttcgcccaagaataccatcaccaattggtttcacaccaggaccacagcagctactcggagatccattccaaggcatgcgcaaacccatgagccccatcacagcccagatgagccagctggagttgcaacaggcagctttagaagggctggccttgccacatgaccttgctgtacaggcagcaaacttctaccagcctggttttggcaaaccacaggtggacagaaccagagatggattcagaaacaggcaacagcgagtgaccaagtcaccagcacccgtgcatcgagggaattcctcttcccctgcccctgctgcctccatcacaagcatgctttctccttcctttacccctacctcagtgattcgtaagatgtacgagagcaaagagaaaagcaaggaggagccagcatctggaaaagcagctcttggtgacagtaaagaggatactcagaaggccagtgaagaaaacctcctgtcatccagctctgtacccagtgccgatcgagactcttctcccactacaaattccaaactgtcagcattacagaggtcttcgtgttccaccccactgtcccaggccaaccgttacaccaaagaacaagattatcgacctaaagcaactgggagaaaaacacccaccttggcatccccagttcctacaacaccttttctccgccctgtccaccaagttccccttgtcccccatgtccctatggttaggcctgctcaccagcttcacccagggttggtacagaggatgctggcccagggagtacatccacagcatcttccaagtttgctccaaactggtgtgcttcctcctgggatggacttgagtcatttacagggaatatctggccccatcctgggtcagcccttttaccctttacctgctgctagtcaccctctcttaaaccctcgtcctggaacacctctgcatctggcaatggtgcaacagcagctacagcgctcagttctgcatcctccaggctctggttcccatgcagcagctgtcagcgttcagacaacccctcagaacgtgcccagccggtcaggcctgccccacatgcactcccagctggagcatcgccccagccagaggagcagctcccctgtgggccttgccaaatggtttggctcagatgtgctacagcaacccctgccctccatgcccgccaaagttatcagtgtagatgaattggaataccgacagtgagcagggcaggcagactcaactaagcccggacctgtggtggcacactgggcaggaccctgcttcatctcgggttggtttatgggcttttactttggagcactctgtgtgaagctgtttggtggaacccatgcatctggtgtggtccgcattatgatggaaggatcttaaccagtcgagtggagtgtacattgtctgaatacaggatgcacaatgttgtcaatcctggaaatggtctttcttttttgtaagatatgtgaatgaagtgttggtgtcctcaccaagaggtggcacctaagggttctgaggaaataaatgtatagacccttatgtacagacctgtgtataaacaacttttgtatatacatataggatagcttttttgaactatacagctgtacataaaagtagctgatattagttaggcctgtgtcaacagtttggatttttttcacttgtacatttgggattttcttttggttgattaaaattgcatatgctaagtgtgtgaatgaaaaaaaaaaaaa

SEQ ID NO: 433564 - DNA, 1441 bp, Homo sapiens
aagagagacagcccaagccggtcggggtgggggcgcgagagcgaaggctgcggggagcggcgctgggaccggtgcgggcagcggggaggggagcggcggccgaggcaaagggccgccgagcggcggaggcaccgagtgcagagcattgtagaccaaggagccatggataggagaagtatgggtgaaacagaaagtggagatgctttccttgacctgaagaagcctcctgcctccaaatgcccccatcgctatacaaaagaagaactcttggatataaaagaactcccccattccaaacagaggccttcatgcctttctgaaaaatatgacagtgatggtgtctgggaccctgagaagtggcatgcctctctctacccagcttcagggcggagctcaccagtggaaagtctgaagaaagagttggatacagaccggccttccctggtgcgcaggatagtagatccacgagagcgtgtgaaagaagatgacttagatgttgttctcagccctcagagacggagctttggagggggctgccacgtgacagccgctgttagctcccggcgctcaggaagtccattagagaaagatagtgatgggcttcgtctgcttggtggacgtaggattggcagtgggaggataatctctgcccggacctttgagaaggatcaccgtcttagcgataaggacctgcgggacttgagagacagagaccgagagagggacttcaaggacaagcgtttcaggagagagtttggagatagtaagcgtgtctttggtgagcgtagaagaaatgattcttacacagaagaagaaccagagtggttctctgctggacccacaagtcagtctgaaaccatcgaactgactggctttgatgataagatactagaagaagatcacaaagggagaaaaagaacaaggcgacggacagcctctgtgaaggaaggtatagtagagtgcaatggaggagtggccgaagaggatgaagtggaggtcatccttgcacaggagcctgcggctgatcaggaagtgccaagggatgctgtcttgcctgagcagtccccaggagactttgactttaatgagttctttaaccttgataaggtgccatgcttggcttcgatgatagaagatgttttgggagaagggtcagtctctgccagtcggttcagtaggtggttctctaacccgagcagatcaggaagccgatccagcagtcttgggtcaacaccacatgaagagctagagagacttgcaggtctggagcaagccatcctctctcctggacagaactcggggaattactttgctcctataccattggaagaccatgctgaaaataaagtggatattttagaaatgctacagaaagccaaagtggatttgaaacctcttctttccagcctttctgcaaataaagaaaaacttaaagaaagct

SEQ ID NO: 433565 - DNA, 498 bp, Homo sapiens
tggtgatgggcctcaggtatacagcatcatatcttcctttcactatgaacattacaacgaagaccttgactgaagtagaaatggcttgactagaaattttttaatcttgctttatgtacttttccagagagagtttggagatagtaagcgtgtctttggtgagcgtagaagaaatgattcttacacagaagaagaaccagagtggttctctgctggacccacaagtcagtctgaaaccatcgaactgactggctttgatgataagatactagaagaagatcacaaagggagaaaaagaacaaggcgacggacagcctctgtgaaggaaggtcagttcaaactttgggagggaagttcgctgttttaaaatgagatgtaggctgggcgtggtggctcacacctgtaatcccaacactttgggaggccgaggtgggcggatcacctgaggtcaggagtttgagaccagcctggccaacatggtgaaaccccgtctccaca

SEQ ID NO: 433566 - DNA, 565 bp, Homo sapiens
  misc_feature (10)..(10): n is a, c, g, or t
tgatagctgnctctagaggataccctcgtcttttgataggatgaagagctagagagacttgcaggtctggagcaagccatcctctctcctggacagaactcggggaattactttgctcctataccattggaagaccatgctgaaaataaagtggatattttagaaatgctacagaaagccaaagtggatttgaaacctcttctttccagcctttctgcaaataaagaaaaacttaaagaaagctcacattcaggggttgtgctttcagtggaggaggtagaagcaggtctgaagggcttgaaggttgaccagcaagtgaagaattcaactcccttcatggcagaacacctagaagagaccttgagtgccgtaaccaacaatcgacaactgaagaaagacggagacatgactgcgttcaacaagctagtgagcacaatgaaggcaagtgggactttgccttctcagcccaaagtcagcgtaagtatctgacacaaaccccccacccttttctcctttttttttcttctttttcccaccacaataaaaggatttttaaaaaggtatt

SEQ ID NO: 433567 - DNA, 654 bp, Homo sapiens
tgggattcttgtcccaggtaacaagtctcccagaagactcatatccttctgcaggatgcacagcaggagcttgtcaagttttaaagaatagcacttcatagttgtggtcccccagtttctagcatctaaacattttaggtttagtttatgccatctcttagtacacaatttgattttaagtgttattagtttatttttggtgtcagtcttttctgacagtctcatctcaattttgaaataaattattttcatcttatctgtcatactagccaaagagaattcctaccagatatctctttgcttgatttaacctggacgttctcaacttctcagcacattcaggggttgtgctttcagtggaggaggtagaagcaggtctgaagggcttgaaggttgaccagcaagtgaagaattcaactcccttcatggcagaacacctagaagagaccttgagtgccgtaaccaacaatcgacaactgaagaaagacggagacatgactgcgttcaacaagctagtgagcacaatgaaggcaagtgggactttgccttctcagcccaaagtcagcgtaagtatctgacacaaaccccccacccttttctcctttttttttcttctttttcccaccacaataaaaggatttttaaaaaggtatt

SEQ ID NO: 433568 - DNA, 1031 bp, Homo sapiens
tgagactgaatcttagtcttttgcccaggctacagtgtagcggggtgacttctgctactgcaacctctgcctccaggttcaagcgattctcctgcctcagcctcccaagtaactgggattacaggcacctgccacaatgcctggctaatttttgtagttttagtagagacggggtttcaccatcttggccaggctggtcttgaactcctaacctcgtgatccacctgccttgacgtcccaaagtactggattataggcgtgagccaccatgcccggccccaaatatagatttaagttcatttctttgtctgtggatatctaaccgttcaacaccattttgttgaagagacactttaactttttaagcagttattttttcaaatacgcctgctgtagtttattagttgacaaaacatttgctaataattcttagataaggatttggtcaaaataaaggcactgcaaagactaatcatggaaaattatttatcgtgacgtacttctattgctgcaaagaggaaggccaatgtctcagccttatttaaatacataatgtacatgttaccctgaatctgctgataagcccaattttagtggtgactctcttccaaccatccccttcctcccatcagtcatggacatactatctaaaaaagaagaaaacacccttgttggtttgtttaactttgtctttcccacgtccttccagatccacgagagcgtgtgaaagaagatgacttagatgttgttctcagccctcagagacggagctttggagggggctgccacgtgacagccgctgttagctcccggcgctcaggaagtccattagagaaagatagtgatgggcttcgtctgcttggtggacgtaggattggcagtgggaggataatctctgcccggacctttgagaaggatcaccgtcttagcgataaggacctgcgggacttgagagacagagaccgagagagggacttcaaggacaagcgtttcagggtttgtcttttttttttttttttttttttaaattg

SEQ ID NO: 433569 - DNA, 3893 bp, Homo sapiens
tgagactgaatcttagtcttttgcccaggctacagtgtagcggggtgacttctgctactgcaacctctgcctccaggttcaagcgattctcctgcctcagcctcccaagtaactgggattacaggcacctgccacaatgcctggctaatttttgtagttttagtagagacggggtttcaccatcttggccaggctggtcttgaactcctaacctcgtgatccacctgccttgacgtcccaaagtactggattataggcgtgagccaccatgcccggccccaaatatagatttaagttcatttctttgtctgtggatatctaaccgttcaacaccattttgttgaagagacactttaactttttaagcagttattttttcaaatacgcctgctgtagtttattagttgacaaaacatttgctaataattcttagataaggatttggtcaaaataaaggcactgcaaagactaatcatggaaaattatttatcgtgacgtacttctattgctgcaaagaggaaggccaatgtctcagccttatttaaatacataatgtacatgttaccctgaatctgctgataagcccaattttagtggtgactctcttccaaccatccccttcctcccatcagtcatggacatactatctaaaaaagaagaaaacacccttgttggtttgtttaactttgtctttcccacgtccttccagatccacgagagcgtgtgaaagaagatgacttagatgttgttctcagccctcagagacggagctttggagggggctgccacgtgacagccgctgttagctcccggcgctcaggaagtccattagagaaagatagtgatgggcttcgtctgcttggtggacgtaggattggcagtgggaggataatctctgcccggacctttgagaaggatcaccgtcttagcgataaggacctgcgggacttgagagacagagaccgagagagggacttcaaggacaagcgtttcaggagagagtttggagatagtaagcgtgtctttggtgagcgtagaagaaatgattcttacacagaagaagaaccagagtggttctctgctggacccacaagtcagtctgaaaccatcgaactgactggctttgatgataagatactagaagaagatcacaaagggagaaaaagaacaaggcgacggacagcctctgtgaaggaaggtatagtagagtgcaatggaggagtggccgaagaggatgaagtggaggtcatccttgcacaggagcctgcggctgatcaggaagtgccaagggatgctgtcttgcctgagcagtccccaggagactttgactttaatgagttctttaaccttgataaggtgccatgcttggcttcgatgatagaagatgttttgggagaagggtcagtctctgccagtcggttcagtaggtggttctctaacccgagcagatcaggaagccgatccagcagtcttgggtcaacaccacatgaagagctagagagacttgcaggtctggagcaagccatcctctctcctggacagaactcggggaattactttgctcctataccattggaagaccatgctgaaaataaagtggatattttagaaatgctacagaaagccaaagtggatttgaaacctcttctttccagcctttctgcaaataaagaaaaacttaaagaaagctcacattcaggggttgtgctttcagtggaggaggtagaagcaggtctgaagggcttgaaggttgaccagcaagtgaagaattcaactcccttcatggcagaacacctagaagagaccttgagtgccgtaaccaacaatcgacaactgaagaaagacggagacatgactgcgttcaacaagctagtgagcacaatgaaggcaagtgggactttgccttctcagcccaaagtcagccgaaaccttgaaagccatttgatgtcccctgctgagattccaggccagcctgtccctaagaacatcctgcaggaacttctgggtcaaccagttcagagacctgcttcttccaatcttctgagtggccttatggggagcttggagcctacaacatctttactgggccaaagagcaccctctcctcccttgtcacaggtgtttcaaactcgagcagcctcagctgactaccttcgcccaagaataccatcaccaattggtttcacaccaggaccacagcagctactcggagatccattccaaggcatgcgcaaacccatgagccccatcacagcccagatgagccagctggagttgcaacaggcagctttagaagggctggccttgccacatgaccttgctgtacaggcagcaaacttctaccagcctggttttggcaaaccacaggtggacagaaccagagatggattcagaaacaggcaacagcgagtgaccaagtcaccagcacccgtgcatcgagggaattcctcttcccctgcccctgctgcctccatcacaagcatgctttctccttcctttacccctacctcagtgattcgtaagatgtacgagagcaaagagaaaagcaaggaggagccagcatctggaaaagcagctcttggtgacagtaaagaggatactcagaaggccagtgaagaaaacctcctgtcatccagctctgtacccagtgccgatcgagactcttctcccactacaaattccaaactgtcagcattacagaggtcttcgtgttccaccccactgtcccaggccaaccgttacaccaaagaacaagattatcgacctaaagcaactgggagaaaaacacccaccttggcatccccagttcctacaacaccttttctccgccctgtccaccaagttccccttgtcccccatgtccctatggttaggcctgctcaccagcttcacccagggttggtacagaggatgctggcccagggagtacatccacagcatcttccaagtttgctccaaactggtgtgcttcctcctgggatggacttgagtcatttacagggaatatctggccccatcctgggtcagcccttttaccctttacctgctgctagtcaccctctcttaaaccctcgtcctggaacacctctgcatctggcaatggtgcaacagcagctacagcgctcagttctgcatcctccaggctctggttcccatgcagcagctgtcagcgttcagacaacccctcagaacgtgcccagccggtcaggcctgccccacatgcactcccagctggagcatcgccccagccagaggagcagctcccctgtgggccttgccaaatggtttggctcagatgtgctacagcaacccctgccctccatgcccgccaaagttatcagtgtagatgaattggaataccgacagtgagcagggcaggcagactcaactaagcccggacctgtggtggcacactgggcaggaccctgcttcatctcgggttggtttatgggcttttactttggagcactctgtgtgaagctgtttggtggaacccatgcatctggtgtggtccgcattatgatggaaggatcttaaccagtcgagtggagtgtacattgtctgaatacaggatgcacaatgttgtcaatcctggaaatggtctttcttttttgtaagatatgtgaatgaagtgttggtgtcctcaccaagaggtggcacctaagggttctgaggaaataaatgtatagacccttatgtacagacctgtgtataaacaacttttgtatatacatataggatagcttttttgaactatacagctgtacataaaagtagctgatattagttaggcctgtgtcaacagtttggatttttttcacttgtacatttgggattttcttttggttgattaaaattgcatatgctaagtgtgtgaatgaaaaaaaaaaaaa

SEQ ID NO: 433570 - DNA, 3155 bp, Homo sapiens
aagagagacagcccaagccggtcggggtgggggcgcgagagcgaaggctgcggggagcggcgctgggaccggtgcgggcagcggggaggggagcggcggccgaggcaaagggccgccgagcggcggaggcaccgagtgcagagcattgtagaccaaggagccatggataggagaagtatgggtgaaacagaaagtggagatgctttccttgacctgaagaagcctcctgcctccaaatgcccccatcgctatacaaaagaagaactcttggatataaaagaactcccccattccaaacagaggccttcatgcctttctgaaaaatatgacagtgatggtgtctgggaccctgagaagtggcatgcctctctctacccagcttcagggcggagctcaccagtggaaagtctgaagaaagagttggatacagaccggccttccctggtgcgcaggatagtaggtatagtagagtgcaatggaggagtggccgaagaggatgaagtggaggtcatccttgcacaggagcctgcggctgatcaggaagtgccaagggatgctgtcttgcctgagcagtccccaggagactttgactttaatgagttctttaaccttgataaggtgccatgcttggcttcgatgatagaagatgttttgggagaagggtcagtctctgccagtcggttcagtaggtggttctctaacccgagcagatcaggaagccgatccagcagtcttgggtcaacaccacatgaagagctagagagacttgcaggtctggagcaagccatcctctctcctggacagaactcggggaattactttgctcctataccattggaagaccatgctgaaaataaagtggatattttagaaatgctacagaaagccaaagtggatttgaaacctcttctttccagcctttctgcaaataaagaaaaacttaaagaaagctcacattcaggggttgtgctttcagtggaggaggtagaagcaggtctgaagggcttgaaggttgaccagcaagtgaagaattcaactcccttcatggcagaacacctagaagagaccttgagtgccgtaaccaacaatcgacaactgaagaaagacggagacatgactgcgttcaacaagctagtgagcacaatgaaggcaagtgggactttgccttctcagcccaaagtcagccgaaaccttgaaagccatttgatgtcccctgctgagattccaggccagcctgtccctaagaacatcctgcaggaacttctgggtcaaccagttcagagacctgcttcttccaatcttctgagtggccttatggggagcttggagcctacaacatctttactgggccaaagagcaccctctcctcccttgtcacaggtgtttcaaactcgagcagcctcagctgactaccttcgcccaagaataccatcaccaattggtttcacaccaggaccacagcagctactcggagatccattccaaggcatgcgcaaacccatgagccccatcacagcccagatgagccagctggagttgcaacaggcagctttagaagggctggccttgccacatgaccttgctgtacaggcagcaaacttctaccagcctggttttggcaaaccacaggtggacagaaccagagatggattcagaaacaggcaacagcgagtgaccaagtcaccagcacccgtgcatcgagggaattcctcttcccctgcccctgctgcctccatcacaagcatgctttctccttcctttacccctacctcagtgattcgtaagatgtacgagagcaaagagaaaagcaaggaggagccagcatctggaaaagcagctcttggtgacagtaaagaggatactcagaaggccagtgaagaaaacctcctgtcatccagctctgtacccagtgccgatcgagactcttctcccactacaaattccaaactgtcagcattacagaggtcttcgtgttccaccccactgtcccaggccaaccgttacaccaaagaacaagattatcgacctaaagcaactgggagaaaaacacccaccttggcatccccagttcctacaacaccttttctccgccctgtccaccaagttccccttgtcccccatgtccctatggttaggcctgctcaccagcttcacccagggttggtacagaggatgctggcccagggagtacatccacagcatcttccaagtttgctccaaactggtgtgcttcctcctgggatggacttgagtcatttacagggaatatctggccccatcctgggtcagcccttttaccctttacctgctgctagtcaccctctcttaaaccctcgtcctggaacacctctgcatctggcaatggtgcaacagcagctacagcgctcagttctgcatcctccaggctctggttcccatgcagcagctgtcagcgttcagacaacccctcagaacgtgcccagccggtcaggcctgccccacatgcactcccagctggagcatcgccccagccagaggagcagctcccctgtgggccttgccaaatggtttggctcagatgtgctacagcaacccctgccctccatgcccgccaaagttatcagtgtagatgaattggaataccgacagtgagcagggcaggcagactcaactaagcccggacctgtggtggcacactgggcaggaccctgcttcatctcgggttggtttatgggcttttactttggagcactctgtgtgaagctgtttggtggaacccatgcatctggtgtggtccgcattatgatggaaggatcttaaccagtcgagtggagtgtacattgtctgaatacaggatgcacaatgttgtcaatcctggaaatggtctttcttttttgtaagatatgtgaatgaagtgttggtgtcctcaccaagaggtggcacctaagggttctgaggaaataaatgtatagacccttatgtacagacctgtgtataaacaacttttgtatatacatataggatagcttttttgaactatacagctgtacataaaagtagctgatattagttaggcctgtgtcaacagtttggatttttttcacttgtacatttgggattttcttttggttgattaaaattgcatatgctaagtgtgtgaatgaaaaaaaaaaaaa

SEQ ID NO: 433571 - DNA, 2536 bp, Homo sapiens
tgggattcttgtcccaggtaacaagtctcccagaagactcatatccttctgcaggatgcacagcaggagcttgtcaagttttaaagaatagcacttcatagttgtggtcccccagtttctagcatctaaacattttaggtttagtttatgccatctcttagtacacaatttgattttaagtgttattagtttatttttggtgtcagtcttttctgacagtctcatctcaattttgaaataaattattttcatcttatctgtcatactagccaaagagaattcctaccagatatctctttgcttgatttaacctggacgttctcaacttctcagcacattcaggggttgtgctttcagtggaggaggtagaagcaggtctgaagggcttgaaggttgaccagcaagtgaagaattcaactcccttcatggcagaacacctagaagagaccttgagtgccgtaaccaacaatcgacaactgaagaaagacggagacatgactgcgttcaacaagctagtgagcacaatgaaggcaagtgggactttgccttctcagcccaaagtcagccgaaaccttgaaagccatttgatgtcccctgctgagattccaggccagcctgtccctaagaacatcctgcaggaacttctgggtcaaccagttcagagacctgcttcttccaatcttctgagtggccttatggggagcttggagcctacaacatctttactgggccaaagagcaccctctcctcccttgtcacaggtgtttcaaactcgagcagcctcagctgactaccttcgcccaagaataccatcaccaattggtttcacaccaggaccacagcagctactcggagatccattccaaggcatgcgcaaacccatgagccccatcacagcccagatgagccagctggagttgcaacaggcagctttagaagggctggccttgccacatgaccttgctgtacaggcagcaaacttctaccagcctggttttggcaaaccacaggtggacagaaccagagatggattcagaaacaggcaacagcgagtgaccaagtcaccagcacccgtgcatcgagggaattcctcttcccctgcccctgctgcctccatcacaagcatgctttctccttcctttacccctacctcagtgattcgtaagatgtacgagagcaaagagaaaagcaaggaggagccagcatctggaaaagcagctcttggtgacagtaaagaggatactcagaaggccagtgaagaaaacctcctgtcatccagctctgtacccagtgccgatcgagactcttctcccactacaaattccaaactgtcagcattacagaggtcttcgtgttccaccccactgtcccaggccaaccgttacaccaaagaacaagattatcgacctaaagcaactgggagaaaaacacccaccttggcatccccagttcctacaacaccttttctccgccctgtccaccaagttccccttgtcccccatgtccctatggttaggcctgctcaccagcttcacccagggttggtacagaggatgctggcccagggagtacatccacagcatcttccaagtttgctccaaactggtgtgcttcctcctgggatggacttgagtcatttacagggaatatctggccccatcctgggtcagcccttttaccctttacctgctgctagtcaccctctcttaaaccctcgtcctggaacacctctgcatctggcaatggtgcaacagcagctacagcgctcagttctgcatcctccaggctctggttcccatgcagcagctgtcagcgttcagacaacccctcagaacgtgcccagccggtcaggcctgccccacatgcactcccagctggagcatcgccccagccagaggagcagctcccctgtgggccttgccaaatggtttggctcagatgtgctacagcaacccctgccctccatgcccgccaaagttatcagtgtagatgaattggaataccgacagtgagcagggcaggcagactcaactaagcccggacctgtggtggcacactgggcaggaccctgcttcatctcgggttggtttatgggcttttactttggagcactctgtgtgaagctgtttggtggaacccatgcatctggtgtggtccgcattatgatggaaggatcttaaccagtcgagtggagtgtacattgtctgaatacaggatgcacaatgttgtcaatcctggaaatggtctttcttttttgtaagatatgtgaatgaagtgttggtgtcctcaccaagaggtggcacctaagggttctgaggaaataaatgtatagacccttatgtacagacctgtgtataaacaacttttgtatatacatataggatagcttttttgaactatacagctgtacataaaagtagctgatattagttaggcctgtgtcaacagtttggatttttttcacttgtacatttgggattttcttttggttgattaaaattgcatatgctaagtgtgtgaatgaaaaaaaaaaaaa

SEQ ID NO: 433572 - DNA, 3715 bp, Homo sapiens
aagagagacagcccaagccggtcggggtgggggcgcgagagcgaaggctgcggggagcggcgctgggaccggtgcgggcagcggggaggggagcggcggccgaggcaaagggccgccgagcggcggaggcaccgagtgcagagcattgtagaccaaggagccatggataggagaagtatgggtgaaacagaaagtggagatgctttccttgacctgaagaagcctcctgcctccaaatgcccccatcgctatacaaaagaagaactcttggatataaaagaactcccccattccaaacagaggccttcatgcctttctgaaaaatatgacagtgatggtgtctgggaccctgagaagtggcatgcctctctctacccagcttcagggcggagctcaccagtggaaagtctgaagaaagagttggatacagaccggccttccctggtgcgcaggatagtagatccacgagagcgtgtgaaagaagatgacttagatgttgttctcagccctcagagacggagctttggagggggctgccacgtgacagccgctgttagctcccggcgctcaggaagtccattagagaaagatagtgatgggcttcgtctgcttggtggacgtaggattggcagtgggaggataatctctgcccggacctttgagaaggatcaccgtcttagcgataaggacctgcgggacttgagagacagagaccgagagagggacttcaaggacaagcgtttcaggagagagtttggagatagtaagcgtgtctttggtgagcgtagaagaaatgattcttacacagaagaagaaccagagtggttctctgctggacccacaagtcagtctgaaaccatcgaactgactggctttgatgataagatactagaagaagatcacaaagggagaaaaagaacaaggcgacggacagcctctgtgaaggaaggtatagtagagtgcaatggaggagtggccgaagaggatgaagtggaggtcatccttgcacaggagcctgcggctgatcaggaagtgccaagggatgctgtcttgcctgagcagtccccaggagactttgactttaatgagttctttaaccttgataaggtgccatgcttggcttcgatgatagaagatgttttgggagaagggtcagtctctgccagtcggttcagtaggtggttctctaacccgagcagatcaggaagccgatccagcagtcttgggtcaacaccacatgaagagctagagagacttgcaggtctggagcaagccatcctctctcctggacagaactcggggaattactttgctcctataccattggaagaccatgctgaaaataaagtggatattttagaaatgctacagaaagccaaagtggatttgaaacctcttctttccagcctttctgcaaataaagaaaaacttaaagaaagctcacattcaggggttgtgctttcagtggaggaggtagaagcaggtctgaagggcttgaaggttgaccagcaagtgaagaattcaactcccttcatggcagaacacctagaagagaccttgagtgccgtaaccaacaatcgacaactgaagaaagacggagacatgactgcgttcaacaagctagtgagcacaatgaaggcaagtgggactttgccttctcagcccaaagtcagccgaaaccttgaaagccatttgatgtcccctgctgagattccaggccagcctgtccctaagaacatcctgcaggaacttctgggtcaaccagttcagagacctgcttcttccaatcttctgagtggccttatggggagcttggagcctacaacatctttactgggccaaagagcaccctctcctcccttgtcacaggtgtttcaaactcgagcagcctcagctgactaccttcgcccaagaataccatcaccaattggtttcacaccaggaccacagcagctactcggagatccattccaaggcatgcgcaaacccatgagccccatcacagcccagatgagccagctggagttgcaacaggcagctttagaagggctggccttgccacatgaccttgctgtacaggcagcaaacttctaccagcctggttttggcaaaccacaggtggacagaaccagagatggattcagaaacagattcaatgttcttatcaaactcccttgatgcaggtttgctacatcagcagttttttggccagagctgacaggcaacagcgagtgaccaagtcaccagcacccgtgcatcgagggaattcctcttcccctgcccctgctgcctccatcacaagcatgctttctccttcctttacccctacctcagtgattcgtaagatgtacgagagcaaagagaaaagcaaggaggagccagcatctggaaaagcagctcttggtgacagtaaagaggatactcagaaggccagtgaagaaaacctcctgtcatccagctctgtacccagtgccgatcgagactcttctcccactacaaattccaaactgtcagcattacagaggtcttcgtgttccaccccactgtcccaggccaaccgttacaccaaagaacaagattatcgacctaaagcaactgggagaaaaacacccaccttggcatccccagttcctacaacaccttttctccgccctgtccaccaagttccccttgtcccccatgtccctatggttaggcctgctcaccagcttcacccagggttggtacagaggatgctggcccagggagtacatccacagcatcttccaagtttgctccaaactggtgtgcttcctcctgggatggacttgagtcatttacagggaatatctggccccatcctgggtcagcccttttaccctttacctgctgctagtcaccctctcttaaaccctcgtcctggaacacctctgcatctggcaatggtgcaacagcagctacagcgctcagttctgcatcctccaggctctggttcccatgcagcagctgtcagcgttcagacaacccctcagaacgtgcccagccggtcaggcctgccccacatgcactcccagctggagcatcgccccagccagaggagcagctcccctgtgggccttgccaaatggtttggctcagatgtgctacagcaacccctgccctccatgcccgccaaagttatcagtgtagatgaattggaataccgacagtgagcagggcaggcagactcaactaagcccggacctgtggtggcacactgggcaggaccctgcttcatctcgggttggtttatgggcttttactttggagcactctgtgtgaagctgtttggtggaacccatgcatctggtgtggtccgcattatgatggaaggatcttaaccagtcgagtggagtgtacattgtctgaatacaggatgcacaatgttgtcaatcctggaaatggtctttcttttttgtaagatatgtgaatgaagtgttggtgtcctcaccaagaggtggcacctaagggttctgaggaaataaatgtatagacccttatgtacagacctgtgtataaacaacttttgtatatacatataggatagcttttttgaactatacagctgtacataaaagtagctgatattagttaggcctgtgtcaacagtttggatttttttcacttgtacatttgggattttcttttggttgattaaaattgcatatgctaagtgtgtgaatgaaaaaaaaaaaaa

SEQ ID NO: 433573 - DNA, 2129 bp, Homo sapiens
tgatgagagcggaacacgttggtctaagttttctgtgacttgagtatcattctgctattaactccctaggagtattttatgctttcttgtggtccccaatcaatctgtaagttaagtgagttaagaaagttaaaaccagttttcttttgactcttttagcgaaaccttgaaagccatttgatgtcccctgctgagattccaggccagcctgtccctaagaacatcctgcaggaacttctgggtcaaccagttcagagacctgcttcttccaatcttctgagtggccttatggggagcttggagcctacaacatctttactgggccaaagagcaccctctcctcccttgtcacaggtgtttcaaactcgagcagcctcagctgactaccttcgcccaagaataccatcaccaattggtttcacaccaggaccacagcagctactcggagatccattccaaggcatgcgcaaacccatgagccccatcacagcccagatgagccagctggagttgcaacaggcagctttagaagggctggccttgccacatgaccttgctgtacaggcagcaaacttctaccagcctggttttggcaaaccacaggtggacagaaccagagatggattcagaaacaggcaacagcgagtgaccaagtcaccagcacccgtgcatcgagggaattcctcttcccctgcccctgctgcctccatcacaagcatgctttctccttcctttacccctacctcagtgattcgtaagatgtacgagagcaaagagaaaagcaaggaggagccagcatctggaaaagcagctcttggtgacagtaaagaggatactcagaaggccagtgaagaaaacctcctgtcatccagctctgtacccagtgccgatcgagactcttctcccactacaaattccaaactgtcagcattacagaggtcttcgtgttccaccccactgtcccaggccaaccgttacaccaaagaacaagattatcgacctaaagcaactgggagaaaaacacccaccttggcatccccagttcctacaacaccttttctccgccctgtccaccaagttccccttgtcccccatgtccctatggttaggcctgctcaccagcttcacccagggttggtacagaggatgctggcccagggagtacatccacagcatcttccaagtttgctccaaactggtgtgcttcctcctgggatggacttgagtcatttacagggaatatctggccccatcctgggtcagcccttttaccctttacctgctgctagtcaccctctcttaaaccctcgtcctggaacacctctgcatctggcaatggtgcaacagcagctacagcgctcagttctgcatcctccaggctctggttcccatgcagcagctgtcagcgttcagacaacccctcagaacgtgcccagccggtcaggcctgccccacatgcactcccagctggagcatcgccccagccagaggagcagctcccctgtgggccttgccaaatggtttggctcagatgtgctacagcaacccctgccctccatgcccgccaaagttatcagtgtagatgaattggaataccgacagtgagcagggcaggcagactcaactaagcccggacctgtggtggcacactgggcaggaccctgcttcatctcgggttggtttatgggcttttactttggagcactctgtgtgaagctgtttggtggaacccatgcatctggtgtggtccgcattatgatggaaggatcttaaccagtcgagtggagtgtacattgtctgaatacaggatgcacaatgttgtcaatcctggaaatggtctttcttttttgtaagatatgtgaatgaagtgttggtgtcctcaccaagaggtggcacctaagggttctgaggaaataaatgtatagacccttatgtacagacctgtgtataaacaacttttgtatatacatataggatagcttttttgaactatacagctgtacataaaagtagctgatattagttaggcctgtgtcaacagtttggatttttttcacttgtacatttgggattttcttttggttgattaaaattgcatatgctaagtgtgtgaatgaaaaaaaaaaaaa

SEQ ID NO: 433574 - DNA, 1788 bp, Homo sapiens
ggcggctggcaagccggtcgcccccgatagcccgacaggctgactaccttcgccaagaatagcatcaccaattggtttcacaccaggaccacagcagctactcggagatccattccaaggcatgcgcaaacccatgagccccatcacagcccagatgagccagctggagttgcaacaggcagctttagaagggctggccttgccacatgaccttgctgtacaggcagcaaacttctaccagcctggttttggcaaaccacaggtggacagaaccagagatggattcagaaacaggcaacagcgagtgaccaagtcaccagcacccgtgcatcgagggaattcctcttcccctgcccctgctgcctccatcacaagcatgctttctccttcctttacccctacctcagtgattcgtaagatgtacgagagcaaagagaaaagcaaggaggagccagcatctggaaaagcagctcttggtgacagtaaagaggatactcagaaggccagtgaagaaaacctcctgtcatccagctctgtacccagtgccgatcgagactcttctcccactacaaattccaaactgtcagcattacagaggtcttcgtgttccaccccactgtcccaggccaaccgttacaccaaagaacaagattatcgacctaaagcaactgggagaaaaacacccaccttggcatccccagttcctacaacaccttttctccgccctgtccaccaagttccccttgtcccccatgtccctatggttaggcctgctcaccagcttcacccagggttggtacagaggatgctggcccagggagtacatccacagcatcttccaagtttgctccaaactggtgtgcttcctcctgggatggacttgagtcatttacagggaatatctggccccatcctgggtcagcccttttaccctttacctgctgctagtcaccctctcttaaaccctcgtcctggaacacctctgcatctggcaatggtgcaacagcagctacagcgctcagttctgcatcctccaggctctggttcccatgcagcagctgtcagcgttcagacaacccctcagaacgtgcccagccggtcaggcctgccccacatgcactcccagctggagcatcgccccagccagaggagcagctcccctgtgggccttgccaaatggtttggctcagatgtgctacagcaacccctgccctccatgcccgccaaagttatcagtgtagatgaattggaataccgacagtgagcagggcaggcagactcaactaagcccggacctgtggtggcacactgggcaggaccctgcttcatctcgggttggtttatgggcttttactttggagcactctgtgtgaagctgtttggtggaacccatgcatctggtgtggtccgcattatgatggaaggatcttaaccagtcgagtggagtgtacattgtctgaatacaggatgcacaatgttgtcaatcctggaaatggtctttcttttttgtaagatatgtgaatgaagtgttggtgtcctcaccaagaggtggcacctaagggttctgaggaaataaatgtatagacccttatgtacagacctgtgtataaacaacttttgtatatacatataggatagcttttttgaactatacagctgtacataaaagtagctgatattagttaggcctgtgtcaacagtttggatttttttcacttgtacatttgggattttcttttggttgattaaaattgcatatgctaagtgtgtgaatgaaaaaaaaaaaaa

SEQ ID NO: 433575 - DNA, 5230 bp, Homo sapiens
aagagagacagcccaagccggtcggggtgggggcgcgagagcgaaggctgcggggagcggcgctgggaccggtgcgggcagcggggaggggagcggcggccgaggcaaagggccgccgagcggcggaggcaccgagtgcagagcattgtagaccaaggagccatggataggagaagtatgggtgaaacagaaagtggagatgctttccttgacctgaagaagcctcctgcctccaaatgcccccatcgctatacaaaagaagaactcttggatataaaagaactcccccattccaaacagaggccttcatgcctttctgaaaaatatgacagtgatggtgtctgggaccctgagaagtggcatgcctctctctacccagcttcagggcggagctcaccagtggaaagtctgaagaaagagttggatacagaccggccttccctggtgcgcaggatagtagatccacgagagcgtgtgaaagaagatgacttagatgttgttctcagccctcagagacggagctttggagggggctgccacgtgacagccgctgttagctcccggcgctcaggaagtccattagagaaagatagtgatgggcttcgtctgcttggtggacgtaggattggcagtgggaggataatctctgcccggacctttgagaaggatcaccgtcttagcgataaggacctgcgggacttgagagacagagaccgagagagggacttcaaggacaagcgtttcaggagagagtttggagatagtaagcgtgtctttggtgagcgtagaagaaatgattcttacacagaagaagaaccagagtggttctctgctggacccacaagtcagtctgaaaccatcgaactgactggctttgatgataagatactagaagaagatcacaaagggagaaaaagaacaaggcgacggacagcctctgtgaaggaaggtatagtagagtgcaatggaggagtggccgaagaggatgaagtggaggtcatccttgcacaggagcctgcggctgatcaggaagtgccaagggatgctgtcttgcctgagcagtccccaggagactttgactttaatgagttctttaaccttgataaggtgccatgcttggcttcgatgatagaagatgttttgggagaagggtcagtctctgccagtcggttcagtaggtggttctctaacccgagcagatcaggaagccgatccagcagtcttgggtcaacaccacatgaagagctagagagacttgcaggtctggagcaagccatcctctctcctggacagaactcggggaattactttgctcctataccattggaagaccatgctgaaaataaagtggatattttagaaatgctacagaaagccaaagtggatttgaaacctcttctttccagcctttctgcaaataaagaaaaacttaaagaaagctcacattcaggggttgtgctttcagtggaggaggtagaagcaggtctgaagggcttgaaggttgaccagcaagtgaagaattcaactcccttcatggcagaacacctagaagagaccttgagtgccgtaaccaacaatcgacaactgaagaaagacggagacatgactgcgttcaacaagctagtgagcacaatgaaggcaagtgggactttgccttctcagcccaaagtcagccgaaaccttgaaagccatttgatgtcccctgctgagattccaggccagcctgtccctaagaacatcctgcaggaacttctgggtcaaccagttcagagacctgcttcttccaatcttctgagtggccttatggggagcttggagcctacaacatctttactgggccaaagagcaccctctcctcccttgtcacaggtgtttcaaactcgagcagcctcagctgactaccttcgcccaagaataccatcaccaattggtttcacaccaggaccacagcagctactcggagatccattccaaggcatgcgcaaacccatgagccccatcacagcccagatgagccagctggagttgcaacaggcagctttagaagggctggccttgccacatgaccttgctgtacaggcagcaaacttctaccagcctggttttggcaaaccacaggtggacagaaccagagatggattcagaaacaggcaacagcgagtgaccaagtcaccagcacccgtgcatcgagggaattcctcttcccctgcccctgctgcctccatcacaagcatgctttctccttcctttacccctacctcagtgattcgtaagatgtacgagagcaaagagaaaagcaaggaggagccagcatctggaaaagcagctcttggtgacagtaaagaggatactcagaaggccagtgaagaaaacctcctgtcatccagctctgtacccagtgccgatcgagactcttctcccactacaaattccaaactgtcagcattacagaggtcttcgtgttccaccccactgtcccaggccaaccgttacaccaaagaacaagattatcgacctaaagcaactgggagaaaaacacccaccttggcatccccagttcctacaacaccttttctccgccctgtccaccaagttccccttgtcccccatgtccctatggttaggcctgctcaccagcttcacccagggttggtacagaggatgctggcccagggagtacatccacagcatcttccaagtttgctccaaactggtgtgcttcctcctgggatggacttgagtcatttacagggaatatctggccccatcctgggtcagcccttttaccctttacctgctgctagtcaccctctcttaaaccctcgtcctggaacacctctgcatctggcaatggtgcaacagcagctacagcgctcagttctgcatcctccaggctctggttcccatgcagcagctgtcagcgttcagacaacccctcagaacgtgcccagccggtcaggcctgccccacatgcactcccagctggagcatcgccccagccagaggagcagctcccctgtgggccttgccaaatggtttggctcagatgtgctacagcaacccctgccctccatgcccgccaaagttatcagtgtagatgaattggaataccgacagtgagcagggcaggcagactcaactaagcccggacctgtggtggcacactgggcaggaccctgcttcatctcgggtggaagctggaacgcagtcccaagtgtcaatggcagaacacagatacctgaatccagttccacctttcctgtgtatcctcttccacttatcttacttccccttcatgttgaaccaacgttaataggtgcaaggcacgagatgagttcacaagcaatcagtgctggaaggatgtgcaaaataaaagttaagagaagctgaggatatagaaggcatcctgaaagtaaaacagctgaggaccacaaagcatatcatggaaaatctgttaagcaggggaggtcaggtaggagaggaaagaatagtccctcccaaaggaagcagttaaataagtctgtgggaggtcagtggtaaaaggaagtgggaatgaagtgaacagagagtgcagctaggccttcccctaggagatagctactgagtgtcttttaagccagactctattaacagggaagggaagtgggaggtccattggcctttgtgaactatgagcataaacacaaaccaagaatgacgataacttacagggttaaattctggttcttcaataattctattccctttaccaacaattgattcaaaaatagacatgtgacccaattttaggccacgagacaacaaactgggtggcttctggaaaacagcttcccaaaaaggtaagaccaagttcccttccatttcagccgcttaagttagcactttctgctaaatgcagctaaacgtgttctaactagttaaatggcacagaacaatggatctgtttacttgtaataaagtcaggaaagaaacatggaatatgtaaaagcacaggaaattcaaatcatgctatgacagccaaaccagtaaagtcttagagttaatgaggagaaagcctttagctgtacctccacagtggccataccctaggcagcattcccaataccaaacatacccctctcccagaactgctaagtctaagcccagaggagaaagggaaaggtagggtaattctctcctcaaggagaccaggggtccctggaccaagccatggggagggtgctaaatgatggacacaaagcctattcacagaacatcctgaggccttaggatgaactggatttcagcaaccttctctccccaacattctggcagtgctaaatgcttgctcaatgaaagtgaattttggcaagaagagtccccagaaacccaatatgttctggctggagaacaaaccttcctggaaatcccgtagctcagaaagccaatgtttccctgttcccctgcagggttggggcaggctctagaccacggcctctatcatgaatgcaccagtggtatcaaggccgatattctgaaaagtaactagcataccaggcttcaggagcttaccttccaggtctggggacagtgacaagcccaagctccaggaagactatcaaagggaaacaactgctattagggcagcaggagaaacaagcactggagagaggctgagtatgtgaataatcccacactgtgatcactcatgacctgctaaaagctctggcttgcctcatttgaagaaataatcaaattctgtcttgctgcaaacctattcttcctgattttctcagggactactccatccatactgaaataatgtttgacttcttcccaagagcaagttagttaacaagtttaagatttctcccccatacttacatgtccataccctcccttctgcccatattctttaattatttaatttttatttcttggagacagggtctcactctgtcacccaggctggagtgcagtggcccatcttagctcactgcagcctggacctcccaggctcaagcagtcctcacctcagctcccagctatttaaaaggctaaggtgggaggatcgcttgagcccaggagttcaaggctgcagtgaaccacgattacgccactggactccagcctgggcggcaacagaacaagaccctatctcaaaaaaaccaaaaagatagttgtgcaataattaaagaaaaaaaaaaaaacagtaaaataagagcaaataaaatcctgtttgcttcgatat

SEQ ID NO: 433576 - DNA, 5575 bp, Homo sapiens
aagagagacagcccaagccggtcggggtgggggcgcgagagcgaaggctgcggggagcggcgctgggaccggtgcgggcagcggggaggggagcggcggccgaggcaaagggccgccgagcggcggaggcaccgagtgcagagcattgtagaccaaggagccatggataggagaagtatgggtgaaacagaaagtggagatgctttccttgacctgaagaagcctcctgcctccaaatgcccccatcgctatacaaaagaagaactcttggatataaaagaactcccccattccaaacagaggccttcatgcctttctgaaaaatatgacagtgatggtgtctgggaccctgagaagtggcatgcctctctctacccagcttcagggcggagctcaccagtggaaagtctgaagaaagagttggatacagaccggccttccctggtgcgcaggatagtagatccacgagagcgtgtgaaagaagatgacttagatgttgttctcagccctcagagacggagctttggagggggctgccacgtgacagccgctgttagctcccggcgctcaggaagtccattagagaaagatagtgatgggcttcgtctgcttggtggacgtaggattggcagtgggaggataatctctgcccggacctttgagaaggatcaccgtcttagcgataaggacctgcgggacttgagagacagagaccgagagagggacttcaaggacaagcgtttcaggagagagtttggagatagtaagcgtgtctttggtgagcgtagaagaaatgattcttacacagaagaagaaccagagtggttctctgctggacccacaagtcagtctgaaaccatcgaactgactggctttgatgataagatactagaagaagatcacaaagggagaaaaagaacaaggcgacggacagcctctgtgaaggaaggtatagtagagtgcaatggaggagtggccgaagaggatgaagtggaggtcatccttgcacaggagcctgcggctgatcaggaagtgccaagggatgctgtcttgcctgagcagtccccaggagactttgactttaatgagttctttaaccttgataaggtgccatgcttggcttcgatgatagaagatgttttgggagaagggtcagtctctgccagtcggttcagtaggtggttctctaacccgagcagatcaggaagccgatccagcagtcttgggtcaacaccacatgaagagctagagagacttgcaggtctggagcaagccatcctctctcctggacagaactcggggaattactttgctcctataccattggaagaccatgctgaaaataaagtggatattttagaaatgctacagaaagccaaagtggatttgaaacctcttctttccagcctttctgcaaataaagaaaaacttaaagaaagctcacattcaggggttgtgctttcagtggaggaggtagaagcaggtctgaagggcttgaaggttgaccagcaagtgaagaattcaactcccttcatggcagaacacctagaagagaccttgagtgccgtaaccaacaatcgacaactgaagaaagacggagacatgactgcgttcaacaagctagtgagcacaatgaaggcaagtgggactttgccttctcagcccaaagtcagccgaaaccttgaaagccatttgatgtcccctgctgagattccaggccagcctgtccctaagaacatcctgcaggaacttctgggtcaaccagttcagagacctgcttcttccaatcttctgagtggccttatggggagcttggagcctacaacatctttactgggccaaagagcaccctctcctcccttgtcacaggtgtttcaaactcgagcagcctcagctgactaccttcgcccaagaataccatcaccaattggtttcacaccaggaccacagcagctactcggagatccattccaaggcatgcgcaaacccatgagccccatcacagcccagatgagccagctggagttgcaacaggcagctttagaagggctggccttgccacatgaccttgctgtacaggcagcaaacttctaccagcctggttttggcaaaccacaggtggacagaaccagagatggattcagaaacaggcaacagcgagtgaccaagtcaccagcacccgtgcatcgagggaattcctcttcccctgcccctgctgcctccatcacaagcatgctttctccttcctttacccctacctcagtgattcgtaagatgtacgagagcaaagagaaaagcaaggaggagccagcatctggaaaagcagctcttggtgacagtaaagaggatactcagaaggccagtgaagaaaacctcctgtcatccagctctgtacccagtgccgatcgagactcttctcccactacaaattccaaactgtcagcattacagaggtcttcgtgttccaccccactgtcccaggccaaccgttacaccaaagaacaagattatcgacctaaagcaactgggagaaaaacacccaccttggcatccccagttcctacaacaccttttctccgccctgtccaccaagttccccttgtcccccatgtccctatggttaggcctgctcaccagcttcacccagggttggtacagaggatgctggcccagggagtacatccacagcatcttccaagtttgctccaaactggtgtgcttcctcctgggatggacttgagtcatttacagggaatatctggccccatcctgggtcagcccttttaccctttacctgctgctagtcaccctctcttaaaccctcgtcctggaacacctctgcatctggcaatggtgcaacagcagctacagcgctcagttctgcatcctccaggctctggttcccatgcagcagctgtcagcgttcagacaacccctcagaacgtgcccagccggtcaggcctgccccacatgcactcccagctggagcatcgccccagccagaggagcagctcccctgtgggccttgccaaatggtttggctcagatgtgctacagcaacccctgccctccatgcccgccaaagttatcagtgtagatgaattggaataccgacagtgagcagggcaggcagactcaactaagcccggacctgtggtggcacactgggcaggaccctgcttcatctcgggtggaagctggaacgcagtcccaagtgtcaatggcagaacacagatacctgaatccagttccacctttcctgtgtatcctcttccacttatcttacttccccttcatgttgaaccaacgttaataggtgcaaggtaaggaggactgggttgaagctgctagtaaaggcttccttttcagactagaagctagtaggacagaaacaggtaccatgcaaagagcaaagccattagctggtgattggcaaatggcgccagaaggaaataagggagtattgctaagagtatcagcagaagctagacatacaggttttagcaaaagtattttggtaaacacaaggactagaggaagcgggagggtgggggggggggatgaaggcaaaagacacattaatgcagtcttcaaggagctaagaccttgatataggatgagggcagagaggaagggatgtctttggagaaacttttgatgtcttgcaggcacgagatgagttcacaagcaatcagtgctggaaggatgtgcaaaataaaagttaagagaagctgaggatatagaaggcatcctgaaagtaaaacagctgaggaccacaaagcatatcatggaaaatctgttaagcaggggaggtcaggtaggagaggaaagaatagtccctcccaaaggaagcagttaaataagtctgtgggaggtcagtggtaaaaggaagtgggaatgaagtgaacagagagtgcagctaggccttcccctaggagatagctactgagtgtcttttaagccagactctattaacagggaagggaagtgggaggtccattggcctttgtgaactatgagcataaacacaaaccaagaatgacgataacttacagggttaaattctggttcttcaataattctattccctttaccaacaattgattcaaaaatagacatgtgacccaattttaggccacgagacaacaaactgggtggcttctggaaaacagcttcccaaaaaggtaagaccaagttcccttccatttcagccgcttaagttagcactttctgctaaatgcagctaaacgtgttctaactagttaaatggcacagaacaatggatctgtttacttgtaataaagtcaggaaagaaacatggaatatgtaaaagcacaggaaattcaaatcatgctatgacagccaaaccagtaaagtcttagagttaatgaggagaaagcctttagctgtacctccacagtggccataccctaggcagcattcccaataccaaacatacccctctcccagaactgctaagtctaagcccagaggagaaagggaaaggtagggtaattctctcctcaaggagaccaggggtccctggaccaagccatggggagggtgctaaatgatggacacaaagcctattcacagaacatcctgaggccttaggatgaactggatttcagcaaccttctctccccaacattctggcagtgctaaatgcttgctcaatgaaagtgaattttggcaagaagagtccccagaaacccaatatgttctggctggagaacaaaccttcctggaaatcccgtagctcagaaagccaatgtttccctgttcccctgcagggttggggcaggctctagaccacggcctctatcatgaatgcaccagtggtatcaaggccgatattctgaaaagtaactagcataccaggcttcaggagcttaccttccaggtctggggacagtgacaagcccaagctccaggaagactatcaaagggaaacaactgctattagggcagcaggagaaacaagcactggagagaggctgagtatgtgaataatcccacactgtgatcactcatgacctgctaaaagctctggcttgcctcatttgaagaaataatcaaattctgtcttgctgcaaacctattcttcctgattttctcagggactactccatccatactgaaataatgtttgacttcttcccaagagcaagttagttaacaagtttaagatttctcccccatacttacatgtccataccctcccttctgcccatattctttaattatttaatttttatttcttggagacagggtctcactctgtcacccaggctggagtgcagtggcccatcttagctcactgcagcctggacctcccaggctcaagcagtcctcacctcagctcccagctatttaaaaggctaaggtgggaggatcgcttgagcccaggagttcaaggctgcagtgaaccacgattacgccactggactccagcctgggcggcaacagaacaagaccctatctcaaaaaaaccaaaaagatagttgtgcaataattaaagaaaaaaaaaaaaacagtaaaataagagcaaataaaatcctgtttgcttcgatat

SEQ ID NO: 433577 - DNA, 3447 bp, Homo sapiens
aagagagacagcccaagccggtcggggtgggggcgcgagagcgaaggctgcggggagcggcgctgggaccggtgcgggcagcggggaggggagcggcggccgaggcaaagggccgccgagcggcggaggcaccgagtgcagagcattgtagaccaaggagccatggataggagaagtatgggtgaaacagaaagtggagatgctttccttgacctgaagaagcctcctgcctccaaatgcccccatcgctatacaaaagaagaactcttggatataaaagaactcccccattccaaacagaggccttcatgcctttctgaaaaatatgacagtgatggtgtctgggaccctgagaagtggcatgcctctctctacccagcttcagggcggagctcaccagtggaaagtctgaagaaagagttggatacagaccggccttccctggtgcgcaggatagtagatccacgagagcgtgtgaaagaagatgacttagatgttgttctcagccctcagagacggagctttggagggggctgccacgtgacagccgctgttagctcccggcgctcaggaagtccattagagaaagatagtgatgggcttcgtctgcttggtggacgtaggattggcagtgggaggataatctctgcccggacctttgagaaggatcaccgtcttagcgataaggacctgcgggacttgagagacagagaccgagagagggacttcaaggacaagcgtttcaggagagagtttggagatagtaagcgtgtctttggtgagcgtagaagaaatgattcttacacagaagaagaaccagagtggttctctgctggacccacaagtcagtctgaaaccatcgaactgactggctttgatgataagatactagaagaagatcacaaagggagaaaaagaacaaggcgacggacagcctctgtgaaggaaggtatagtagagtgcaatggaggagtggccgaagaggatgaagtggaggtcatccttgcacaggagcctgcggctgatcaggaagtgccaagggatgctgtcttgcctgagcagtccccaggagactttgactttaatgagttctttaaccttgataaggtgccatgcttggcttcgatgatagaagatgttttgggagaagggtcagtctctgccagtcggttcagtaggtggttctctaacccgagcagatcaggaagccgatccagcagtcttgggtcaacaccacatgaagagctagagagacttgcaggtctggagcaagccatcctctctcctggacagaactcggggaattactttgctcctataccattggaagaccatgctgaaaataaagtggatattttagaaatgctacagaaagccaaagtggatttgaaacctcttctttccagcctttctgcaaataaagaaaaacttaaagaaagctcacattcaggggttgtgctttcagtggaggaggtagaagcaggtctgaagggcttgaaggttgaccagcaagtgaagaattcaactcccttcatggcagaacacctagaagagaccttgagtgccgtaaccaacaatcgacaactgaagaaagacggagacatgactgcgttcaacaagctagtgagcacaatgaaggcaagtgggactttgccttctcagcccaaagtcagccgaaaccttgaaagccatttgatgtcccctgctgagattccaggccagcctgtccctaagaacatcctgcaggaacttctgggtcaaccagttcagagacctgcttcttccaatcttctgagtggccttatggggagcttggagcctacaacatctttactgggccaaagagcaccctctcctcccttgtcacaggtgtttcaaactcgagcagcctcagctgactaccttcgcccaagaataccatcaccaattggtttcacaccaggaccacagcagctactcggagatccattccaaggcatgcgcaaacccatgagccccatcacagcccagatgagccagctggagttgcaacaggcagctttagaagggctggccttgccacatgaccttgctgtacaggcagcaaacttctaccagcctggttttggcaaaccacaggtggacagaaccagagatggattcagaaacaggcaacagcgagtgaccaagtcaccagcacccgtgcatcgagggaattcctcttcccctgcccctgctgcctccatcacaagcatgctttctccttcctttacccctacctcagtgattcgtaagatgtacgagagcaaagagaaaagcaaggaggagccagcatctggaaaagcagctcttggtgacagtaaagaggatactcagaaggccagtgaagaaaacctcctgtcatccagctctgtacccagtgccgatcgagactcttctcccactacaaattccaaactgtcagcattacagaggtcttcgtgttccaccccactgtcccaggccaaccgttacaccaaagaacaagattatcgacctaaagcaactgggagaaaaacacccaccttggcatccccagttcctacaacaccttttctccgccctgtccaccaagttccccttgtcccccatgtccctatggttaggcctgctcaccagcttcacccagggttggtacagaggatgctggcccagggagtacatccacagcatcttccaagtttgctccaaactggtgtgcttcctcctgggatggacttgagtcatttacagggaatatctggccccatcctgggtcagcccttttaccctttacctgctgctagtcaccctctcttaaaccctcgtcctggaacacctctgcatctggcaatggtgcaacagcagctacagcgctcagttctgcatcctccaggctctggttcccatgcagcagctgtcagcgttcagacaacccctcagaacgtgcccagccggtcaggcctgccccacatgcactcccagctggagcatcgccccagccagaggagcagctcccctgtgggccttgccaaatggtttggctcagatgtgctacagcaacccctgccctccatgcccgccaaagttatcagtgtagatgaattggaataccgacagtgagcagggcaggcagactcaactaagcccggacctgtggtggcacactgggcaggaccctgcttcatctcgggttggtttatgggcttttactttggagcactctgtgtgaagctgtttggtggaacccatgcatctggtgtggtccgcattatgatggaaggatcttaaccagtcgagtggagtgtacattgtctgaatacaggatgcacaatgttgtcaatcctggaaatggtctttcttttttgtaagatatgtgaatgaagtgttggtgtcctcaccaagaggtggcacctaagggttctgaggaaataaatgtatagaccctta

SEQ ID NO: 433578 - DNA, 2961 bp, Homo sapiens
ctgtatcacattccttagctcacaattgttttattattcaccttaactattagtatatacatagcacttacggataaagattctacagaatacagtacagttctgagtcccctttcctaactggaggtttttcagtcctgctatgaggtgatacttatttcccatgctactcaagttaatttaccagagttctagatatttgtccattcaggaccattttaggactccatgctaaagggtcagataatgaggtaaaggtcaaggtggttggatttttgactacaagggtagtagagtcttgggcagcctaagtcttgaccgtttgttagggaataatgactataagcctggaactgcccaccctgccgtgtacttgcaggaatacaagaaagcaggtcacctttcaagaaaacctggctttatggattatgcatgaagtcagtctcttcctggtacttttctttcagcctcattagtaatccccttcccccatgctattcactccatgtgattcctcagcttcagaaatagaccctctgtttagaatttttggcaaatgctttctggtttccacaggtggaagctggaacgcagtcccaagtgtcaatggcagaacacagatacctgaatccagttccacctttcctgtgtatcctcttccacttatcttacttccccttcatgttgaaccaacgttaataggtgcaaggtaaggaggactgggttgaagctgctagtaaaggcttccttttcagactagaagctagtaggacagaaacaggtaccatgcaaagagcaaagccattagctggtgattggcaaatggcgccagaaggaaataagggagtattgctaagagtatcagcagaagctagacatacaggttttagcaaaagtattttggtaaacacaaggactagaggaagcgggagggtgggggggggggatgaaggcaaaagacacattaatgcagtcttcaaggagctaagaccttgatataggatgagggcagagaggaagggatgtctttggagaaacttttgatgtcttgcaggcacgagatgagttcacaagcaatcagtgctggaaggatgtgcaaaataaaagttaagagaagctgaggatatagaaggcatcctgaaagtaaaacagctgaggaccacaaagcatatcatggaaaatctgttaagcaggggaggtcaggtaggagaggaaagaatagtccctcccaaaggaagcagttaaataagtctgtgggaggtcagtggtaaaaggaagtgggaatgaagtgaacagagagtgcagctaggccttcccctaggagatagctactgagtgtcttttaagccagactctattaacagggaagggaagtgggaggtccattggcctttgtgaactatgagcataaacacaaaccaagaatgacgataacttacagggttaaattctggttcttcaataattctattccctttaccaacaattgattcaaaaatagacatgtgacccaattttaggccacgagacaacaaactgggtggcttctggaaaacagcttcccaaaaaggtaagaccaagttcccttccatttcagccgcttaagttagcactttctgctaaatgcagctaaacgtgttctaactagttaaatggcacagaacaatggatctgtttacttgtaataaagtcaggaaagaaacatggaatatgtaaaagcacaggaaattcaaatcatgctatgacagccaaaccagtaaagtcttagagttaatgaggagaaagcctttagctgtacctccacagtggccataccctaggcagcattcccaataccaaacatacccctctcccagaactgctaagtctaagcccagaggagaaagggaaaggtagggtaattctctcctcaaggagaccaggggtccctggaccaagccatggggagggtgctaaatgatggacacaaagcctattcacagaacatcctgaggccttaggatgaactggatttcagcaaccttctctccccaacattctggcagtgctaaatgcttgctcaatgaaagtgaattttggcaagaagagtccccagaaacccaatatgttctggctggagaacaaaccttcctggaaatcccgtagctcagaaagccaatgtttccctgttcccctgcagggttggggcaggctctagaccacggcctctatcatgaatgcaccagtggtatcaaggccgatattctgaaaagtaactagcataccaggcttcaggagcttaccttccaggtctggggacagtgacaagcccaagctccaggaagactatcaaagggaaacaactgctattagggcagcaggagaaacaagcactggagagaggctgagtatgtgaataatcccacactgtgatcactcatgacctgctaaaagctctggcttgcctcatttgaagaaataatcaaattctgtcttgctgcaaacctattcttcctgattttctcagggactactccatccatactgaaataatgtttgacttcttcccaagagcaagttagttaacaagtttaagatttctcccccatacttacatgtccataccctcccttctgcccatattctttaattatttaatttttatttcttggagacagggtctcactctgtcacccaggctggagtgcagtggcccatcttagctcactgcagcctggacctcccaggctcaagcagtcctcacctcagctcccagctatttaaaaggctaaggtgggaggatcgcttgagcccaggagttcaaggctgcagtgaaccacgattacgccactggactccagcctgggcggcaacagaacaagaccctatctcaaaaaaaccaaaaagatagttgtgcaataattaaagaaaaaaaaaaaaacagtaaaataagagcaaataaaatcctgtttgcttcgatat

SEQ ID NO: 433579 - DNA, 1762 bp, Homo sapiens
aagagagacagcccaagccggtcggggtgggggcgcgagagcgaaggctgcggggagcggcgctgggaccggtgcgggcagcggggaggggagcggcggccgaggcaaagggccgccgagcggcggaggcaccgagtgcagagcattgtagaccaaggagccatggataggagaagtatgggtgaaacagaaagtggagatgctttccttgacctgaagaagcctcctgcctccaaatgcccccatcgctatacaaaagaagaactcttggatataaaagaactcccccattccaaacagaggccttcatgcctttctgaaaaatatgacagtgatggtgtctgggaccctgagaagtggcatgcctctctctacccagcttcagggcggagctcaccagtggaaagtctgaagaaagagttggatacagaccggccttccctggtgcgcaggatagtagatccacgagagcgtgtgaaagaagatgacttagatgttgttctcagccctcagagacggagctttggagggggctgccacgtgacagccgctgttagctcccggcgctcaggaagtccattagagaaagatagtgatgggcttcgtctgcttggtggacgtaggattggcagtgggaggataatctctgcccggacctttgagaaggatcaccgtcttagcgataaggacctgcgggacttgagagacagagaccgagagagggacttcaaggacaagcgtttcaggagagagtttggagatagtaagcgtgtctttggtgagcgtagaagaaatgattcttacacagaagaagaaccagagtggttctctgctggacccacaagtcagtctgaaaccatcgaactgactggctttgatgataagatactagaagaagatcacaaagggagaaaaagaacaaggcgacggacagcctctgtgaaggaaggtatagtagagtgcaatggaggagtggccgaagaggatgaagtggaggtcatccttgcacaggagcctgcggctgatcaggaagtgccaagggatgctgtcttgcctgagcagtccccaggagactttgactttaatgagttctttaaccttgataaggtgccatgcttggcttcgatgatagaagatgttttgggagaagggtcagtctctgccagtcggttcagtaggtggttctctaacccgagcagatcaggaagccgatccagcagtcttgggtcaacaccacatgaagagctagagagacttgcaggtctggagcaagccatcctctctcctggacagaactcggggaattactttgctcctataccattggaagaccatgctgaaaataaagtggatattttagaaatgctacagaaagccaaagtggatttgaaacctcttctttccagcctttctgcaaataaagaaaaacttaaagaaagctcacattcaggggttgtgctttcagtggaggaggtagaagcaggtctgaagggcttgaaggttgaccagcaagtgaagaattcaactcccttcatggcagaacacctagaagagaccttgagtgccgtaaccaacaatcgacaactgaagaaagacggagacatgactgcgttcaacaagctagtgagcacaatgaaggcaagtgggactttgccttctcagcccaaagtcagcgtaagtatctgacacaaaccccccacccttttctcctttttttttcttctttttcccaccacaataaaaggatttttaaaaaggtatt

SEQ ID NO: 433580 - DNA, 3655 bp, Homo sapiens
gagcggggcgggtagccggcgggctggctggcggggaccgagccgccgggccggggaggacggctgcgggcctgcgctagctccagcttgaagcgcccgggccgggagattcggcctccctcctccctgcggccggccgcccctcagtgcagagcattgtagaccaaggagccatggataggagaagtatgggtgaaacagaaagtggagatgctttccttgacctgaagaagcctcctgcctccaaatgcccccatcgctatacaaaagaagaactcttggatataaaagaactcccccattccaaacagaggccttcatgcctttctgaaaaatatgacagtgatggtgtctgggaccctgagaagtggcatgcctctctctacccagcttcagggcggagctcaccagtggaaagtctgaagaaagagttggatacagaccggccttccctggtgcgcaggatagtagatccacgagagcgtgtgaaagaagatgacttagatgttgttctcagccctcagagacggagctttggagggggctgccacgtgacagccgctgttagctcccggcgctcaggaagtccattagagaaagatagtgatgggcttcgtctgcttggtggacgtaggattggcagtgggaggataatctctgcccggacctttgagaaggatcaccgtcttagcgataaggacctgcgggacttgagagacagagaccgagagagggacttcaaggacaagcgtttcaggagagagtttggagatagtaagcgtgtctttggtgagcgtagaagaaatgattcttacacagaagaagaaccagagtggttctctgctggacccacaagtcagtctgaaaccatcgaactgactggctttgatgataagatactagaagaagatcacaaagggagaaaaagaacaaggcgacggacagcctctgtgaaggaaggtatagtagagtgcaatggaggagtggccgaagaggatgaagtggaggtcatccttgcacaggagcctgcggctgatcaggaagtgccaagggatgctgtcttgcctgagcagtccccaggagactttgactttaatgagttctttaaccttgataaggtgccatgcttggcttcgatgatagaagatgttttgggagaagggtcagtctctgccagtcggttcagtaggtggttctctaacccgagcagatcaggaagccgatccagcagtcttgggtcaacaccacatgaagagctagagagacttgcaggtctggagcaagccatcctctctcctggacagaactcggggaattactttgctcctataccattggaagaccatgctgaaaataaagtggatattttagaaatgctacagaaagccaaagtggatttgaaacctcttctttccagcctttctgcaaataaagaaaaacttaaagaaagctcacattcaggggttgtgctttcagtggaggaggtagaagcaggtctgaagggcttgaaggttgaccagcaagtgaagaattcaactcccttcatggcagaacacctagaagagaccttgagtgccgtaaccaacaatcgacaactgaagaaagacggagacatgactgcgttcaacaagctagtgagcacaatgaaggcaagtgggactttgccttctcagcccaaagtcagccgaaaccttgaaagccatttgatgtcccctgctgagattccaggccagcctgtccctaagaacatcctgcaggaacttctgggtcaaccagttcagagacctgcttcttccaatcttctgagtggccttatggggagcttggagcctacaacatctttactgggccaaagagcaccctctcctcccttgtcacaggtgtttcaaactcgagcagcctcagctgactaccttcgcccaagaataccatcaccaattggtttcacaccaggaccacagcagctactcggagatccattccaaggcatgcgcaaacccatgagccccatcacagcccagatgagccagctggagttgcaacaggcagctttagaagggctggccttgccacatgaccttgctgtacaggcagcaaacttctaccagcctggttttggcaaaccacaggtggacagaaccagagatggattcagaaacaggcaacagcgagtgaccaagtcaccagcacccgtgcatcgagggaattcctcttcccctgcccctgctgcctccatcacaagcatgctttctccttcctttacccctacctcagtgattcgtaagatgtacgagagcaaagagaaaagcaaggaggagccagcatctggaaaagcagctcttggtgacagtaaagaggatactcagaaggccagtgaagaaaacctcctgtcatccagctctgtacccagtgccgatcgagactcttctcccactacaaattccaaactgtcagcattacagaggtcttcgtgttccaccccactgtcccaggccaaccgttacaccaaagaacaagattatcgacctaaagcaactgggagaaaaacacccaccttggcatccccagttcctacaacaccttttctccgccctgtccaccaagttccccttgtcccccatgtccctatggttaggcctgctcaccagcttcacccagggttggtacagaggatgctggcccagggagtacatccacagcatcttccaagtttgctccaaactggtgtgcttcctcctgggatggacttgagtcatttacagggaatatctggccccatcctgggtcagcccttttaccctttacctgctgctagtcaccctctcttaaaccctcgtcctggaacacctctgcatctggcaatggtgcaacagcagctacagcgctcagttctgcatcctccaggctctggttcccatgcagcagctgtcagcgttcagacaacccctcagaacgtgcccagccggtcaggcctgccccacatgcactcccagctggagcatcgccccagccagaggagcagctcccctgtgggccttgccaaatggtttggctcagatgtgctacagcaacccctgccctccatgcccgccaaagttatcagtgtagatgaattggaataccgacagtgagcagggcaggcagactcaactaagcccggacctgtggtggcacactgggcaggaccctgcttcatctcgggttggtttatgggcttttactttggagcactctgtgtgaagctgtttggtggaacccatgcatctggtgtggtccgcattatgatggaaggatcttaaccagtcgagtggagtgtacattgtctgaatacaggatgcacaatgttgtcaatcctggaaatggtctttcttttttgtaagatatgtgaatgaagtgttggtgtcctcaccaagaggtggcacctaagggttctgaggaaataaatgtatagacccttatgtacagacctgtgtataaacaacttttgtatatacatataggatagcttttttgaactatacagctgtacataaaagtagctgatattagttaggcctgtgtcaacagtttggatttttttcacttgtacatttgggattttcttttggttgattaaaattgcatatgctaagtgtgtgaatgaaaaaaaaaaaaa

SEQ ID NO: 433581 - DNA, 3024 bp, Homo sapiens
tggtgatgggcctcaggtatacagcatcatatcttcctttcactatgaacattacaacgaagaccttgactgaagtagaaatggcttgactagaaattttttaatcttgctttatgtacttttccagagagagtttggagatagtaagcgtgtctttggtgagcgtagaagaaatgattcttacacagaagaagaaccagagtggttctctgctggacccacaagtcagtctgaaaccatcgaactgactggctttgatgataagatactagaagaagatcacaaagggagaaaaagaacaaggcgacggacagcctctgtgaaggaaggtatagtagagtgcaatggaggagtggccgaagaggatgaagtggaggtcatccttgcacaggagcctgcggctgatcaggaagtgccaagggatgctgtcttgcctgagcagtccccaggagactttgactttaatgagttctttaaccttgataaggtgccatgcttggcttcgatgatagaagatgttttgggagaagggtcagtctctgccagtcggttcagtaggtggttctctaacccgagcagatcaggaagccgatccagcagtcttgggtcaacaccacatgaagagctagagagacttgcaggtctggagcaagccatcctctctcctggacagaactcggggaattactttgctcctataccattggaagaccatgctgaaaataaagtggatattttagaaatgctacagaaagccaaagtggatttgaaacctcttctttccagcctttctgcaaataaagaaaaacttaaagaaagctcacattcaggggttgtgctttcagtggaggaggtagaagcaggtctgaagggcttgaaggttgaccagcaagtgaagaattcaactcccttcatggcagaacacctagaagagaccttgagtgccgtaaccaacaatcgacaactgaagaaagacggagacatgactgcgttcaacaagctagtgagcacaatgaaggcaagtgggactttgccttctcagcccaaagtcagccgaaaccttgaaagccatttgatgtcccctgctgagattccaggccagcctgtccctaagaacatcctgcaggaacttctgggtcaaccagttcagagacctgcttcttccaatcttctgagtggccttatggggagcttggagcctacaacatctttactgggccaaagagcaccctctcctcccttgtcacaggtgtttcaaactcgagcagcctcagctgactaccttcgcccaagaataccatcaccaattggtttcacaccaggaccacagcagctactcggagatccattccaaggcatgcgcaaacccatgagccccatcacagcccagatgagccagctggagttgcaacaggcagctttagaagggctggccttgccacatgaccttgctgtacaggcagcaaacttctaccagcctggttttggcaaaccacaggtggacagaaccagagatggattcagaaacaggcaacagcgagtgaccaagtcaccagcacccgtgcatcgagggaattcctcttcccctgcccctgctgcctccatcacaagcatgctttctccttcctttacccctacctcagtgattcgtaagatgtacgagagcaaagagaaaagcaaggaggagccagcatctggaaaagcagctcttggtgacagtaaagaggatactcagaaggccagtgaagaaaacctcctgtcatccagctctgtacccagtgccgatcgagactcttctcccactacaaattccaaactgtcagcattacagaggtcttcgtgttccaccccactgtcccaggccaaccgttacaccaaagaacaagattatcgacctaaagcaactgggagaaaaacacccaccttggcatccccagttcctacaacaccttttctccgccctgtccaccaagttccccttgtcccccatgtccctatggttaggcctgctcaccagcttcacccagggttggtacagaggatgctggcccagggagtacatccacagcatcttccaagtttgctccaaactggtgtgcttcctcctgggatggacttgagtcatttacagggaatatctggccccatcctgggtcagcccttttaccctttacctgctgctagtcaccctctcttaaaccctcgtcctggaacacctctgcatctggcaatggtgcaacagcagctacagcgctcagttctgcatcctccaggctctggttcccatgcagcagctgtcagcgttcagacaacccctcagaacgtgcccagccggtcaggcctgccccacatgcactcccagctggagcatcgccccagccagaggagcagctcccctgtgggccttgccaaatggtttggctcagatgtgctacagcaacccctgccctccatgcccgccaaagttatcagtgtagatgaattggaataccgacagtgagcagggcaggcagactcaactaagcccggacctgtggtggcacactgggcaggaccctgcttcatctcgggttggtttatgggcttttactttggagcactctgtgtgaagctgtttggtggaacccatgcatctggtgtggtccgcattatgatggaaggatcttaaccagtcgagtggagtgtacattgtctgaatacaggatgcacaatgttgtcaatcctggaaatggtctttcttttttgtaagatatgtgaatgaagtgttggtgtcctcaccaagaggtggcacctaagggttctgaggaaataaatgtatagacccttatgtacagacctgtgtataaacaacttttgtatatacatataggatagcttttttgaactatacagctgtacataaaagtagctgatattagttaggcctgtgtcaacagtttggatttttttcacttgtacatttgggattttcttttggttgattaaaattgcatatgctaagtgtgtgaatgaaaaaaaaaaaaa

SEQ ID NO: 433582 - DNA, 2447 bp, Homo sapiens
  misc_feature (10)..(10): n is a, c, g, or t
tgatagctgnctctagaggataccctcgtcttttgataggatgaagagctagagagacttgcaggtctggagcaagccatcctctctcctggacagaactcggggaattactttgctcctataccattggaagaccatgctgaaaataaagtggatattttagaaatgctacagaaagccaaagtggatttgaaacctcttctttccagcctttctgcaaataaagaaaaacttaaagaaagctcacattcaggggttgtgctttcagtggaggaggtagaagcaggtctgaagggcttgaaggttgaccagcaagtgaagaattcaactcccttcatggcagaacacctagaagagaccttgagtgccgtaaccaacaatcgacaactgaagaaagacggagacatgactgcgttcaacaagctagtgagcacaatgaaggcaagtgggactttgccttctcagcccaaagtcagccgaaaccttgaaagccatttgatgtcccctgctgagattccaggccagcctgtccctaagaacatcctgcaggaacttctgggtcaaccagttcagagacctgcttcttccaatcttctgagtggccttatggggagcttggagcctacaacatctttactgggccaaagagcaccctctcctcccttgtcacaggtgtttcaaactcgagcagcctcagctgactaccttcgcccaagaataccatcaccaattggtttcacaccaggaccacagcagctactcggagatccattccaaggcatgcgcaaacccatgagccccatcacagcccagatgagccagctggagttgcaacaggcagctttagaagggctggccttgccacatgaccttgctgtacaggcagcaaacttctaccagcctggttttggcaaaccacaggtggacagaaccagagatggattcagaaacaggcaacagcgagtgaccaagtcaccagcacccgtgcatcgagggaattcctcttcccctgcccctgctgcctccatcacaagcatgctttctccttcctttacccctacctcagtgattcgtaagatgtacgagagcaaagagaaaagcaaggaggagccagcatctggaaaagcagctcttggtgacagtaaagaggatactcagaaggccagtgaagaaaacctcctgtcatccagctctgtacccagtgccgatcgagactcttctcccactacaaattccaaactgtcagcattacagaggtcttcgtgttccaccccactgtcccaggccaaccgttacaccaaagaacaagattatcgacctaaagcaactgggagaaaaacacccaccttggcatccccagttcctacaacaccttttctccgccctgtccaccaagttccccttgtcccccatgtccctatggttaggcctgctcaccagcttcacccagggttggtacagaggatgctggcccagggagtacatccacagcatcttccaagtttgctccaaactggtgtgcttcctcctgggatggacttgagtcatttacagggaatatctggccccatcctgggtcagcccttttaccctttacctgctgctagtcaccctctcttaaaccctcgtcctggaacacctctgcatctggcaatggtgcaacagcagctacagcgctcagttctgcatcctccaggctctggttcccatgcagcagctgtcagcgttcagacaacccctcagaacgtgcccagccggtcaggcctgccccacatgcactcccagctggagcatcgccccagccagaggagcagctcccctgtgggccttgccaaatggtttggctcagatgtgctacagcaacccctgccctccatgcccgccaaagttatcagtgtagatgaattggaataccgacagtgagcagggcaggcagactcaactaagcccggacctgtggtggcacactgggcaggaccctgcttcatctcgggttggtttatgggcttttactttggagcactctgtgtgaagctgtttggtggaacccatgcatctggtgtggtccgcattatgatggaaggatcttaaccagtcgagtggagtgtacattgtctgaatacaggatgcacaatgttgtcaatcctggaaatggtctttcttttttgtaagatatgtgaatgaagtgttggtgtcctcaccaagaggtggcacctaagggttctgaggaaataaatgtatagacccttatgtacagacctgtgtataaacaacttttgtatatacatataggatagcttttttgaactatacagctgtacataaaagtagctgatattagttaggcctgtgtcaacagtttggatttttttcacttgtacatttgggattttcttttggttgattaaaattgcatatgctaagtgtgtgaatgaaaaaaaaaaaaa

SEQ ID NO: 433583 - DNA, 2085 bp, Homo sapiens
  misc_feature (28)..(28): n is a, c, g, or t
agtaaactcggcaaatcggattgtcgantgtggttacggcactcaaggtctcttctaggtgttctgccatgaagggagttgaattcttcacttgctggtcaccttcaagcccttccgaaaccttgaaagccatttgatgtcccctgctgagattccaggccagcctgtccctaagaacatcctgcaggaacttctgggtcaaccagttcagagacctgcttcttccaatcttctgagtggccttatggggagcttggagcctacaacatctttactgggccaaagagcaccctctcctcccttgtcacaggtgtttcaaactcgagcagcctcagctgactaccttcgcccaagaataccatcaccaattggtttcacaccaggaccacagcagctactcggagatccattccaaggcatgcgcaaacccatgagccccatcacagcccagatgagccagctggagttgcaacaggcagctttagaagggctggccttgccacatgaccttgctgtacaggcagcaaacttctaccagcctggttttggcaaaccacaggtggacagaaccagagatggattcagaaacaggcaacagcgagtgaccaagtcaccagcacccgtgcatcgagggaattcctcttcccctgcccctgctgcctccatcacaagcatgctttctccttcctttacccctacctcagtgattcgtaagatgtacgagagcaaagagaaaagcaaggaggagccagcatctggaaaagcagctcttggtgacagtaaagaggatactcagaaggccagtgaagaaaacctcctgtcatccagctctgtacccagtgccgatcgagactcttctcccactacaaattccaaactgtcagcattacagaggtcttcgtgttccaccccactgtcccaggccaaccgttacaccaaagaacaagattatcgacctaaagcaactgggagaaaaacacccaccttggcatccccagttcctacaacaccttttctccgccctgtccaccaagttccccttgtcccccatgtccctatggttaggcctgctcaccagcttcacccagggttggtacagaggatgctggcccagggagtacatccacagcatcttccaagtttgctccaaactggtgtgcttcctcctgggatggacttgagtcatttacagggaatatctggccccatcctgggtcagcccttttaccctttacctgctgctagtcaccctctcttaaaccctcgtcctggaacacctctgcatctggcaatggtgcaacagcagctacagcgctcagttctgcatcctccaggctctggttcccatgcagcagctgtcagcgttcagacaacccctcagaacgtgcccagccggtcaggcctgccccacatgcactcccagctggagcatcgccccagccagaggagcagctcccctgtgggccttgccaaatggtttggctcagatgtgctacagcaacccctgccctccatgcccgccaaagttatcagtgtagatgaattggaataccgacagtgagcagggcaggcagactcaactaagcccggacctgtggtggcacactgggcaggaccctgcttcatctcgggttggtttatgggcttttactttggagcactctgtgtgaagctgtttggtggaacccatgcatctggtgtggtccgcattatgatggaaggatcttaaccagtcgagtggagtgtacattgtctgaatacaggatgcacaatgttgtcaatcctggaaatggtctttcttttttgtaagatatgtgaatgaagtgttggtgtcctcaccaagaggtggcacctaagggttctgaggaaataaatgtatagacccttatgtacagacctgtgtataaacaacttttgtatatacatataggatagcttttttgaactatacagctgtacataaaagtagctgatattagttaggcctgtgtcaacagtttggatttttttcacttgtacatttgggattttcttttggttgattaaaattgcatatgctaagtgtgtgaatgaaaaaaaaaaaaa

SEQ ID NO: 433584 - DNA, 1989 bp, Homo sapiens
  misc_feature (28)..(28): n is a, c, g, or t
agtaaactcggcaaatcggattgtcgantgtggttacggcactcaaggtctcttctaggtgttctgccatgaagggagttgaattcttcacttgctggtcaccttcaagcccttcagacctgcttcttccaatcttctgagtggccttatggggagcttggagcctacaacatctttactgggccaaagagcaccctctcctcccttgtcacaggtgtttcaaactcgagcagcctcagctgactaccttcgcccaagaataccatcaccaattggtttcacaccaggaccacagcagctactcggagatccattccaaggcatgcgcaaacccatgagccccatcacagcccagatgagccagctggagttgcaacaggcagctttagaagggctggccttgccacatgaccttgctgtacaggcagcaaacttctaccagcctggttttggcaaaccacaggtggacagaaccagagatggattcagaaacaggcaacagcgagtgaccaagtcaccagcacccgtgcatcgagggaattcctcttcccctgcccctgctgcctccatcacaagcatgctttctccttcctttacccctacctcagtgattcgtaagatgtacgagagcaaagagaaaagcaaggaggagccagcatctggaaaagcagctcttggtgacagtaaagaggatactcagaaggccagtgaagaaaacctcctgtcatccagctctgtacccagtgccgatcgagactcttctcccactacaaattccaaactgtcagcattacagaggtcttcgtgttccaccccactgtcccaggccaaccgttacaccaaagaacaagattatcgacctaaagcaactgggagaaaaacacccaccttggcatccccagttcctacaacaccttttctccgccctgtccaccaagttccccttgtcccccatgtccctatggttaggcctgctcaccagcttcacccagggttggtacagaggatgctggcccagggagtacatccacagcatcttccaagtttgctccaaactggtgtgcttcctcctgggatggacttgagtcatttacagggaatatctggccccatcctgggtcagcccttttaccctttacctgctgctagtcaccctctcttaaaccctcgtcctggaacacctctgcatctggcaatggtgcaacagcagctacagcgctcagttctgcatcctccaggctctggttcccatgcagcagctgtcagcgttcagacaacccctcagaacgtgcccagccggtcaggcctgccccacatgcactcccagctggagcatcgccccagccagaggagcagctcccctgtgggccttgccaaatggtttggctcagatgtgctacagcaacccctgccctccatgcccgccaaagttatcagtgtagatgaattggaataccgacagtgagcagggcaggcagactcaactaagcccggacctgtggtggcacactgggcaggaccctgcttcatctcgggttggtttatgggcttttactttggagcactctgtgtgaagctgtttggtggaacccatgcatctggtgtggtccgcattatgatggaaggatcttaaccagtcgagtggagtgtacattgtctgaatacaggatgcacaatgttgtcaatcctggaaatggtctttcttttttgtaagatatgtgaatgaagtgttggtgtcctcaccaagaggtggcacctaagggttctgaggaaataaatgtatagacccttatgtacagacctgtgtataaacaacttttgtatatacatataggatagcttttttgaactatacagctgtacataaaagtagctgatattagttaggcctgtgtcaacagtttggatttttttcacttgtacatttgggattttcttttggttgattaaaattgcatatgctaagtgtgtgaatgaaaaaaaaaaaaa

SEQ ID NO: 433585 - DNA, 3590 bp, Homo sapiens
aagagagacagcccaagccggtcggggtgggggcgcgagagcgaaggctgcggggagcggcgctgggaccggtgcgggcagcggggaggggagcggcggccgaggcaaagggccgccgagcggcggaggcaccgagtgcagagcattgtagaccaaggagccatggataggagaagtatgggtgaaacagaaagtggagatgctttccttgacctgaagaagcctcctgcctccaaatgcccccatcgctatacaaaagaagaactcttggatataaaagaactcccccattccaaacagaggccttcatgcctttctgaaaaatatgacagtgatggtgtctgggaccctgagaagtggcatgcctctctctacccagcttcagggcggagctcaccagtggaaagtctgaagaaagagttggatacagaccggccttccctggtgcgcaggatagtagatccacgagagcgtgtgaaagaagatgacttagatgttgttctcagccctcagagacggagctttggagggggctgccacgtgacagccgctgttagctcccggcgctcaggaagtccattagagaaagatagtgatgggcttcgtctgcttggtggacgtaggattggcagtgggaggataatctctgcccggacctttgagaaggatcaccgtcttagcgataaggacctgcgggacttgagagacagagaccgagagagggacttcaaggacaagcgtttcaggagagagtttggagatagtaagcgtgtctttggtgagcgtagaagaaatgattcttacacagaagaagaaccagagtggttctctgctggacccacaagtcagtctgaaaccatcgaactgactggctttgatgataagatactagaagaagatcacaaagggagaaaaagaacaaggcgacggacagcctctgtgaaggaaggtatagtagagtgcaatggaggagtggccgaagaggatgaagtggaggtcatccttgcacaggagcctgcggctgatcaggaagtgccaagggatgctgtcttgcctgagcagtccccaggagactttgactttaatgagttctttaaccttgataaggtgccatgcttggcttcgatgatagaagatgttttgggagaagggtcagtctctgccagtcggttcagtaggtggttctctaacccgagcagatcaggaagccgatccagcagtcttgggtcaacaccacatgaagagctagagagacttgcaggtctggagcaagccatcctctctcctggacagaactcggggaattactttgctcctataccattggaagaccatgctgaaaataaagtggatattttagaaatgctacagaaagccaaagtggatttgaaacctcttctttccagcctttctgcaaataaagaaaaacttaaagaaagctcacattcaggggttgtgctttcagtggaggaggtagaagcaggtctgaagggcttgaaggttgaccagcaagtgaagaattcaactcccttcatggcagaacacctagaagagaccttgagtgccgtaaccaacaatcgacaactgaagaaagacggagacatgactgcgttcaacaagctagtgagcacaatgaaggcaagtgggactttgccttctcagcccaaagtcagccgaaaccttgaaagccatttgatgtcccctgctgagattccaggccagcctgtccctaagaacatcctgcaggaacttctgggtcaaccagttcagagacctgcttcttccaatcttctgagtggccttatggggagcttggagcctacaacatctttactgggccaaagagcaccctctcctcccttgtcacaggtgtttcaaactcgagcagcctcagctgactaccttcgcccaagaataccatcaccaattggtttcacaccaggaccacagcagctactcggagatccattccaaggcatgcgcaaacccatgagccccatcacagcccagatgagccagctggagttgcaacaggcagctttagaagggctggccttgccacatgaccttgctgtacaggcagcaaacttctaccagcctggttttggcaaaccacaggtggacagaaccagagatggattcagaaacaggcaacagcgagtgaccaagtcaccagcacccgtgcatcgagggaattcctcttcccctgcccctgctgcctccatcacaagcatgctttctccttcctttacccctacctcagtgattcgtaagatgtacgagagcaaagagaaaagcaaggaggagccagcatctggaaaagcagctcttggtgacagtaaagaggatactcagaaggccagtgaagaaaacctcctgtcatccagctctgtacccagtgccgatcgagactcttctcccactacaaattccaaactgtcagcattacagaggtcttcgtgttccaccccactgtcccaggccaaccgttacaccaaagaacaagattatcgacctaaagcaactgggagacaccaagttccccttgtcccccatgtccctatggttaggcctgctcaccagcttcacccagggttggtacagaggatgctggcccagggagtacatccacagcatcttccaagtttgctccaaactggtgtgcttcctcctgggatggacttgagtcatttacagggaatatctggccccatcctgggtcagcccttttaccctttacctgctgctagtcaccctctcttaaaccctcgtcctggaacacctctgcatctggcaatggtgcaacagcagctacagcgctcagttctgcatcctccaggctctggttcccatgcagcagctgtcagcgttcagacaacccctcagaacgtgcccagccggtcaggcctgccccacatgcactcccagctggagcatcgccccagccagaggagcagctcccctgtgggccttgccaaatggtttggctcagatgtgctacagcaacccctgccctccatgcccgccaaagttatcagtgtagatgaattggaataccgacagtgagcagggcaggcagactcaactaagcccggacctgtggtggcacactgggcaggaccctgcttcatctcgggttggtttatgggcttttactttggagcactctgtgtgaagctgtttggtggaacccatgcatctggtgtggtccgcattatgatggaaggatcttaaccagtcgagtggagtgtacattgtctgaatacaggatgcacaatgttgtcaatcctggaaatggtctttcttttttgtaagatatgtgaatgaagtgttggtgtcctcaccaagaggtggcacctaagggttctgaggaaataaatgtatagacccttatgtacagacctgtgtataaacaacttttgtatatacatataggatagcttttttgaactatacagctgtacataaaagtagctgatattagttaggcctgtgtcaacagtttggatttttttcacttgtacatttgggattttcttttggttgattaaaattgcatatgctaagtgtgtgaatgaaaaaaaaaaaaa

SEQ ID NO: 433586 - DNA, 5176 bp, Homo sapiens
aagagagacagcccaagccggtcggggtgggggcgcgagagcgaaggctgcggggagcggcgctgggaccggtgcgggcagcggggaggggagcggcggccgaggcaaagggccgccgagcggcggaggcaccgagtgcagagcattgtagaccaaggagccatggataggagaagtatgggtgaaacagaaagtggagatgctttccttgacctgaagaagcctcctgcctccaaatgcccccatcgctatacaaaagaagaactcttggatataaaagaactcccccattccaaacagaggccttcatgcctttctgaaaaatatgacagtgatggtgtctgggaccctgagaagtggcatgcctctctctacccagcttcagggcggagctcaccagtggaaagtctgaagaaagagttggatacagaccggccttccctggtgcgcaggatagtagatccacgagagcgtgtgaaagaagatgacttagatgttgttctcagccctcagagacggagctttggagggggctgccacgtgacagccgctgttagctcccggcgctcaggaagtccattagagaaagatagtgatgggcttcgtctgcttggtggacgtaggattggcagtgggaggataatctctgcccggacctttgagaaggatcaccgtcttagcgataaggacctgcgggacttgagagacagagaccgagagagggacttcaaggacaagcgtttcaggagagagtttggagatagtaagcgtgtctttggtgagcgtagaagaaatgattcttacacagaagaagaaccagagtggttctctgctggacccacaagtcagtctgaaaccatcgaactgactggctttgatgataagatactagaagaagatcacaaagggagaaaaagaacaaggcgacggacagcctctgtgaaggaaggtatagtagagtgcaatggaggagtggccgaagaggatgaagtggaggtcatccttgcacaggagcctgcggctgatcaggaagtgccaagggatgctgtcttgcctgagcagtccccaggagactttgactttaatgagttctttaaccttgataaggtgccatgcttggcttcgatgatagaagatgttttgggagaagggtcagtctctgccagtcggttcagtaggtggttctctaacccgagcagatcaggaagccgatccagcagtcttgggtcaacaccacatgaagagctagagagacttgcaggtctggagcaagccatcctctctcctggacagaactcggggaattactttgctcctataccattggaagaccatgctgaaaataaagtggatattttagaaatgctacagaaagccaaagtggatttgaaacctcttctttccagcctttctgcaaataaagaaaaacttaaagaaagctcacattcaggggttgtgctttcagtggaggaggtagaagcaggtctgaagggcttgaaggttgaccagcaagtgaagaattcaactcccttcatggcagaacacctagaagagaccttgagtgccgtaaccaacaatcgacaactgaagaaagacggagacatgactgcgttcaacaagctagtgagcacaatgaaggcaagtgggactttgccttctcagcccaaagtcagccgaaaccttgaaagccatttgatgtcccctgctgagattccaggccagcctgtccctaagaacatcctgcaggaacttctgggtcaaccagttcagagacctgcttcttccaatcttctgagtggccttatggggagcttggagcctacaacatctttactgggccaaagagcaccctctcctcccttgtcacaggtgtttcaaactcgagcagcctcagctgactaccttcgcccaagaataccatcaccaattggtttcacaccaggaccacagcagctactcggagatccattccaaggcatgcgcaaacccatgagccccatcacagcccagatgagccagctggagttgcaacaggcagctttagaagggctggccttgccacatgaccttgctgtacaggcagcaaacttctaccagcctggttttggcaaaccacaggtggacagaaccagagatggattcagaaacaggcaacagcgagtgaccaagtcaccagcacccgtgcatcgagggaattcctcttcccctgcccctgctgcctccatcacaagcatgctttctccttcctttacccctacctcagtgattcgtaagatgtacgagagcaaagagaaaagcaaggaggagccagcatctggaaaagcagctcttggtgacagtaaagaggatactcagaaggccagtgaagaaaacctcctgtcatccagctctgtacccagtgccgatcgagactcttctcccactacaaattccaaactgtcagcattacagaggtcttcgtgttccaccccactgtcccaggccaaccgttacaccaaagaacaagattatcgacctaaagcaactgggagaaaaacacccaccttggcatccccagttcctacaacaccttttctccgccctgtccaccaagttccccttgtcccccatgtccctatggttaggcctgctcaccagcttcacccagggttggtacagaggatgctggcccagggagtacatccacagcatcttccaagtttgctccaaactggtgtgcttcctcctgggatggacttgagtcatttacagggaatatctggccccatcctgggtcagcccttttaccctttacctgctgctagtcaccctctcttaaaccctcgtcctggaacacctctgcatctggcaatggtgcaacagcagctacagcgctcagttctgcatcctccaggctctggttcccatgcagcagctgtcagcgttcagacaacccctcagaacgtgcccagccggtcaggcctgccccacatgcactcccagctggagcatcgccccagccagaggagcagctcccctgtgggccttgccaaatggtttggctcagatgtgctacagcaacccctgccctccatgcccgccaaagttatcagtgtagatgaattggaataccgacagtgagcagggcaggcagactcaactaagcccggacctgtggtggcacactgggcaggaccctgcttcatctcgggtggaagctggaacgcagtcccaagtgtcaatggcagaacacagatacctgaatccagttccacctttcctgtgtatcctcttccacttatcttacttccccttcatgttgaaccaacgttaataggtgcaaggcacgagatgagttcacaagcaatcagtgctggaaggatgtgcaaaataaaagttaagagaagctgaggatatagaaggcatcctgaaagtaaaacagctgaggaccacaaagcatatcatggaaaatctgttaagcaggggaggtcaggtaggagaggaaagaatagtccctcccaaaggaagcagttaaataagtctgtgggaggtcagtggtaaaaggaagtgggaatgaagtgaacagagagtgcagctaggccttcccctaggagatagctactgagtgtcttttaagccagactctattaacagggaagggaagtgggaggtccattggcctttgtgaactatgagcataaacacaaaccaagaatgacgataacttacagggttaaattctggttcttcaataattctattccctttaccaacaattgattcaaaaatagacatgtgacccaattttaggccacgagacaacaaactgggtggcttctggaaaacagcttcccaaaaaggtaagaccaagttcccttccatttcagccgcttaagttagcactttctgctaaatgcagctaaacgtgttctaactagttaaatggcacagaacaatggatctgtttacttgtaataaagtcaggaaagaaacatggaatatgtagttaatgaggagaaagcctttagctgtacctccacagtggccataccctaggcagcattcccaataccaaacatacccctctcccagaactgctaagtctaagcccagaggagaaagggaaaggtagggtaattctctcctcaaggagaccaggggtccctggaccaagccatggggagggtgctaaatgatggacacaaagcctattcacagaacatcctgaggccttaggatgaactggatttcagcaaccttctctccccaacattctggcagtgctaaatgcttgctcaatgaaagtgaattttggcaagaagagtccccagaaacccaatatgttctggctggagaacaaaccttcctggaaatcccgtagctcagaaagccaatgtttccctgttcccctgcagggttggggcaggctctagaccacggcctctatcatgaatgcaccagtggtatcaaggccgatattctgaaaagtaactagcataccaggcttcaggagcttaccttccaggtctggggacagtgacaagcccaagctccaggaagactatcaaagggaaacaactgctattagggcagcaggagaaacaagcactggagagaggctgagtatgtgaataatcccacactgtgatcactcatgacctgctaaaagctctggcttgcctcatttgaagaaataatcaaattctgtcttgctgcaaacctattcttcctgattttctcagggactactccatccatactgaaataatgtttgacttcttcccaagagcaagttagttaacaagtttaagatttctcccccatacttacatgtccataccctcccttctgcccatattctttaattatttaatttttatttcttggagacagggtctcactctgtcacccaggctggagtgcagtggcccatcttagctcactgcagcctggacctcccaggctcaagcagtcctcacctcagctcccagctatttaaaaggctaaggtgggaggatcgcttgagcccaggagttcaaggctgcagtgaaccacgattacgccactggactccagcctgggcggcaacagaacaagaccctatctcaaaaaaaccaaaaagatagttgtgcaataattaaagaaaaaaaaaaaaacagtaaaataagagcaaataaaatcctgtttgcttcgatat

SEQ ID NO: 433587 - DNA, 3065 bp, Homo sapiens
aagagagacagcccaagccggtcggggtgggggcgcgagagcgaaggctgcggggagcggcgctgggaccggtgcgggcagcggggaggggagcggcggccgaggcaaagggccgccgagcggcggaggcaccgagtgcagagcattgtagaccaaggagccatggataggagaagtatgggtgaaacagaaagtggagatgctttccttgacctgaagaagcctcctgcctccaaatgcccccatcgctatacaaaagaagaactcttggatataaaagaactcccccattccaaacagaggccttcatgcctttctgaaaaatatgacagtgatggtgtctgggaccctgagaagtggcatgcctctctctacccagcttcagggcggagctcaccagtggaaagtctgaagaaagagttggatacagaccggccttccctggtgcgcaggatagtagatccacgagagcgtgtgaaagaagatgacttagatgttgttctcagccctcagagacggagctttggagggggctgccacgtgacagccgctgttagctcccggcgctcaggaagtccattagagaaagatagtgatgggcttcgtctgcttggtggacgtaggattggcagtgggaggataatctctgcccggacctttgagaaggatcaccgtcttagcgataaggacctgcgggacttgagagacagagaccgagagagggacttcaaggacaagcgtttcaggagagagtttggagatagtaagcgtgtctttggtgagcgtagaagaaatgattcttacacagaagaagaaccagagtggttctctgctggacccacaagtcagtctgaaaccatcgaactgactggctttgatgataagatactagaagaagatcacaaagggagaaaaagaacaaggcgacggacagcctctgtgaaggaaggtatagtagagtgcaatggaggagtggccgaagaggatgaagtggaggtcatccttgcacaggagcctgcggctgatcaggaagtgccaagggatgctgtcttgcctgagcagtccccaggagactttgactttaatgagttctttaaccttgataaggtgccatgcttggcttcgatgatagaagatgttttgggagaagggtcagtctctgccagtcggttcagtaggtggttctctaacccgagcagatcaggaagccgatccagcagtcttgggtcaacaccacatgaagagctagagagacttgcaggtctggagcaagccatcctctctcctggacagaactcggggaattactttgctcctataccattggaagaccatgctgaaaataaagtggatattttagaaatgctacagaaagccaaagtggatttgaaacctcttctttccagcctttctgcaaataaagaaaaacttaaagaaagctcacattcaggggttgtgctttcagtggaggaggtagaagcaggtctgaagggcttgaaggttgaccagcaagtgaagaattcaactcccttcatggcagaacacctagaagagaccttgagtgccgtaaccaacaatcgacaactgaagaaagacggagacatgactgcgttcaacaagctagtgagcacaatgaaggcaagtgggactttgccttctcagcccaaagtcagccgaaaccttgaaagccatttgatgtcccctgctgagattccaggccagcctgtccctaagaacatcctgcaggaacttctgggtcaaccagttcagagacctgcttcttccaatcttctgagtggccttatggggagcttggagcctacaacatctttactgggccaaagagcaccctctcctcccttgtcacaggtgtttcaaactcgagcagcctcagctgactaccttcgcccaagaataccatcaccaattggtttcacaccaggaccacagcagctactcggagatccattccaaggcatgcgcaaacccatgagccccatcacagcccagatgagccagctggagttgcaacaggcagctttagaagggctggccttgccacatgaccttgctgtacaggcagcaaacttctaccagcctggttttggcaaaccacaggtggacagaaccagagatggattcagaaacaggtaaattactaatcctgctcatgtggagatttacggataagtttttctgaaactaataaattacttatctgcagtataattctgttgtacatactgtggtatgttcagtatgtggtagaaattccatcccaatccaaatcaatagaagaaatagatttaatagcggaaatatgattaaattctactgcaaggcatagggctttcattctatatggttttatttccgttcttgatttataaattactttttttccttgagtttgctaattagccatatggaagggatgctgctcgcctaatttacctcacaagattgttatgagtaaatatattttaaaatcttaggatgtttctaccagttaaaccattcatctttacaaatgaaactagcatagctccttattcctttccccacagattcaatgttcttatcaaactcccttgatgcaggtttgctacatcagcagttttttggccagagctgacaggtttgttgatcagagctgttaacaagtagagtactgagttcactcttctctttttcgatagttgcaacaaatggtaaaatgaaattaatcataagttagggagaaaagggaaaggagtggcaatattattttattgtaaaataaaacagacaaaactatataaaacaaatgtgtagcttattataaggcaaacttccttgttaactactcagagggcctccatgtgccctgtgccagtaataccccttttcctcctcagaactctccactgtccagcctttaaaagtaatcactaccttaattaaaaataatttatcaccaaaatgcacatccctgaacactatagtttagtctacctttaaaatactcggtacttaatgttttgatgtgattcttaaagttactaccacagtgcctcagtgttttg

SEQ ID NO: 433588 - DNA, 1258 bp, Homo sapiens
ggctgaggctcgggcgcgctcaggcccggatcctggcggcctgggcggccgcaccatggactcgggaaccgaggagtacgagctcaacggcggcctgcctccgggcacacccggctccccggacgcctcgccggcccgctggggctggaggcacgggcccatcaacgtgaaccattacgccagcaagaagagcgcagccgagagcatgctggacatcgcgctgctgatggccaacgcgtcccagctgaaggccgtcgtggaacagggccccagcttcgccttctatgtgcccctggtggtcctcatctccatctcccttgtgctgcagatcggcgtgggggtgctgctcatcttccttgtcaagtacgaccttaacaacccggacaagcacgccaagctggacttcctcaacaacctggccacgggcctggtgttcatcatcgtggtagtcaacatcttcatcacggccttcggggtccagaagcccttgatggacatggcaccccagcagtaggacacccaggaccctggatgctgcctgccctgcaactcagctgcccgaccccaggagtcgccatacctgtgaggtgtccacctccctgcacatggcactacccagactgccagagcccaggctggcctcatctgcaccatgtccccggaccagcccttgctctgactgcggccaagcaccacgcaggaggccactcttgtctctcagcagctgttcccaggaggcagctccctcctggcacatgggggctggccacaatagcccagagggtcagaactggacagctgcagagacctgtgcccagagaagggtctcgacccactcaaggacacacagcaggtccgtggatgggctggatgagtgaccagggccagcctctgtctcaggacattccagaaggacaaggagatgtctctccctctcccaaagcaccagcgtccctgcctcccgtgggccctgtccgggttgccctggtgaccccagcctctgtccacttcctaacccagggaccctgcacagccagaactgcctttggccctacggatggccactggctctggtctaaagtgcctgggcttggtggccatcaagagggagccagtcaggcctgtgagggccgtagaccttgtatataccctgcaccagcagtgaccgggcagagcccaaccccctccacgggggtcccagcacccacttttctaatcatgaatgaacaataaagcccacgctctttgtcaggctcca

SEQ ID NO: 433589 - DNA, 541 bp, Homo sapiens
ggctgaggctcgggcgcgctcaggcccggatcctggcggcctgggcggccgcaccatggactcgggaaccgaggagtacgagctcaacggcggcctgcctccgggcacacccggctccccggacgcctcgccggcccgctggggctggaggcacgggcccatcaacgtgaaccattacgccagcaagaagagcgcagccgagagcatgctggacatcgcgctgctgatggccaacgcgtcccagctgaaggccgtcgtggaacagggccccagcttcgccttctatgtgcccctggtggtcctcatctccatctcccttgtgctgcagatcggcgtgggggtgctgctcatcttccttggtaggtccccaggtgggggcagccaggccacctgctcaccttgctggcatctgctcgcatcgcctgggacaggtgcccaccaccttgcacacttggctctcaaggagctgccgagttcctggccctcatcacccagacatgcagtccaggaagtggcaccccccctccccccaccctgcact

SEQ ID NO: 433590 - DNA, 1336 bp, Homo sapiens
ggctgaggctcgggcgcgctcaggcccggatcctggcggcctgggcggccgcaccatggactcgggaaccgaggagtacgagctcaacggcggcctgcctccgggcacacccggctccccggacgcctcgccggcccgctggggctggaggcacgggcccatcaacgtgaaccattacgccagcaagaagagcgcagccgagagcatgctggacatcgcgctgctgatggccaacgcgtcccagctgaaggccgtcgtggaacagggccccagcttcgccttctatgtgcccctggtggtcctcatctccatctcccttgtgctgcagatcggcgtgggggtgctgctcatcttccttgtcaagtacgaccttaacaacccggacaagcacgccaagctggacttcctcaacaacctggccacgggcctggtgttcatcatcgtggtagtcaacatcttcatcacggccttcggggtccagaagcccttgatggacatggcaccccagcagtaggacacccaggaccctggatgctgcctgccctgcaactcagctgcccgaccccaggagtcgccatacctgtgaggtgtccacctccctgcacatggcactacccagactgccagagcccaggctggcctcatctgcaccatgtccccggaccagcccttgctctgactgcggccaagcaccacgcaggaggccactcttgtctctcagcagctgttcccaggaggcagctccctcctggcacatgggggctggccacaatagcccagagggtcagaactggacagctgcagagacctgtgcccagagaagggtctcgacccactcaaggacacacagcaggtccgtggatgggctggatgagtgaccagggccagcctctgtctcaggacattccagaaggacaaggagatgtctctccctctcccaaagcaccagcgtccctgcctcccgtgggccctgtccgggttgccctggtgaccccagcctctgtccacttcctaacccagggaccctgcacagccagaactgcctttggccctacggatggccactggctctggtctaaagtgcctgggcttggtggccatcaagagggagccagtcaggcctgtgagggccgtagaccttgtatataccctgcaccagcagtgaccgggcagagcccaaccccctccacgggggtcccagcacccacttttctaatcatgaatgaacaataaagcccacgctctttgtcaggctccaaaaaaaaaaaatctataatcacctgcccttcttttacttcttctcacctggtaaaacctttgaacaataaaaaaaaaa

SEQ ID NO: 433591 - DNA, 1232 bp, Homo sapiens
actagattaaggcacgcaaagggctcagtgcatttgcccaaacctggcctttggttgacgtccatagcttcaattcgtataaggaaaatatgggggctacagaaggtggggtcatagaccgtggggttgcccaagccaggggcgctgttgtccatgtttcagcaaaacagatgtatttttctctgggcgacaaaactcatcctaaatgcgactgagagccctgtaatgtcccaggacagcttgaccgctggggtgggtccccttccactgtcccaggctggggcgctgcgtctgggctgcccttggcaccatccactcctctctcgcccacagtcaagtacgaccttaacaacccggacaagcacgccaagctggacttcctcaacaacctggccacgggcctggtgttcatcatcgtggtagtcaacatcttcatcacggccttcggggtccagaagcccttgatggacatggcaccccagcagtaggacacccaggaccctggatgctgcctgccctgcaactcagctgcccgaccccaggagtcgccatacctgtgaggtgtccacctccctgcacatggcactacccagactgccagagcccaggctggcctcatctgcaccatgtccccggaccagcccttgctctgactgcggccaagcaccacgcaggaggccactcttgtctctcagcagctgttcccaggaggcagctccctcctggcacatgggggctggccacaatagcccagagggtcagaactggacagctgcagagacctgtgcccagagaagggtctcgacccactcaaggacacacagcaggtccgtggatgggctggatgagtgaccagggccagcctctgtctcaggacattccagaaggacaaggagatgtctctccctctcccaaagcaccagcgtccctgcctcccgtgggccctgtccgggttgccctggtgaccccagcctctgtccacttcctaacccagggaccctgcacagccagaactgcctttggccctacggatggccactggctctggtctaaagtgcctgggcttggtggccatcaagagggagccagtcaggcctgtgagggccgtagaccttgtatataccctgcaccagcagtgaccgggcagagcccaaccccctccacgggggtcccagcacccacttttctaatcatgaatgaacaataaagcccacgctctttgtcaggctcca

SEQ ID NO: 433592 - DNA, 755 bp, Homo sapiens
  misc_feature (11)..(11): n is a, c, g, or t
  misc_feature (36)..(36): n is a, c, g, or t
agagtcttacntctgtcggttggacgtgcagtgacngcgatctcaactcagctgcccgaccccaggagtcgccatacctgtgaggtgtccacctccctgcacatggcactacccagactgccagagcccaggctggcctcatctgcaccatgtccccggaccagcccttgctctgactgcggccaagcaccacgcaggaggccactcttgtctctcagcagctgttcccaggaggcagctccctcctggcacatgggggctggccacaatagcccagagggtcagaactggacagctgcagagacctgtgcccagagaagggtctcgacccactcaaggacacacagcaggtccgtggatgggctggatgagtgaccagggccagcctctgtctcaggacattccagaaggacaaggagatgtctctccctctcccaaagcaccagcgtccctgcctcccgtgggccctgtccgggttgccctggtgaccccagcctctgtccacttcctaacccagggaccctgcacagccagaactgcctttggccctacggatggccactggctctggtctaaagtgcctgggcttggtggccatcaagagggagccagtcaggcctgtgagggccgtagaccttgtatataccctgcaccagcagtgaccgggcagagcccaaccccctccacgggggtcccagcacccacttttctaatcatgaatgaacaataaagcccacgctctttgtcaggctcca

SEQ ID NO: 433593 - DNA, 634 bp, Homo sapiens
ggctgaggctcgggcgcgctcaggcccggatcctggcggcctgggcggccgcaccatggactcgggaaccgaggagtacgagctcaacggcggcctgcctccgggcacacccggctccccggacgcctcgccggcccgctggggctggaggcacgggcccatcaacgtgaaccattacgccagcaagaagagcgcagccgagagcatgctggacatcgcgctgctgatggccaacgcgtcccagctgaaggccgtcgtggaacagggccccagcttcgccttctatgtgcccctggtggtcctcatctccatctcccttgtgctgcagatcggcgtgggggtgctgctcatcttccttgcctggtgaccccagcctctgtccacttcctaacccagggaccctgcacagccagaactgcctttggccctacggatggccactggctctggtctaaagtgcctgggcttggtggccatcaagagggagccagtcaggcctgtgagggccgtagaccttgtatataccctgcaccagcagtgaccgggcagagcccaaccccctccacgggggtcccagcacccacttttctaatcatgaatgaacaataaagcccacgctctttgtcaggctcca

SEQ ID NO: 433594 - DNA, 307 bp, Homo sapiens
gtgagctgggagatggggcgcgaggcctgcagtcctggggttgctcgctgttggaggctcttgcagtgtggtgagtccctggccggccagccttggacaccttcctaggccatgggcatcctcgtccacacctacaaggccaatgcctggccactgccttgaggccagccctgccactggtgctggccacctggggtcctgtggtcacagtgtttagatggaatgtgtgtaggagccaccatttgaacatcctggagaactcacttaaacgtaagatttctatacattcagaatgtctgtccgataa

SEQ ID NO: 433595 - DNA, 177 bp, Homo sapiens
gtaagaccttccccccaccgctgcatgatcttgccaggccctgtcctttcggggcgccgcggctccccgggcacctgtgtgcgccgcgtccgcactgcagagtgttgggggacgtcccgctctaggccaagtccttcccgccccatcagggtcagaacgatgcccccgggagctcca

SEQ ID NO: 433596 - DNA, 694 bp, Homo sapiens
  misc_feature (25)..(25): n is a, c, g, or t
cataacgctaggtacgaggctgggntcgtcactccctgcacatggcactacccagactgccagagcccaggctggcctcatctgcaccatgtccccggaccagcccttgctctgactgcggccaagcaccacgcaggaggccactcttgtctctcagcagctgttcccaggaggcagctccctcctggcacatgggggctggccacaatagcccagagggtcagaactggacagctgcagagacctgtgcccagagaagggtctcgacccactcaaggacacacagcaggtccgtggatgggctggatgagtgaccagggccagcctctgtctcaggacattccagaaggacaaggagatgtctctccctctcccaaagcaccagcgtccctgcctcccgtgggccctgtccgggttgccctggtgaccccagcctctgtccacttcctaacccagggaccctgcacagccagaactgcctttggccctacggatggccactggctctggtctaaagtgcctgggcttggtggccatcaagagggagccagtcaggcctgtgagggccgtagaccttgtatataccctgcaccagcagtgaccgggcagagcccaaccccctccacgggggtcccagcacccacttttctaatcatgaatgaacaataaagcccacgctctttgtcaggctcca

SEQ ID NO: 433597 - DNA, 1832 bp, Homo sapiens
ggctgaggctcgggcgcgctcaggcccggatcctggcggcctgggcggccgcaccatggactcgggaaccgaggagtacgagctcaacggcggcctgcctccgggcacacccggctccccggacgcctcgccggcccgctggggctggaggcacgggcccatcaacgtgaaccattacgccagcaagaagagcgcagccgagagcatgctggacatcgcgctgctgatggccaacgcgtcccagctgaaggccgtcgtggaacagggccccagcttcgccttctatgtgcccctggtggtcctcatctccatctcccttgtgctgcagatcggcgtgggggtgctgctcatcttccttgtcaagtacgaccttaacaacccggacaagcacgccaagctggacttcctcaacaacctggccacgggcctggtgttcatcatcgtggtagtcaacatcttcatcacggccttcggggtccagaagcccttgatggacatggcaccccagcagtaggacacccaggaccctggatgctgcctgccctgcaactcagctgcccgaccccaggagtcgccatacctgtgaggtgtccacctccctgcacatggcactacccagactgccagagcccaggctggcctcatctgcaccatgtccccggaccagcccttgctctgactgcggccaagcaccacgcaggaggccactcttgtctctcagcagctgttcccaggaggcagctccctcctggcacatgggggctggccacaatagcccagagggtcagaactggacagctgcagagacctgtgcccagagaagggtctcgacccactcaaggacacacagcaggtccgtggatgggctggatgagtgaccagggccagcctctgtctcaggacattccagaaggacaaggagatgtctctccctctcccaaagcaccagcgtccctgcctcccgtgggccctgtccgggttgccctggtgaccccagcctctgtccacttcctaacccagggaccctgcacagccagaactgcctttggccctacggatggccactggctctggtctaaagtgcctgggcttggtggccatcaagagggagccagtcaggcctgtgagggccgtagaccttgtatataccctgcaccagcagtgaccgggcagagcccaaccccctccacgggggtcccagcacccacttttctaatcatgaatgaacaataaagcccacgctctttgtcaggctccaaaaagaaaacaaaaacaaacaagagagagaaaaagggaaaaaggcaaaggaactaaacggcagggaacactacctgcaatcgaacaaaagaacaaacaggagacgccgccgtacccagaactagcagagaccagcgcaaacagacagcccacagggcgggcagccacagctgagtgcgctcagcccaatggacacgaagaccggacccaaagtagacggccagccccacagtgggagatgtacgggcacatcaagtggcacctatcgcggctcaaataaagaagaaggcctaaccgattcgttactcctataagaatagaattctcccagaaggtgagcaccgcatcccccttggaatatgagaatacctcaggcgccaatccacacagaaagacattcacccctggtccgattaggctactaacggaaacaagtgcgaagacttgaaagaacccaaatactcgaaccgattattcggtaaccgaagagggacgagtgaacatactgccagggacacccaataatacagatgtaatcctgtacttgaatccattgcctcaaacaatgaactagt

SEQ ID NO: 433598 - DNA, 958 bp, Homo sapiens
tcctggggtgctgctgtcctggtgtgctgctgtcctggtggtgctgctcatcttccttgtcaagtacgaccttaacaacccggacaagcacgccaagctggacttcctcaacaacctggccacgggcctggtgttcatcatcgtggtagtcaacatcttcatcacggccttcggggtccagaagcccttgatggacatggcaccccagcagtaggacacccaggaccctggatgctgcctgccctgcaactcagctgcccgaccccaggagtcgccatacctgtgaggtgtccacctccctgcacatggcactacccagactgccagagcccaggctggcctcatctgcaccatgtccccggaccagcccttgctctgactgcggccaagcaccacgcaggaggccactcttgtctctcagcagctgttcccaggaggcagctccctcctggcacatgggggctggccacaatagcccagagggtcagaactggacagctgcagagacctgtgcccagagaagggtctcgacccactcaaggacacacagcaggtccgtggatgggctggatgagtgaccagggccagcctctgtctcaggacattccagaaggacaaggagatgtctctccctctcccaaagcaccagcgtccctgcctcccgtgggccctgtccgggttgccctggtgaccccagcctctgtccacttcctaacccagggaccctgcacagccagaactgcctttggccctacggatggccactggctctggtctaaagtgcctgggcttggtggccatcaagagggagccagtcaggcctgtgagggccgtagaccttgtatataccctgcaccagcagtgaccgggcagagcccaaccccctccacgggggtcccagcacccacttttctaatcatgaatgaacaataaagcccacgctctttgtcaggctcca

SEQ ID NO: 433599 - DNA, 664 bp, Homo sapiens
tcgtgctggtgcttggccgcagtcagagcaagggctggtccggggacatggtgcagatgaggccagcctgggctctggcagtctgggtagtgccatgtgcaggcaggaggccactcttgtctctcagcagctgttcccaggaggcagctccctcctggcacatgggggctggccacaatagcccagagggtcagaactggacagctgcagagacctgtgcccagagaagggtctcgacccactcaaggacacacagcaggtccgtggatgggctggatgagtgaccagggccagcctctgtctcaggacattccagaaggacaaggagatgtctctccctctcccaaagcaccagcgtccctgcctcccgtgggccctgtccgggttgccctggtgaccccagcctctgtccacttcctaacccagggaccctgcacagccagaactgcctttggccctacggatggccactggctctggtctaaagtgcctgggcttggtggccatcaagagggagccagtcaggcctgtgagggccgtagaccttgtatataccctgcaccagcagtgaccgggcagagcccaaccccctccacgggggtcccagcacccacttttctaatcatgaatgaacaataaagcccacgctctttgtcaggctcca

SEQ ID NO: 433600 - DNA, 555 bp, Homo sapiens
gtttaagagttctctgacacagtatcttctctttgggggacaacgtctagctttcaaggtgtctccaaacttacaggtgttgaccccgtgtggtgaatcacgcctgtaatcccagcactttgggagactgaggtgggtggatcacaaggtcaagagatcgagaccatcctggccaacatggtgaaaccccgtctctactaaaaatacaaaaattagctgggcgtggtggtgcacacctgtagtcccaactactcaggaggctgaggcaggagaatctgttgaacccggaaggcagaggttgcagtgagtggagattgcgccactgtactccaacctggcgacagagctagactctgtccccccaaaaaaaaaaaggaattagaaaatgatgacactattggctaaaataacaaagtttaaagaggaagataatggtgttgcagcagatgaacaatttgggataatttgctttctctcctaagcctccaactctatgccacttgttgttaaattgcttcccctgagtctgtgaataggtttgtaacaaccaatttg

SEQ ID NO: 433601 - DNA, 1166 bp, Homo sapiens
ctggaatctgtatctctgtgcccagggaagcatgcttttctgggaggaccccaaaagaaggcttacagtttcagcctgctttgcagtcagggcctgaggtatggtacagaaggtagtagcatgctggtattactgaacagtgctgggcctaggggctgatctggcccagatgactcagtaggcacccttaggaatcaggggttggccaccaatactgatcttctcacaggcctacacctcacagaagagctgggtttgtttcattctagtcctatgctttggacctccactcatttgggtatcacccctgttggaagaggaggatctggtgctagaaaatataaacccggggacccaggcaaggctgtgttgtgtggggaggaagaccaggtggctctctagtccctgaattaagggagcctgctgcctatgtgcggattcccacacagcagcctgtttttagtaactaatgcctatagttttgagaacttgctgtttttaggacactgctgggcattgacaatgtggaggttatgaacaagatctccaagggctgatgggcttcatggatgagatggttcttgaactggatccatgaggatgggtgagacagggctgtgaaattagggaaagcttccggggcaggtggaacagcatgaggcttccaacctgcatcagtagaaaatgacactggccaggtgtggtgaatcacgcctgtaatcccagcactttgggagactgaggtgggtggatcacaaggtcaagagatcgagaccatcctggccaacatggtgaaaccccgtctctactaaaaatacaaaaattagctgggcgtggtggtgcacacctgtagtcccaactactcaggaggctgaggcaggagaatctgttgaacccggaaggcagaggttgcagtgagtggagattgcgccactgtactccaacctggcgacagagctagactctgtccccccaaaaaaaaaaaggaattagaaaatgatgacactattggctaaaataacaaagtttaaagaggaagataatggtgttgcagcagatgaacaatttgggataatttgctttctctcctaagcctccaactctatgccacttgttgttaaattgcttcccctgagtctgtgaataggtttgtaacaaccaatttg

SEQ ID NO: 433602 - DNA, 820 bp, Homo sapiens
gttgatcactcggtgtacatcctggaggactctattgtggacccacagaatcagaccatgactaccttcacctggaacatcaaccacgcccggctgatggtggtgaaggaacgatgtgtttactgtgtgaactctgacaacagtggctggactgaaatccgccgggaagcctgggtctcctctagcttatttggtgtctccagagctgtccaggaatttggtcttgcccggttcaaaagcaacgtgaccaagactatgaagggttttgaatatatcttggctaagctgcaaggcgaggccccttccaaaacacttgttgagacagccaaggaagccaaggagaaggcaaaggagacggcactggcagctacagagaaggccaaggacctcgccagcaaggcggccaccaagaagcagcagcagcagcaacagtttgtgtagccagtctaccaccaccacagcaccccagacagctaggcttagcccctctgccctcccttcattgtactttatcattaaaaatcaacttccagccctgtctgctgtctacgtggtgggttgtggggatgcagtttggcatctgcagtacaccaagcacatgattcatgtctgagccaggtctgcttattctcccattgggcagctgaggaccgaggcacagaggtgcggtgacttgcccggggctccaggtagcctgcaggttaactggcggtaagtgctagactgtaagcccgacaagggcagggcttttggttttgttctctgatgtgtctcagtatctagcacataatagacactcaataaatacttgttgaattca

SEQ ID NO: 433603 - DNA, 946 bp, Homo sapiens
  misc_feature (572)..(576): n is a, c, g, or t
  misc_feature (578)..(578): n is a, c, g, or t
  misc_feature (598)..(598): n is a, c, g, or t
  misc_feature (600)..(600): n is a, c, g, or t
  misc_feature (606)..(606): n is a, c, g, or t
  misc_feature (612)..(612): n is a, c, g, or t
gttgatcactcggtgtacatcctggaggactctattgtggacccacagaatcagaccatgactaccttcacctggaacatcaaccacgcccggctgatggtggtgaaggaacgatgtgtttactgtgtgaactctgacaacagtggctggactgaaatccgccgggaagcctgggtctcctctagcttatttggtgtctccagagctgtccaggaatttggtcttgcccggttcaaaagcaacgtgaccaagactatgaagggttttgaatatatcttggctaagctgcaaggcgaggccccttccaaaacacttgttgagacagccaaggaagccaaggagaaggcaaaggagacggcactggcagctacagagaaggccaaggacctcgccagcaaggcggccaccaagaagcagcagcagcagcaacagtttgtgtagccagtctaccaccaccacagcaccccagacagctaggcttagcccctctgccctcccttcattgtactttatcattaaaaatcaacttccagccctaaaaaaaaaaaaaaaaaaaaaaaaaaaaaaaaaannnnnanaaaaaaaaaaaaaaaaaaananaaaaanaaacanaaaaaaacaaaaaaaaaaaaaaatcaaacaaacaggaaaaaagttacctttaaacgtgtcaagagctcaaaaaagatctcacggaaactttcgcgcgatcctttaaccaaacgacgttcagaaaccccgcattccccggctcgaaaaactctaacacggcaaccctagataccctttcaacaaaacgctagtacattggatcattcatggacacagcctgaaacactacttggacaaccttaacttttgaaaaaaaacgtggctcctatccgactgcgcatctgggtccaatccttcttgtatccatacattctcccacatcggtgctatacct

SEQ ID NO: 433604 - DNA, 281 bp, Homo sapiens
gcggccgcctactactactactactgctcgaattcaagcttctaacgatgtacgggcacatgattcatgtctgagccaggtctgcttattctcccattgggcagctgaggaccgaggcacagaggtgcggtgacttgcccggggctccaggtagcctgcaggttaactggcggtaagtgctagactgtaagcccgacaagggcagggcttttggttttgttctctgatgtgtctcagtatctagcacataatagacactcaataaatacttgttgaattca

SEQ ID NO: 433605 - DNA, 732 bp, Homo sapiens
tcattcagcctagcgggcgtggagtctgggttagtcattgccctgctctgagctgggactccttgtctgtactgggggtgggaggagggtgaataccacctttttagtggagcctggcccagaggagattggtgtcatgggggagggaaattaggttggtctttcaggcatcttctaaaggcagccacctgccgttcgcgacaggcgaggccccttccaaaacacttgttgagacagccaaggaagccaaggagaaggcaaaggagacggcactggcagctacagagaaggccaaggacctcgccagcaaggcggccaccaagaagcagcagcagcagcaacagtttgtgtagccagtctaccaccaccacagcaccccagacagctaggcttagcccctctgccctcccttcattgtactttatcattaaaaatcaacttccagccctgtctgctgtctacgtggtgggttgtggggatgcagtttggcatctgcagtacaccaagcacatgattcatgtctgagccaggtctgcttattctcccattgggcagctgaggaccgaggcacagaggtgcggtgacttgcccggggctccaggtagcctgcaggttaactggcggtaagtgctagactgtaagcccgacaagggcagggcttttggttttgttctctgatgtgtctcagtatctagcacataatagacactcaataaatacttgttgaattca

SEQ ID NO: 433606 - DNA, 1338 bp, Homo sapiens
  misc_feature (855)..(859): n is a, c, g, or t
  misc_feature (861)..(861): n is a, c, g, or t
  misc_feature (881)..(881): n is a, c, g, or t
  misc_feature (883)..(883): n is a, c, g, or t
  misc_feature (889)..(889): n is a, c, g, or t
  misc_feature (895)..(895): n is a, c, g, or t
gttgatcactcggtgtacatcctggaggactctattgtggacccacagaatcagaccatgactaccttcacctggaacatcaaccacgcccggctgatggtggtgaaggaacgatgtgtttactgtgtgaactctgacaacagtggctggactgaaatccgccgggaagcctgggtctcctctagcttatttggtgtctccagagctgtccaggaatttggtcttgcccggttcaaaagcaacgtgaccaagactatgaagggttttgaatatatcttggctaagctgcaaggcgaggccccttccaaaacacttgttgagacagccaaggaagccaaggagaaggcaaaggagacggcactggcagctacagagaaggccaaggacctcgccagcaaggcggccaccaagaagcagcagcagcagcaacagtttgtgtagccagtctaccaccaccacagcaccccagacagctaggcttagcccctctgccctcccttcattgtactttatcattaaaaatcaacttccagccctgtctgctgtctacgtggtgggttgtggggatgcagtttggcatctgcagtacaccaagcacatgattcatgtctgagccaggtctgcttattctcccattgggcagctgaggaccgaggcacagaggtgcggtgacttgcccggggctccaggtagcctgcaggttaactggcggtaagtgctagactgtaagcccgacaagggcagggcttttggttttgttctctgatgtgtctcagtatctagcacataatagacactcaataaatacttgttgaattcaaaaaaaaaaaaaaaaaaaaaaaaaaaaaaaaaaannnnnanaaaaaaaaaaaaaaaaaaananaaaaanaaacanaaaaaaacaaaaaaaaaaaaaagggggggggagagcatagcaatacaacccctcagggggggcccacatctgtgaacccaccacaaggttcttacaacacagcgagtggcacccaaactggggcgggcgcacacgaactcgatgacacggcagggcggacacaatacaccacccgtccagagcaaacaggagcacaacaaccgccaccctcgccgagccgctccctcgagcgaaccacacacccccctcccccgcgtgccggccgcccaccaactgggacgcacccacccatccccaagcagggaactatacagacgatacgagtgcacattcacagacgccccagcgcgcactgtggggcaaaaaaacgcgaaccaggcgggaagaagacaagcacacgacgcgcaacacccccaagcaaccatccgccgcgcgcgccccca

SEQ ID NO: 433607 - DNA, 537 bp, Homo sapiens
gttgatcactcggtgtacatcctggaggactctattgtggacccacagaatcagaccatgactaccttcacctggaacatcaaccacgcccggctgatggtggtgaaggaacgatgtgtttactgtgtgaactctgacaacagtggctggactgaaatccgccgggaagcctgggtctcctctagcttatttggtgtctccagagctgtccaggaatttggtcttgcccggttcaaaagcaacgtgaccaagactatgaagggttttgaatatatcttggctaagctgcaaggcgaggccccttccaaaacacttgttgagacagccaaggaagccaaggagaaggcaaaggagacggcactggcagctacagagaaggccaaggacctcgccagcaaggcggccaccaagaagcagcagcagcagcaacagtttgtgtagccagtctaccaccaccacagcaccccagacagctaggcttagcccctctgccctcccttcattgtactttatcattaaaaatcaacttccagccct

SEQ ID NO: 433608 - DNA, 504 bp, Homo sapiens
gttgatcactcggtgtacatcctggaggactctattgtggacccacagaatcagaccatgactaccttcacctggaacatcaaccacgcccggctgatggtggtgaaggaacgatgtgtttactgtgtgaactctgacaacagtggctggactgaaatccgccgggaagcctgggtctcctctagcttatttggtgtctccagagctgtccaggaatttggtcttgcccggttcaaaagcaacgtgaccaagactatgaagggttttgaatatatcttggctaagctgcaaggcgaggccccttccaaaacacttgttgagacagccaaggaagccaaggagaaggccaaggacctcgccagcaaggcggccaccaagaagcagcagcagcagcaacagtttgtgtagccagtctaccaccaccacagcaccccagacagctaggcttagcccctctgccctcccttcattgtactttatcattaaaaatcaacttccagccct

SEQ ID NO: 433609 - DNA, 844 bp, Homo sapiens
gttgatcactcggtgtacatcctggaggactctattgtggacccacagaatcagaccatgactaccttcacctggaacatcaaccacgcccggctgatggtggtgaaggaacgatgtgtttactgtgtgaactctgacaacagtggctggactgaaatccgccgggaagcctgggtctcctctagcttatttggtgtctccagagctgtccaggaatttggtcttgcccggttcaaaagcaacgtgaccaagactatgaagggttttgaatatatcttggctaagctgcaaggcgaggccccttccaaaacacttgttgagacagccaaggaagccaaggagaaggcaaaggagacggcactggcagctacagagaaggccaaggacctcgccagcaaggcggccaccaagaagcagcagcagcagcaacagtttgtgtagccagtctaccaccaccacagcaccccagacagctaggcttagcccctctgccctcccttcattgtactttatcattaaaaatcaacttccagccctgtctgctgtctacgtggtgggttgtggggatgcagtttggcatctgcagtacaccaagcacatgattcatgtctgagccaggtctgcttattctcccattgggcagctgaggaccgaggcacagaggtgcggtgacttgcccggggctccaggtagcctgcaggttaactggcggtaagtgctagactgtaagcccgacaagggcagggcttttggttttgttctctgatgtgtctcagtatctagcacataatagacactcaataaatacttgttgaattcagttggccccaaaaaaaaaagaaat

SEQ ID NO: 433610 - DNA, 881 bp, Homo sapiens
  misc_feature (875)..(878): n is a, c, g, or t
  misc_feature (880)..(881): n is a, c, g, or t
actatttagaaaagacatttctacatattttatatatctatgaatattgcatctctaatctaatctaaaaatgttgttttgagacaattcttctgtgatgcttcctcctcatgctcataaatgtttaaagtcttgggatttcattttcaggctgaaatagataacaagaaaaaaatttaagtttaaatgtttacattgcgttactaaattaataccaattcaaattaagtgacctatagtaaattaatggcaatgggggggaggggattttaaagtgattggcatattatgtgatactgtatcagtgatttagtgaaataatatgtatcatagcacaactctgttgggtattaaggcttcatcttagtatttccctgcgttgctctttgaaataaaattactaccataaaaataacctcttatcatattgatgtgtttaatttactcagttggcttctaatttgcgtaacaagattaaggtagtatttttgtactattattggaagcatgccttccctttttcacattattaaattgtatttatatttgtgcaattttaaactatgttttcaaataaactttgtctgcggcttcgaggtcttttcaggaatctttcaaaatgggatttggggatcagaactccttctgatcaaatggaatccaatttgtactactggctaaaggtccttttattaaatattgaatatcactacatatgattttgcatgagctatctggaaatcaggaatgcatttttggatataaaacaaaactttaaaaatcttcctcctttgttaattttttaagactaaaatattatttaacctgaaattgaattttgtgattctttttagaataaaaatattaaaataaannnnann

SEQ ID NO: 433611 - DNA, 998 bp, Homo sapiens
  misc_feature (536)..(536): n is a, c, g, or t
  misc_feature (998)..(998): n is a, c, g, or t
tacatttcagacacactaaaacggacatccaagtgtatttctactgtctccgttatgaggtacagcgcctctgcttttgggtttgcatttgatgccatcctggacgtcctgtcatcggcgattgtcctgtggcgttacagcaacgcggccgctgtgcactctgcccatagggagtacattgccttcagcctgcattagctgacaagtcagcagtttctactacagaaagcaaaaaaaaagtaagagaagaagtctgagaagtcaaaagacttgcagattatctgactaggacactctgtggaggactttgatacaaatggattgatttttcagtctagtgatctctgttcagttgctgagacaaaggaaaacccactcccttggaggagcatgaccttttcctgtaattcttcctactgctgttgttgagctccttggatcctggctcctggacaccatcatcaagaagactttatggatgggctgtccacccactgagagaagaggagcatcagctacagtttctctctagattngccttcttcatttgagtaatgactgtcagcagggtcagattaaacacaaaacaatggacaattgcttggaggactaaactataagggcactaacatgtcaatagtaggctaaccacatccatggaaaatatatttaccagctcttctctcaaggaggattccgtgtggggtggaagtaatgattgtaaattccttaggggtagaaagtagggcataatcagaatattggaggatatgtgtgactcaggctcgtttcttcctaggattttaaacggtctagctgatggttgaccagaggtgtggggacatgattctgtggttggcctaaagtagctgcttaataatgacgttcgggtgggaccttccggtttctgcccaggtgaaaaaaggaaattctatggcgaaggctagggataaaaaagcggggtcgtaaacatctgtgtttttgtgatttttttcctn

SEQ ID NO: 433612 - DNA, 925 bp, Homo sapiens
  misc_feature (478)..(478): n is a, c, g, or t
  misc_feature (490)..(490): n is a, c, g, or t
gcgtgaagaaagtgtctgtttctcctttgccttccgccaggattgtaggtttcctgaggcctccccagcctttcagaactgtgcgtccggttatgaggtacagcgcctctgctttgggtttgcatttgatgccatcctggacgtcctgtcatcggcgattgtcctgtggcgttacagcaacgcggccgctgtgcactctgcccatagggagtacattgccttcagcctgcattagctgacaagtcagcagtttctactacagaaagcaaaaaaaaagtaagagaagaagtctgagaagtcaaaagacttgcagattatctgactaggacactctgtggaggactttgatacaaatggattgatttttcagtctagtgatctctgttcagaaggcccttgcaagacaccagtaccttgatatttgacttccagtctccagaacttggaacctgaacagtctgctgaagcacctgatgtnggccttcctgantgtcatgtaatacgtattcattttttccagctgaaaataaatagaattggaaaaaaaagaaattatgtaacgtgagaggaaaaagcctttgaagtgaactcttctggaagttttatgttcattgctatcctttagctttcccaaaatgcccataagccaaagatttcatgtgttatttctgtaatttggtagttttcatttaaattatgcattaaaaatgaatattcatcctaaaaaaaaaaaaaaaaaaatccaaacgaggttcttcttctcttttcccctcgggccgaattgggcggaggttggaacacagggccgcgggcaccatggcctactgggggtttccccgcgggttaagcccgggttgacagaatcggggggggaaacacaaaaagacggttgctcccaacacagaagggggtgcgacaggcgcaa

SEQ ID NO: 433613 - DNA, 859 bp, Homo sapiens
gcgtgaagaaagtgtctgtttctcctttgccttccgccaggattgtaggtttcctgaggcctccccagcctttcagaactgtctccgttatgaggtacagcgcctctgcttttgggtttgcatttgatgccatcctggacgtcctgtcatcggcgattgtcctgtggcgttacagcaacgcggccgctgtgcactctgcccatagggagtacattgccttcagcctgcattagctgacaagtcagcagtttctactacagaaagcaaaaaaaaagtaagagaagaagtctgagaagtcaaaagacttgcagattatctgactaggacactctgtggaggactttgatacaaatggattgatttttcagtctagtgatctctgttcaggttcaagtggattctggagtgcagtggcgtgcaccatgactcattgtcacctcaacttcccaggttcaacgtggatactcccacctcagcctcccaagcagctgggagtacaggcatgcaccatccacacctggctactactctcggctctctactaacgctccctatgctcttactcaagcagcctacgcatccttcgccaatatgcctcatactcagtccccacaacacttctcaactgggcctgcccgtaactatgcccaatagcttagacatatgccttgtcagatactaacgcaattccacttaccccattaacatatagtgaactctacctacataacctccatatcctaacctttcatccccaatgcacagaattgtctccattcgtgacacaccataccaactagtcaactctccatgtttctcctttctacgaccctaattacggccataacatcccttaaca

SEQ ID NO: 433614 - DNA, 789 bp, Homo sapiens
ttgtcattgggaggcgccgaagtggagaggtcggctcggaaggaaaagatcactcactcttgggggcatccagcagccatgttgtgaggacactcaagcagctgtgaagaggtgcacctggagaggaactgaggcctcccaccaaaaccaagcactgacatgccactcatggacacagggtccttgctttgtcacccagactggaatgcagtggctcactgccacctcaaactcctgcactcaaaggatcgtcccgcctcagcctcctgagtagctgggaatacaggaggaggttccaagatacccaaataggaacagctccagtctgcagctcccagcatgagcaacacagaagacagaaacaccaaggaaggctctggtctaaaccttgccctcactcctgtcttctggctcctgaccaccctggtgtcttcccctgtggccctgcaaggcatatcatgcttcctgtctctaggacctatccttgccattcagaggctggtctgtacaccagcagcactggcatcaccagggagcttgttagaactgcagaaaattggaccccactccagacctgaggaattaaaatctgcattttaccaagattgctaggtgattgttgtgtactttcaagttaagaagcctgtccttgagcagggctttcttgtgctttgctgtacattggaatcacttggagatctttcagaaacagttaagcctgggtcccaccccagagattctgagcaatttgtcaggggtgggtgggcttgaacatcaagatttttaaaa

SEQ ID NO: 433615 - DNA, 2019 bp, Homo sapiens
ttgtcattgggaggcgccgaagtggagaggtcggctcggaaggaaaagatcactcactcttgggggcatccagcagccatgttgtgaggacactcaagcagctgtgaagaggtgcacctggagaggaactgaggcctcccaccaaaaccaagcactgacatgccactcatggacacagggtccttgctttgtcacccagactggaatgcagtggctcactgccacctcaaactcctgcactcaaaggatcgtcccgcctcagcctcctgagtagctgggaatacaggaggaggttccaagatacccaaataggaacagctccagtctgcagctcccagcatgagcaacacagaagacagaaacaccaaggaaggctctggtctaaaccttgccctcactcctgtcttctggctcctgaccaccctggtgtcttcccctgtggccctgcaaggcatatcatgcttcctgtctctaggacctgcttactagaaagcagcacccgcctgaaacctcacgaagcccagaactacaggaagaaggcattgtgggtgtcctggttctccatcattgtcaccctggccctcgcggtggctgcctttactgtctccgttatgaggtacagcgcctctgcttttgggtttgcatttgatgccatcctggacgtcctgtcatcggcgattgtcctgtggcgttacagcaacgcggccgctgtgcactctgcccatagggagtacatgacgatttcctgttcagtgtctccattttaagtgggattctttgcagcatcctggccgtgttgaagttcatgctggggaaggttctgaccagtagagcactcataacagatgggtttaactccctcgtgggtggcgtgatgggcttctccattcttctgagcgcggaagtgttcaagcatgactcggcggtctggtacctggacggcagcataggcgttctgatcggcctcaccatatttgcctatggggtcaaactcctcatcgacatggtgccgagggtgaggcagacacgtcactacgagatgtttgagtgaagggggccagcatccgcatgagaccatcgagatgaggagtttccacataggcaaagggtgccaatatttaactgaacatctggtttctttttggaagttttctttcacatggtttgtcattacaagacaaggtctgcccagccaggtggatctaccttgcccccatcacctgccgcccccatcaaacatgttgggacaatgcccataggaatggacctccttccccgtctccagctgggactggcgttttttagtctctggagtatgatggttctcatgggtaggatgagatctttggcagaaaggtcttcggtggtgctctgagcctgcgctgcataggactgagcagacccacctcctccagcttgggtggccctgccactcctggttccaagtctctcctttcctggcaggtcttaagggaagattgtacccctcaccctttacatacccagaatcatcagtatgtcacttcctaatttctatcagtgtatctcattatttcatactgttttactaatcctgagtctaaacagatttgctcaaaaggagaccattctattttttaaagtacttagtgatacacgtataagctttgcatggacgaattaaataagcacattgaccttttcttgtacattcagaacctgaacatccatgtgaaaactgggtccatttttgagagatgtgaaactacagtttatttgtaataaataaatataatctatccgtatatgcatatatctatatgctgtgttaagtggtaatgggtacattacagtctgtgagagatggatcgctccctctgtaaggaacaagacgttctcagctgatgtcacggtaggtttagattctgtagagtgttccccaacccgcaccgttctgtacctctcacaccactgcttgcccgggcagtagtggctgaccaataaagacctttacctgttttgtatggcaaaaaaaaaaaa

SEQ ID NO: 433616 - DNA, 1909 bp, Homo sapiens
agcggggcatttctgactcgagtccccgccgcgcttgtcgtcgccgccgccgggatccgcagccccgcgccatggagccggccgcgggcatccagcgccgcagctcccaggggcccaccgtcccgccgccgccccggggccacgcgccaccggctgccgcccccggcccggccccgctgagctccccggtgcgcgagccgccccagctggaggaggagcggcaggtgcggatcagcgagagcggccagttcagcgacgggctggaggaccgaggcttactagaaagcagcacccgcctgaaacctcacgaagcccagaactacaggaagaaggcattgtgggtgtcctggttctccatcattgtcaccctggccctcgcggtggctgcctttactgtctccgttatgaggtacagcgcctctgcttttgggtttgcatttgatgccatcctggacgtcctgtcatcggcgattgtcctgtggcgttacagcaacgcggccgctgtgcactctgcccatagggagtacatagcctgtgtcatcttgggggtgatattccttctgtcatccatatgtatagtggtcaaagccatccatgacctctcaactaggctgctcccagaagtggacgatttcctgttcagtgtctccattttaagtgggattctttgcagcatcctggccgtgttgaagttcatgctggggaaggttctgaccagtagagcactcataacagatgggtttaactccctcgtgggtggcgtgatgggcttctccattcttctgagcgcggaagtgttcaagcatgactcggcggtctggtacctggacggcagcataggcgttctgatcggcctcaccatatttgcctatggggtcaaactcctcatcgacatggtgccgagggtgaggcagacacgtcactacgagatgtttgagtgaagggggccagcatccgcatgagaccatcgagatgaggagtttccacataggcaaagggtgccaatatttaactgaacatctggtttctttttggaagttttctttcacatggtttgtcattacaagacaaggtctgcccagccaggtggatctaccttgcccccatcacctgccgcccccatcaaacatgttgggacaatgcccataggaatggacctccttccccgtctccagctgggactggcgttttttagtctctggagtatgatggttctcatgggtaggatgagatctttggcagaaaggtcttcggtggtgctctgagcctgcgctgcataggactgagcagacccacctcctccagcttgggtggccctgccactcctggttccaagtctctcctttcctggcaggtcttaagggaagattgtacccctcaccctttacatacccagaatcatcagtatgtcacttcctaatttctatcagtgtatctcattatttcatactgttttactaatcctgagtctaaacagatttgctcaaaaggagaccattctattttttaaagtacttagtgatacacgtataagctttgcatggacgaattaaataagcacattgaccttttcttgtacattcagaacctgaacatccatgtgaaaactgggtccatttttgagagatgtgaaactacagtttatttgtaataaataaatataatctatccgtatatgcatatatctatatgctgtgttaagtggtaatgggtacattacagtctgtgagagatggatcgctccctctgtaaggaacaagacgttctcagctgatgtcacggtaggtttagattctgtagagtgttccccaacccgcaccgttctgtacctctcacaccactgcttgcccgggcagtagtggctgaccaataaagacctttacctgttttgtatggcaaaaaaaaaaaa

SEQ ID NO: 433617 - DNA, 1812 bp, Homo sapiens
agcggggcatttctgactcgagtccccgccgcgcttgtcgtcgccgccgccgggatccgcagccccgcgccatggagccggccgcgggcatccagcgccgcagctcccaggggcccaccgtcccgccgccgccccggggccacgcgccaccggctgccgcccccggcccggccccgctgagctccccggtgcgcgagccgccccagctggaggaggagcggcaggtgcggatcagcgagagcggccagttcagcgacgggctggaggaccgaggcttactagaaagcagcacccgcctgaaacctcacgaagcccagaactacaggaagaaggcattgtgggtgtcctggttctccatcattgtcaccctggccctcgcggtggctgcctttactgtctccgttatgaggtacagcgcctctgcttttgggtttgcatttgatgccatcctggacgtcctgtcatcggcgattgtcctgtggcgttacagcaacgcggccgctgtgcactctgcccatagggagtacatagcctgtgtcatcttgggggtgatattccttctgtcatccatatgtatagtggtcaaagccatccatgacctctcaactaggctgctcccagaagtggacgatttcctgttcagtgtctccattttaagtgggattctttgcagcatcctggccgtgttgaagttcatgctggggaaggttctgaccagtagagcactcataacagatgggtttaactccctcgtgggtggcgtgatgggcttctccattcttctgagcgcggaagtgttcaagcatgactcggcggtctggtacctggacggcagcataggcgttctgatcggcctcaccatatttgcctatggggtcaagagtttccacataggcaaagggtgccaatatttaactgaacatctggtttctttttggaagttttctttcacatggtttgtcattacaagacaaggtctgcccagccaggtggatctaccttgcccccatcacctgccgcccccatcaaacatgttgggacaatgcccataggaatggacctccttccccgtctccagctgggactggcgttttttagtctctggagtatgatggttctcatgggtaggatgagatctttggcagaaaggtcttcggtggtgctctgagcctgcgctgcataggactgagcagacccacctcctccagcttgggtggccctgccactcctggttccaagtctctcctttcctggcaggtcttaagggaagattgtacccctcaccctttacatacccagaatcatcagtatgtcacttcctaatttctatcagtgtatctcattatttcatactgttttactaatcctgagtctaaacagatttgctcaaaaggagaccattctattttttaaagtacttagtgatacacgtataagctttgcatggacgaattaaataagcacattgaccttttcttgtacattcagaacctgaacatccatgtgaaaactgggtccatttttgagagatgtgaaactacagtttatttgtaataaataaatataatctatccgtatatgcatatatctatatgctgtgttaagtggtaatgggtacattacagtctgtgagagatggatcgctccctctgtaaggaacaagacgttctcagctgatgtcacggtaggtttagattctgtagagtgttccccaacccgcaccgttctgtacctctcacaccactgcttgcccgggcagtagtggctgaccaataaagacctttacctgttttgtatggcaaaaaaaaaaaa

SEQ ID NO: 433618 - DNA, 696 bp, Homo sapiens
  misc_feature (249)..(249): n is a, c, g, or t
  misc_feature (261)..(261): n is a, c, g, or t
gcgtgaagaaagtgtctgtttctcctttgccttccgccaggattgtaggtttcctgaggcctccccagcctttcagaactgtctccgttatgaggtacagcgcctctgcttttgggtttgcatttgatgccatcctggacgtcctgtcatcggcgattgtcctgtggcgttacagcaacgcggccgctgtgcactctgcccatagggagtacattggaacctgaacagtctgctgaagcacctgatgtnggccttcctgantgtcatgtaatacgtattcattttttccagctgaaaataaatagaattggaaaaaaaagaaattatgtaacgtgagaggaaaaagcctttgaagtgaactcttctggaagttttatgttcattgctatcctttagctttcccaaaatgcccataagccaaagatttcatgtgttatttctgtaatttggtagttttcatttaaattatgcattaaaaatgaatattcatcctaaaaaaaaaaaaaaaaaaatccaaacgaggttcttcttctcttttcccctcgggccgaattgggcggaggttggaacacagggccgcgggcaccatggcctactgggggtttccccgcgggttaagcccgggttgacagaatcggggggggaaacacaaaaagacggttgctcccaacacagaagggggtgcgacaggcgcaa

SEQ ID NO: 433619 - DNA, 934 bp, Homo sapiens
aaggctaggtgggccgggtgtgtaaatcggccgaggcatcggcgattgtcctgtggcgttacagcaacgcggccgctgtgcactctgcccatagggagtacattgccttcagcctgcattagctgacaagtcagcagtttctactacagaaagcaaaaaaaaagtaagagaagaagtctgagaagtcaaaagacttgcagattatctgactaggacactctgtggaggactttgatacaaatggattgatttttcagtctagtgatctctgttcagctgccactgcagagccccgccatggaagacacgccgttggtgatatcgaagcagaagacggaggtggtgtgcggggtccccacccaggtggtgtgtacggccttcagcagtcacatcctggtggtggtgacccagtttgggaagatgggcaccctggtctccctggagcccagcagcgtggccagtgacgtcagcaagcctgtgctcaccacaaaagtccttctggggcaggatgagcctctcatccatgtctttgcaaagaacctggtagcgttgtgtctcaagaagctggaaacagagcagtcctcctcgccgtgccgtgaaggacaaaagcatggaggggctgaaggcgctgagcggaggtgatccgggctgtttgccaggtgtgggtggacctcgggaggcagcccgcccccgcggctgcttcaggccaggaccaccgttgaacaccccagaacaccccacttcagggaaattcaaggtcttcaccctcccctccccccgggtggaggggacgggaacctttgggcacctaggcccttgggaggccacggacaaacagactccggtgtctccaggcaggacttcttactcctggttactagatccatctgggccttgaccggggggttggacccggtccggggagtctggaatg

SEQ ID NO: 433620 - DNA, 524 bp, Homo sapiens
gcgtgaagaaagtgtctgtttctcctttgccttccgccaggattgtaggtttcctgaggcctccccagcctttcagaactgtctccgttatgaggtacagcgcctctgcttttgggtttgcatttgatgccatcctggacgtcctgtcatcggcgattgtcctgtggcgttacagcaacgcggccgctgtgcactctgcccatagggagtacattgccttcagcctgcattagctgacaagtcagcagtttctactacagaaagcaaaaaaaaagtaagagaagaagtctgagaagtcaaaagacttgcagattatctgactaggacactctgtggaggactttgatacaaatggattgatttttcagtctagtgatctctgttcaggtaaactggttatttttacttagactttgaggccattgtgttagagataaaaataatcctagatacttgacatttttatgtttgagtgattttgagtatttttacactttattttataaatgatctttttaagagct

SEQ ID NO: 433621 - DNA, 1865 bp, Homo sapiens
agcggggcatttctgactcgagtccccgccgcgcttgtcgtcgccgccgccgggatccgcagccccgcgccatggagccggccgcgggcatccagcgccgcagctcccaggggcccaccgtcccgccgccgccccggggccacgcgccaccggctgccgcccccggcccggccccgctgagctccccggtgcgcgagccgccccagctggaggaggagcggcaggtgcggatcagcgagagcggccagttcagcgacgggctggaggaccgaggcttactagaaagcagcacccgcctgaaacctcacgaagcccagaactacaggaagaaggcattgtgggtgtcctggttctccatcattgtcaccctggccctcgcggtggctgcctttatttgatgccatcctggacgtcctgtcatcggcgattgtcctgtggcgttacagcaacgcggccgctgtgcactctgcccatagggagtacatagcctgtgtcatcttgggggtgatattccttctgtcatccatatgtatagtggtcaaagccatccatgacctctcaactaggctgctcccagaagtggacgatttcctgttcagtgtctccattttaagtgggattctttgcagcatcctggccgtgttgaagttcatgctggggaaggttctgaccagtagagcactcataacagatgggtttaactccctcgtgggtggcgtgatgggcttctccattcttctgagcgcggaagtgttcaagcatgactcggcggtctggtacctggacggcagcataggcgttctgatcggcctcaccatatttgcctatggggtcaaactcctcatcgacatggtgccgagggtgaggcagacacgtcactacgagatgtttgagtgaagggggccagcatccgcatgagaccatcgagatgaggagtttccacataggcaaagggtgccaatatttaactgaacatctggtttctttttggaagttttctttcacatggtttgtcattacaagacaaggtctgcccagccaggtggatctaccttgcccccatcacctgccgcccccatcaaacatgttgggacaatgcccataggaatggacctccttccccgtctccagctgggactggcgttttttagtctctggagtatgatggttctcatgggtaggatgagatctttggcagaaaggtcttcggtggtgctctgagcctgcgctgcataggactgagcagacccacctcctccagcttgggtggccctgccactcctggttccaagtctctcctttcctggcaggtcttaagggaagattgtacccctcaccctttacatacccagaatcatcagtatgtcacttcctaatttctatcagtgtatctcattatttcatactgttttactaatcctgagtctaaacagatttgctcaaaaggagaccattctattttttaaagtacttagtgatacacgtataagctttgcatggacgaattaaataagcacattgaccttttcttgtacattcagaacctgaacatccatgtgaaaactgggtccatttttgagagatgtgaaactacagtttatttgtaataaataaatataatctatccgtatatgcatatatctatatgctgtgttaagtggtaatgggtacattacagtctgtgagagatggatcgctccctctgtaaggaacaagacgttctcagctgatgtcacggtaggtttagattctgtagagtgttccccaacccgcaccgttctgtacctctcacaccactgcttgcccgggcagtagtggctgaccaataaagacctttacctgttttgtatggcaaaaaaaaaaaa

SEQ ID NO: 433622 - DNA, 4381 bp, Homo sapiens
ctggagacagccccgtggggccagccagcgctgggccaggagcggccacctggttcctgcgtgctacggccctgtgggcctgggagctgcctctgaggaacacgccgcagggccaggcatgtgaggtctctgcgggtcatggagaacctccctgccgtgaccactgaggagccgacccccatggggaggggtcctgtgggaccctcaggaggtggcagcacccgggaccaggtccggactgtggtcatgaggccctctgtgagctgggagaaagcggggcccgaggaggccaaggcgccagtgagaggcgagagacctggagcgtttggcgccttcagaggagccaggcctttgcttggtctcccctaatcctgggaacctgctgtgttgcagacgaggctcctcctgcccgcgtggctgggcctgctgctgggacccctccctgccagatgggggtttatcccacagacctgaccctgcagctgctggctgtgcggaggaagagcagactgcgggaccccggcctacagcagaccctccgggggccagctccgcctgctggagaatgatagccgggagatggcccgcgtgcttggggaattatcagccaggctgctgtccatccacagtgaccaggaccggatcgtggtgacgtttaagacttttgaagaaatctggaagttttccacctaccatgctctcggcttcactcatcactgcctggcaaacctgctcatggaccaggccttctggctgctcttgcccagtgaggaggaggagacggccatccaagtccatgtggatgagaacgccttaaggctgacccacgagagcctcctcatccaagaagggcccttctttgtcctgtgtcctgaccaccatgtgagagtgatgacgggtccccgggatgcaggaaatggcccccaggccctcaggcaggcttcgggggcaccccagggagaggcggccccggaaacagactcttcaccgccgagccccagcgtgtcctccgaggaggtggcagtggcggccgccccggagcctttgattccatttcatcagtgggctcttaggatcccccaggaccccatcgacgatgccatgggtggccctgtgatgcccggcaacccgctgatggctgtgggcctggcctcggcattggcagacttccagggctcggggcccgaagagatgaccttccgaggtggcgacctcatcgagatccttggggcgcaggtgcccagcctgccctggtgcgtgggccgacacgcagcctcgggccgggtggggtttgtgcggagcagcctcatcagcatgcagggccccgtgtccgagttggaaagtgcgatttttctcaatgaggaagaaaagtcattcttcagcgagggctgcttttctgaggaggatgccaggcagttgctgaggcggatgtcgggcaccgatgtctgcagcgtgtacagcctggactcagtagaggaagctgagaccgagcagccgcaggaaaaagaaatacctccaccttgcctgagcccggagccacaggagaccttgcagaaggtgaagaatgttctggaacaatgcaagacctgcccaggctgcccccaggagccagcgtcctggggtctctgtgcggcatccagcgacgtgagcttgcaggaccccgaggagccctccttctgcttggaagccgaggacgactgggaggacccagaggccctgagctcactgctgctgttcctgaacgcccctgggtacaaggccagcttccgtggcctgtacgatgtggcgctgccgtggctgagcagcgtgttccgcagcttcagcgacgaggaggagctgactgggcgcctggcacaggcccggggggcggccaagaaagctggcctcctcatggccctggccaggctctgcttcctcctggggcggctgtgcagcaggaggctcaagctgtcccaggcccgggtgtactttgaggaagcgctgggggccctggagggcagcttcggggacctgttcctggtggtggctgtgtacgccaacctggccagcatttaccggaagcagaagaaccgggagaagtgtgcacaggtggtgcccaaagccatggccctgctcctggggacgcccgaccacatctgcagcaccgaggcggagggggagctcctgcagctggcgctgcggcgggcggtgggtggccagagcctgcaggccgaggcccgggcctgcttcctgctggccaggcaccacgtgcacctcaagcagcccgaggaggccctgcccttcctagagcggctgctgcttttgcacagggactcgggagccccagaggccgcgtggctctcagactgctacctactcctggctgacatctacagccgcaagtgcctgccccacctggtgctgagctgtgtcaaggtggcctcattgcggacacggggctcgctggccggctcgctgaggagtgtgaacctggtgctccagaacgccccccagccccacagcctccctgcccagacttcccactacctcaggcaagcgctggcctccctgaccccgggcacaggccaggcgctgtgcggccccctctacaccagcttggcccagctgtacagccaccatggctgccacggcccggccatcaccttcatgacgcaggcagtggaagccagtgctattgccggagtccgtgccatcgtggaccacctggtggccctggcctggctgcacgtgcttcatgggcagagcccggtggccctggacatcctgcagtctgtccgggatgcagtggtggccagcgaggaccaggagggcgtgattgccaacatggtggccgtggctctgaagaggacgggccggacgaggcaggcagctgagagctactaccgcgccctgcgggtggctcgggacctgggccagcaaaggaaccaggcagtggggctggccaacttcggggccctgtgcctgcatgcgggtgccagcaggctggcccagcactacctcctggaggccgtgcggctgttctcgaggctgccccttggggagtgtggccgggacttcacccacgtgctcctgcagctgggccatctctgcacccgccagggcccggcccagcagggcaagggctactacgagtgggcccttctggtcgccgtggagatgggccacgtggagagccagctgcgggccgtccagcggctgtgccacttctacagcgccgtcatgcccagcgaggcccagtgtgtcatctaccatgagctccagctctccctggcctgcaaggtggccgacaaggtgctggaggggcagctcctggagaccatcagccagctctacctgtccctgggcaccgagcgggcctacaaatccgcactggactacaccaaacgaagtctggggattttcattgacctccagaagaaagagaaggaggcgcatgcctggctgcaagcagggaagatctattacatcttgcggcagagcgagctggtggacctctacatccaggtggcacagaacgtggccctgtacacaggcgaccccaacctggggctggagctgtttgaggcggctggagacatcttcttcgacggggcctgggagcgggagaaagctgtgtccttctaccgggaccgggccctgcccctggcagtgactacgggcaaccgcaaggcggagctgcggctgtgcaacaagctggtggcactgctggccacgctggaggagccccaggagggcttggagtttgcccacatggccctagcactcagcatcactctgggggaccggctgaacgagcgcgtggcctaccaccggctggccgccctgcaacaccgactgggccatggcgagctggcagagcacttctacctcaaggccctgtcgctctgcaactcgccgctggagtttgacgaggagaccctctactacgtgaaggtgtacctggtgctcggtgacatcatcttctacgacctgaaggacccgtttgatgcagccgggtactaccagctggcgctggcggccgccgtggacctgggcaacaagaaggcacagctgaagatctacacgcggctggccaccatctaccacaacttcctcctggaccgtgagaagtcgctcttcttctaccagaaggccaggaccttcgccacagagctcaacgtccgcagggtcaacctgcctcctctgccactctgcgggtgggccccctggttggcccccagccaccctcgctgaggacagcatccaagggagtgggttttgtgcaagggctgggggtctcctgcctctcctcgtgtcgccggtggctcattttctggcaaatggaggcacgaacgcaggggccaaatagcaataaatgggttttgttttttaaaaaaaaaaa

SEQ ID NO: 433623 - DNA, 2585 bp, Homo sapiens
ctggagacagccccgtggggccagccagcgctgggccaggagcggccacctggttcctgcgtgctacggccctgtgggcctgggagctgcctctgaggaacacgccgcaggaagatatggctgcccacgttggtgcttcccggactccccaagaggtgatggagcattacgtgagcatgtacatccacgggaacctggggaaggcctgcatccccgacaccatccccaaccgcgtgacagaccacacctgtcccagcggaggccccctctcacccagcctcaccaccccgctgcccccgctggacatctctgtggctgagcagcagcagctgggctacatgccgctgcgggatgattacgagatcgagtatgaccaggatgccgagacgctcatcagcgggctctctgtcaactatgatgacgacgacgtggagatcgagctgaagcgcgcccacgtggacatgtacgtgcggaagctgaaagagagacagcggcggaagaacatcgcccgtgactacaatctggtgccagccttcctggggaaggacaagaaggagaaggaaaaggcgctgaagcgcaagatcaccaaggaggagaaggagctgcgcctgaagctgaggccgctgtaccagttcatgtcatgcaaggagtttgatgacctttttgaaaacatgcacaaagaaaaaatgctccgggccaagatccgagaactgcagcggtaccggcgaaacgggatcaccaagatggaagagtcggcagagtacgaggcagcgcggcataaacgggagaaggtgctctgcagctctttaaacttgagtccagcccgctacgtgactgtgaagactattataattaaagaccacctccagaagcggcaaggaatcccctccaaaagccgccttcctagctacctggacaaagtcctaaagaaaaggattttgaatttcctcacagaaagcggctggatctccagggacgcgtcttgaagctgagacgctttgaaagccagggtgatgctcagacagtgtgccagccaaaatgacttgggggaggggagccgcttccccactgttgctcttttttaaacaaattgagttcctttttttaagatagaaattcttttcatggtcctctgaaagaagcaatagtaacaatcttatattggatcatgggggaagcaaatgtgtgtattttaagtgagttcctgcgagtcatacactgcgatgatgctccgcctttacccgttcagttgggagcttattgtgagattggatcatttccttttgagtgttcttctctttggtacaaaacctattgtgggtgacaggagcagtgttttcctgctggacccgcaagccaccagctatttcctggtgacacaagctcttctcaggcggggctgcctgcaggctcccgttttctgagcccacgctgcccacagctgaccccagcgcagccccgggcacgcggcactttacatgggggcagcttgggcccagactcctccgctgtgtagcagatgaggaaaatcaggccagaggacaacaggctggcgttttgttgggaactgaagaggaatctgttgaacacagcgaccagatgaccttccatttcaccggcggcagcagtttcagcgtgcagttcccaaaccccaaagctgaccctgcgccccatttgaatacggccagagcctgctggttcactttgggtagagccgtgcctcttgggcaggctcccatagtgaccacgtccccacgaatgggaaagcacgttagtgggagggacgtaggacacgtgtggaccgccaggccctctcagtccattttccggggctgctcggtgctgctgttaagacgtgagtgcatttcacttggaagaacccattgtacaaagttcaaggctaagagttctgaattctggcgtcagcttcctcaggattttcttcagttgcaagtacctttccactgaaaatatgagcatgcccgcctggctagtaggcatctgtaagagtgtcgccaggcccgcgccagctgaggcctcagactagccaggcaagagccgtctgaccagttggctggcggtggttctggtggagcacgagggagcccgggtggtgccctgagcctcgagctgctctctgtcactgtcttgaatcagactcagaaatggcttcttcccagccctgcctacaagtttttctctggggtcctctttcaaggatgtccacggtaccttcctcctgaaacttgaggaagtcttttgtcttccagctgctcagggttctctggtccaagaccctgctttaaagagagtctttggcgtgctcagactccagcgctccgttcttcaaggaggttgacttgcctctcgggccccgtaggtaccaagagactgtttacctcccagaatgtttgggcttgaagttacattaaagtgaagttatttgaaagaaagaaaacctcatcatttctaaggatgacttaattactgtgccttttcctttctttttacacatcctactgtcccttagggtaaaattttcagcattaaataaaacatttcaaatatattgtatatggctttag

SEQ ID NO: 433624 - DNA, 2954 bp, Homo sapiens
  misc_feature (45)..(45): n is a, c, g, or t
ttcggcggccccgactcgacccccccgggggaggacatctggaanaagtttgagctgcggcgggccgggcggcgggcggcgagcgggggaagatggcggagctggggaagaagtactgcgtgtactgcctggccgaggtgagcccgctgcgcttccgctgcaccgagtgccaggacatcgagctgtgccccgagtgcttctcggccggcgccgagatcggccaccaccgccgctaccacggctaccagctggtggacggcgggcgcttcacgctctgggggcccgaggccgagggcggctggaccagtcgcgaggagcagctgctgctggacgccatcgagcagttcggcttcggaaactgggaagatatggctgcccacgttggtgcttcccggactccccaagaggtgatggagcattacgtgagcatgtacatccacgggaacctggggaaggcctgcatccccgacaccatccccaaccgcgtgacagaccacacctgtcccagcggaggccccctctcacccagcctcaccaccccgctgcccccgctggacatctctgtggctgagcagcagcagctgggctacatgccgctgcgggatgattacgagatcgagtatgaccaggatgccgagacgctcatcagcgggctctctgtcaactatgatgacgacgacgtggagatcgagctgaagcgcgcccacgtggacatgtacgtgcggaagctgaaagagagacagcggcggaagaacatcgcccgtgactacaatctggtgccagccttcctggggaaggacaagaaggagaaggaaaaggcgctgaagcgcaagatcaccaaggaggagaaggagctgcgcctgaagctgaggccgctgtaccagttcatgtcatgcaaggagtttgatgacctttttgaaaacatgcacaaagaaaaaatgctccgggccaagatccgagaactgcagcggtaccggcgaaacgggatcaccaagatggaagagtcggcagagtacgaggcagcgcggcataaacgggagaagaggaaggagaacaaaaacctagccggctccaaacggggaaaggaggacggcaaagacagcgagttcgccgccattgagaaccttccaggcttcgagctcctgtcagatcgcgagaaggtgctctgcagctctttaaacttgagtccagcccgctacgtgactgtgaagactattataattaaagaccacctccagaagcggcaaggaatcccctccaaaagccgccttcctagctacctggacaaagtcctaaagaaaaggattttgaatttcctcacagaaagcggctggatctccagggacgcgtcttgaagctgagacgctttgaaagccagggtgatgctcagacagtgtgccagccaaaatgacttgggggaggggagccgcttccccactgttgctcttttttaaacaaattgagttcctttttttaagatagaaattcttttcatggtcctctgaaagaagcaatagtaacaatcttatattggatcatgggggaagcaaatgtgtgtattttaagtgagttcctgcgagtcatacactgcgatgatgctccgcctttacccgttcagttgggagcttattgtgagattggatcatttccttttgagtgttcttctctttggtacaaaacctattgtgggtgacaggagcagtgttttcctgctggacccgcaagccaccagctatttcctggtgacacaagctcttctcaggcggggctgcctgcaggctcccgttttctgagcccacgctgcccacagctgaccccagcgcagccccgggcacgcggcactttacatgggggcagcttgggcccagactcctccgctgtgtagcagatgaggaaaatcaggccagaggacaacaggctggcgttttgttgggaactgaagaggaatctgttgaacacagcgaccagatgaccttccatttcaccggcggcagcagtttcagcgtgcagttcccaaaccccaaagctgaccctgcgccccatttgaatacggccagagcctgctggttcactttgggtagagccgtgcctcttgggcaggctcccatagtgaccacgtccccacgaatgggaaagcacgttagtgggagggacgtaggacacgtgtggaccgccaggccctctcagtccattttccggggctgctcggtgctgctgttaagacgtgagtgcatttcacttggaagaacccattgtacaaagttcaaggctaagagttctgaattctggcgtcagcttcctcaggattttcttcagttgcaagtacctttccactgaaaatatgagcatgcccgcctggctagtaggcatctgtaagagtgtcgccaggcccgcgccagctgaggcctcagactagccaggcaagagccgtctgaccagttggctggcggtggttctggtggagcacgagggagcccgggtggtgccctgagcctcgagctgctctctgtcactgtcttgaatcagactcagaaatggcttcttcccagccctgcctacaagtttttctctggggtcctctttcaaggatgtccacggtaccttcctcctgaaacttgaggaagtcttttgtcttccagctgctcagggttctctggtccaagaccctgctttaaagagagtctttggcgtgctcagactccagcgctccgttcttcaaggaggttgacttgcctctcgggccccgtaggtaccaagagactgtttacctcccagaatgtttgggcttgaagttacattaaagtgaagttatttgaaagaaagaaaacctcatcatttctaaggatgacttaattactgtgccttttcctttctttttacacatcctactgtcccttagggtaaaattttcagcattaaataaaacatttcaaatatattgtatatggctttag

SEQ ID NO: 433625 - DNA, 4702 bp, Homo sapiens
ctggagacagccccgtggggccagccagcgctgggccaggagcggccacctggttcctgcgtgctacggccctgtgggcctgggagctgcctctgaggaacacgccgcagggccaggcatgtgaggtctctgcgggtcatggagaacctccctgccgtgaccactgaggagccgacccccatggggaggggtcctgtgggaccctcaggaggtggcagcacccgggaccaggtccggactgtggtcatgaggccctctgtgagctgggagaaagcggggcccgaggaggccaaggcgccagtgagaggcgagagacctggagcgtttggcgccttcagaggagccaggcctttgcttggtctcccctaatcctgggaacctgctgtgttgcagacgaggctcctcctgcccgcgtggctgggcctgctgctgggacccctccctgccagatgggggtttatcccacagacctgaccctgcagctgctggctgtgcggaggaagagcagactgcgggaccccggcctacagcagaccctccgggggccagctccgcctgctggagaatgatagccgggagatggcccgcgtgcttggggaattatcagccaggctgctgtccatccacagtgaccaggaccggatcgtggtgacgtttaagacttttgaagaaatctggaagttttccacctaccatgctctcggcttcactcatcactgcctggcaaacctgctcatggaccaggccttctggctgctcttgcccagtgaggaggaggagacggccatccaagtccatgtggatgagaacgccttaaggctgacccacgagagcctcctcatccaagaagggcccttctttgtcctgtgtcctgaccaccatgtgagagtgatgacgggtccccgggatgcaggaaatggcccccaggccctcaggcaggcttcgggggcaccccagggagaggcggccccggaaacagactcttcaccgccgagccccagcgtgtcctccgaggaggtggcagtggcggccgccccggagcctttgattccatttcatcagtgggctcttaggatcccccaggaccccatcgacgatgccatgggtggccctgtgatgcccggcaacccgctgatggctgtgggcctggcctcggcattggcagacttccagggctcggggcccgaagagatgaccttccgaggtggcgacctcatcgagatccttggggcgcaggtgcccagcctgccctggtgcgtgggccgacacgcagcctcgggccgggtggggtttgtgcggagcagcctcatcagcatgcagggccccgtgtccgagttggaaagtgcgatttttctcaatgaggaagaaaagtcattcttcagcgagggctgcttttctgaggaggatgccaggcagttgctgaggcggatgtcgggcaccgatgtctgcagcgtgtacagcctggactcagtagaggaagctgagaccgagcagccgcaggaaaaagaaatacctccaccttgcctgagcccggagccacaggagaccttgcagaaggtgaagaatgttctggaacaatgcaagacctgcccaggctgcccccaggagccagcgtcctggggtctctgtgcggcatccagcgacgtgagcttgcaggaccccgaggagccctccttctgcttggaagccgaggacgactgggaggacccagaggccctgagctcactgctgctgttcctgaacgcccctgggtacaaggccagcttccgtggcctgtacgatgtggcgctgccgtggctgagcagcgtgttccgcagcttcagcgacgaggaggagctgactgggcgcctggcacaggcccggggggcggccaagaaagctggcctcctcatggccctggccaggctctgcttcctcctggggcggctgtgcagcaggaggctcaagctgtcccaggcccgggtgtactttgaggaagcgctgggggccctggagggcagcttcggggacctgttcctggtggtggctgtgtacgccaacctggccagcatttaccggaagcagaagaaccgggagaagtgtgcacaggtggtgcccaaagccatggccctgctcctggggacgcccgaccacatctgcagcaccgaggcggagggggccccacagcctccctgcccagacttcccactacctcaggcaagcgctggcctccctgaccccgggcacaggccaggcgctgtgcggccccctctacaccagcttggcccagctgtacagccaccatggctgccacggcccggccatcaccttcatgacgcaggcagtggaagccagtgctattgccggagtccgtgccatcgtggaccacctggtggccctggcctggctgcacgtgcttcatgggcagagcccggtggccctggacatcctgcagtctgtccgggatgcagtggtggccagcgaggaccaggagggcgtgattgccaacatggtggccgtggctctgaagaggacgggccggacgaggcaggcagctgagagctactaccgcgccctgcgggtggctcgggacctgggccagcaaaggaaccaggcagtggggctggccaacttcggggccctgtgcctgcatgcgggtgccagcaggctggcccagcactacctcctggaggccgtgcggctgttctcgaggctgccccttggggagtgtggccgggacttcacccacgtgctcctgcagctgggccatctctgcacccgccagggcccggcccagcagggcaagggctactacgagtgggcccttctggtcgccgtggagatgggccacgtggagagccagctgcgggccgtccagcggctgtgccacttctacagcgccgtcatgcccagcgaggcccagtgtgtcatctaccatgagctccagctctccctggcctgcaaggtggccgacaaggtgctggaggggcagctcctggagaccatcagccagctctacctgtccctgggcaccgagcgggcccagtgacattgctgcactcacaccccttcgactcaccaagagagcagggaaggagccggattccacagggacccgggagatcggctccagccttggcctcaggttcacagcaggaaaatgggccagtgtgttagagccatgttctcaaagtgtggtccctggaccagcagagcagcatccatgtcacctaggagcttgtggcaagtgggagttctagggcccgccccaggcccgtggagccagaagctctgggggcaggccagcaagctatatggacaggcctctggatgactgtgatgcctgcgcaccttgagaaccatcggcctggatagcatctgaacactgatggctcctggtgcgtctagagaagacacaggccatgtctgggacgcgggggagatggactagcacgctcccccagccacagggcagcatgatgcccagttccctcagaaggatgtccttcatcttttccttgccgtgtgtgttcaaccccaccctctcagcagcccgggaagggcaggacactgcacacacaagagggccgttcccagtcccattccagattcatctgtcaccagacccacgggaggaggcagactggttccaggaggatgacagcccttgttctgacacctgtgtctgataccagggcctacaaatccgcactggactacaccaaacgaagtctggggattttcattgacctccagaagaaagagaaggaggcgcatgcctggctgcaagcagggaagatctattacatcttgcggcagagcgagctggtggacctctacatccaggtggcacagaacgtggccctgtacacaggcgaccccaacctggggctggagctgtttgaggcggctggagacatcttcttcgacggggcctgggagcgggagaaagctgtgtccttctaccgggaccgggccctgcccctggcagtgactacgggcaaccgcaaggcggagctgcggctgtgcaacaagctggtggcactgctggccacgctggaggagccccaggagggcttggagtttgcccacatggccctagcactcagcatcactctgggggaccggctgaacgagcgcgtggcctaccaccggctggccgccctgcaacaccgactgggccatggcgagctggcagagcacttctacctcaaggccctgtcgctctgcaactcgccgctggagtttgacgaggagaccctctactacgtgaaggtgtacctggtgctcggtgacatcatcttctacgacctgaaggacccgtttgatgcagccgggtactaccagctggcgctggcggccgccgtggacctgggcaacaagaaggcacagctgaagatctacacgcggctggccaccatctaccacaacttcctcctggaccgtgagaagtcgctcttcttctaccagaaggccaggaccttcgccacagagctcaacgtccgcagggtcaacctgcctcctctgccactctgcgggtgggccccctggttggcccccagccaccctcgctgaggacagcatccaagggagtgggttttgtgcaagggctgggggtctcctgcctctcctcgtgtcgccggtggctcattttctggcaaatggaggcacgaacgcaggggccaaatagcaataaatgggttttgttttttaaaaaaaaaaa

SEQ ID NO: 433626 - DNA, 5655 bp, Homo sapiens
ctcctgcctcagcttcctgagtagctgggattataagtacgagctaccatgcccagctaaattttttgtatttttagtagagatggggtttcaccatgttgaccaagctgatctcaaactcctggcttcaggtgatccgcccgccttgccctcccaaagtgctgggattacaggcatgagccatgaatctgtgctttagaacaggcaggctcacaaaggcctcactagcaagataacaacactggtgtgcgcacctggtgctcagggagaaatgccgggtaggcggagtcgtagacggatgtgggtctttgttgcaggaatgatttaggctgtgcttctagttgccttcacactctgccctctgtaatttcactcaaccagaacttgagggaagctgccgtccagtggcctcagtgctgaccgggaaagctgttatttgaaagctgacccacgtgagctcttcctggcacattccctgttccatttggaggaattccaggctctaacggagcctccctggggatcttgcgacaccacccttgatttgagggctaagtgagttagggagtaagaattgtagccacaattccccaagcaccggtgagcagggctgaggctcatcccactgtggacgtgggcttcttgatccggttcttggaggaagtggctcatctgtggctgcccatccacagtgatggccattgtggggggatgtccatccagagggcagcaggcttcctgtctccctctttcagagtccactctacgctgagtgtggaggcaggattctcacatcacttgcctgtgccttacacgtgcaccgagcctcctagttcagctgcggtgaacgaaggctcactgccccagacgagaggggggaggctcgcagcatcccagagacaaggcttcacctgatagaaatggaaacagataccagctcatgatgcggggcggggcttgcacatgggcatttcagacccaccttgctgctggcccataccccctgcggcctgcacggcccccgaccatatggtctccctctcacagaggggaatatggaggcgtggagaggtcagataacttgaccacggttgccgctggtgggtggtggagctgggcttgacctctcacagcccgggtggtcaggccgtgggctgctgtgtgtagccagcactgtgggcaccccagggcaggtgggtgtcttccatggtctccctggacctggtcagtgcagggctcagccgacctgggaccacacaggcttccctgcctccctgcccctcttctggagccctcgggtgactgggcctggactccacaggcttcactcatcactgcctggcaaacctgctcatggaccaggccttctggctgctcttgcccagtgaggaggaggagacggccatccaagtccatgtggatgagaacgccttaaggctgacccacgagagcctcctcatccaagaagggcccttctttgtcctgtgtcctgaccaccatgtgagagtgatgacgggtccccgggatgcaggaaatggcccccaggccctcaggcaggcttcgggggcaccccagggagaggcggccccggaaacagactcttcaccgccgagccccagcgtgtcctccgaggaggtggcagtggcggccgccccggagcctttgattccatttcatcagtgggctcttaggatcccccaggaccccatcgacgatgccatgggtggccctgtgatgcccggcaacccgctgatggctgtgggcctggcctcggcattggcagacttccagggctcggggcccgaagagatgaccttccgaggtggcgacctcatcgagatccttggggcgcaggtgcccagcctgccctggtgcgtgggccgacacgcagcctcgggccgggtggggtttgtgcggagcagcctcatcagcatgcagggccccgtgtccgagttggaaagtgcgatttttctcaatgaggaagaaaagtcattcttcagcgagggctgcttttctgaggaggatgccaggcagttgctgaggcggatgtcgggcaccgatgtctgcagcgtgtacagcctggactcagtagaggaagctgagaccgagcagccgcaggaaaaagaaatacctccaccttgcctgagcccggagccacaggagaccttgcagaaggtgaagaatgttctggaacaatgcaagacctgcccaggctgcccccaggagccagcgtcctggggtctctgtgcggcatccagcgacgtgagcttgcaggaccccgaggagccctccttctgcttggaagccgaggacgactgggaggacccagaggccctgagctcactgctgctgttcctgaacgcccctgggtacaaggccagcttccgtggcctgtacgatgtggcgctgccgtggctgagcagcgtgttccgcagcttcagcgacgaggaggagctgactgggcgcctggcacaggcccggggggcggccaagaaagctggcctcctcatggccctggccaggctctgcttcctcctggggcggctgtgcagcaggaggctcaagctgtcccaggcccgggtgtactttgaggaagcgctgggggccctggagggcagcttcggggacctgttcctggtggtggctgtgtacgccaacctggccagcatttaccggaagcagaagaaccgggagaagtgtgcacaggtggtgcccaaagccatggccctgctcctggggacgcccgaccacatctgcagcaccgaggcggagggggagctcctgcagctggcgctgcggcgggcggtgggtggccagagcctgcaggccgaggcccgggcctgcttcctgctggccaggcaccacgtgcacctcaagcagcccgaggaggccctgcccttcctagagcggctgctgcttttgcacagggactcgggagccccagaggccgcgtggctctcagactgctacctactcctggctgacatctacagccgcaagtgcctgccccacctggtgctgagctgtgtcaaggtggcctcattgcggacacggggctcgctggccggctcgctgaggagtgtgaacctggtgctccagaacgccccccagccccacagcctccctgcccagacttcccactacctcaggcaagcgctggcctccctgaccccgggcacaggccaggcgctgtgcggccccctctacaccagcttggcccagctgtacagccaccatggctgccacggcccggccatcaccttcatgacgcaggcagtggaagccagtgctattgccggagtccgtgccatcgtggaccacctggtggccctggcctggctgcacgtgcttcatgggcagagcccggtggccctggacatcctgcagtctgtccgggatgcagtggtggccagcgaggaccaggagggcgtgattgccaacatggtggccgtggctctgaagaggacgggccggacgaggcaggcagctgagagctactaccgcgccctgcgggtggctcgggacctgggccagcaaaggaaccaggcagtggggctggccaacttcggggccctgtgcctgcatgcgggtgccagcaggctggcccagcactacctcctggaggccgtgcggctgttctcgaggctgccccttggggagtgtggccgggacttcacccacgtgctcctgcagctgggccatctctgcacccgccagggcccggcccagcagggcaagggctactacgagtgggcccttctggtcgccgtggagatgggccacgtggagagccagctgcgggccgtccagcggctgtgccacttctacagcgccgtcatgcccagcgaggcccagtgtgtcatctaccatgagctccagctctccctggcctgcaaggtggccgacaaggtgctggaggggcagctcctggagaccatcagccagctctacctgtccctgggcaccgagcgggcccagtgacattgctgcactcacaccccttcgactcaccaagagagcagggaaggagccggattccacagggacccgggagatcggctccagccttggcctcaggttcacagcaggaaaatgggccagtgtgttagagccatgttctcaaagtgtggtccctggaccagcagagcagcatccatgtcacctaggagcttgtggcaagtgggagttctagggcccgccccaggcccgtggagccagaagctctgggggcaggccagcaagctatatggacaggcctctggatgactgtgatgcctgcgcaccttgagaaccatcggcctggatagcatctgaacactgatggctcctggtgcgtctagagaagacacaggccatgtctgggacgcgggggagatggactagcacgctcccccagccacagggcagcatgatgcccagttccctcagaaggatgtccttcatcttttccttgccgtgtgtgttcaaccccaccctctcagcagcccgggaagggcaggacactgcacacacaagagggccgttcccagtcccattccagattcatctgtcaccagacccacgggaggaggcagactggttccaggaggatgacagcccttgttctgacacctgtgtctgataccagggcctacaaatccgcactggactacaccaaacgaagtctggggattttcattgacctccagaagaaagagaaggaggcgcatgcctggctgcaagcagggaagatctattacatcttgcggcagagcgagctggtggacctctacatccaggtggcacagaacgtggccctgtacacaggcgaccccaacctggggctggagctgtttgaggcggctggagacatcttcttcgacggggcctgggagcgggagaaagctgtgtccttctaccgggaccgggccctgcccctggcagtgactacgggcaaccgcaaggcggagctgcggctgtgcaacaagctggtggcactgctggccacgctggaggagccccaggagggcttggagtttgcccacatggccctagcactcagcatcactctgggggaccggctgaacgagcgcgtggcctaccaccggctggccgccctgcaacaccgactgggccatggcgagctggcagagcacttctacctcaaggccctgtcgctctgcaactcgccgctggagtttgacgaggagaccctctactacgtgaaggtgtacctggtgctcggtgacatcatcttctacgacctgaaggacccgtttgatgcagccgggtactaccagctggcgctggcggccgccgtggacctgggcaacaagaaggcacagctgaagatctacacgcggctggccaccatctaccacaacttcctcctggaccgtgagaagtcgctcttcttctaccagaaggccaggaccttcgccacagagctcaacgtccgcagggtcaacctgcctcctctgccactctgcgggtgggccccctggttggcccccagccaccctcgctgaggacagcatccaagggagtgggttttgtgcaagggctgggggtctcctgcctctcctcgtgtcgccggtggctcattttctggcaaatggaggcacgaacgcaggggccaaatagcaataaatgggttttgttttttaaaaaaaaaaa

SEQ ID NO: 433627 - DNA, 4668 bp, Homo sapiens
ctggagacagccccgtggggccagccagcgctgggccaggagcggccacctggttcctgcgtgctacggccctgtgggcctgggagctgcctctgaggaacacgccgcagggccaggcatgtgaggtctctgcgggtcatggagaacctccctgccgtgaccactgaggagccgacccccatggggaggggtcctgtgggaccctcaggaggtggcagcacccgggaccaggtccggactgtggtcatgaggccctctgtgagctgggagaaagcggggcccgaggaggccaaggcgccagtgagaggcgacctgaccctgcagctgctggctgtgcggaggaagagcagactgcgggaccccggcctacagcagaccctccgggggccagctccgcctgctggagaatgatagccgggagatggcccgcgtgcttggggaattatcagccaggctgctgtccatccacagtgaccaggaccggatcgtggtgacgtttaagacttttgaagaaatctggaagttttccacctaccatgctctcggcttcactcatcactgcctggcaaacctgctcatggaccaggccttctggctgctcttgcccagtgaggaggaggagacggccatccaagtccatgtggatgagaacgccttaaggctgacccacgagagcctcctcatccaagaaggtgggctcttaggatcccccaggaccccatcgacgatgccatgggtggccctgtgatgcccggcaacccgctgatggctgtgggcctggcctcggcattggcagacttccagggctcggggcccgaagagatgaccttccgaggtggcgacctcatcgagatccttggggcgcaggtgcccagcctgccctggtgcgtgggccgacacgcagcctcgggccgggtggggtttgtgcggagcagcctcatcagcatgcagggccccgtgtccgagttggaaagtgcgatttttctcaatgaggaagaaaagtcattcttcagcgagggctgcttttctgaggaggatgccaggcagttgctgaggcggatgtcgggcaccgatgtctgcagcgtgtacagcctggactcagtagaggaagctgagaccgagcagccgcaggaaaaagaaatacctccaccttgcctgagcccggagccacaggagaccttgcagaaggtgaagaatgttctggaacaatgcaagacctgcccaggctgcccccaggagccagcgtcctggggtctctgtgcggcatccagcgacgtgagcttgcaggaccccgaggagccctccttctgcttggaagccgaggacgactgggaggacccagaggccctgagctcactgctgctgttcctgaacgcccctgggtacaaggccagcttccgtggcctgtacgatgtggcgctgccgtggctgagcagcgtgttccgcagcttcagcgacgaggaggagctgactgggcgcctggcacaggcccggggggcggccaagaaagctggcctcctcatggccctggccaggctctgcttcctcctggggcggctgtgcagcaggaggctcaagctgtcccaggcccgggtgtactttgaggaagcgctgggggccctggagggcagcttcggggacctgttcctggtggtggctgtgtacgccaacctggccagcatttaccggaagcagaagaaccgggagaagtgtgcacaggtggtgcccaaagccatggccctgctcctggggacgcccgaccacatctgcagcaccgaggcggagggggagctcctgcagctggcgctgcggcgggcggtgggtggccagagcctgcaggccgaggcccgggcctgcttcctgctggccaggcaccacgtgcacctcaagcagcccgaggaggccctgcccttcctagagcggctgctgcttttgcacagggactcgggagccccagaggccgcgtggctctcagactgctacctactcctggctgacatctacagccgcaagtgcctgccccacctggtgctgagctgtgtcaaggtggcctcattgcggacacggggctcgctggccggctcgctgaggagtgtgaacctggtgctccagaacgccccccagccccacagcctccctgcccagacttcccactacctcaggcaagcgctggcctccctgaccccgggcacaggccaggcgctgtgcggccccctctacaccagcttggcccagctgtacagccaccatggctgccacggcccggccatcaccttcatgacgcaggcagtggaagccagtgctattgccggagtccgtgccatcgtggaccacctggtggccctggcctggctgcacgtgcttcatgggcagagcccggtggccctggacatcctgcagtctgtccgggatgcagtggtggccagcgaggaccaggagggcgtgattgccaacatggtggccgtggctctgaagaggacgggccggacgaggcaggcagctgagagctactaccgcgccctgcgggtggctcgggacctgggccagcaaaggaaccaggcagtggggctggccaacttcggggccctgtgcctgcatgcgggtgccagcaggctggcccagcactacctcctggaggccgtgcggctgttctcgaggctgccccttggggagtgtggccgggacttcacccacgtgctcctgcagctgggccatctctgcacccgccagggcccggcccagcagggcaagggctactacgagtgggcccttctggtcgccgtggagatgggccacgtggagagccagctgcgggccgtccagcggctgtgccacttctacagcgccgtcatgcccagcgaggcccagtgtgtcatctaccatgagctccagctctccctggcctgcaaggtggccgacaaggtgctggaggggcagctcctggagaccatcagccagctctacctgtccctgggcaccgagcgggcccagtgacattgctgcactcacaccccttcgactcaccaagagagcagggaaggagccggattccacagggacccgggagatcggctccagccttggcctcaggttcacagcaggaaaatgggccagtgtgttagagccatgttctcaaagtgtggtccctggaccagcagagcagcatccatgtcacctaggagcttgtggcaagtgggagttctagggcccgccccaggcccgtggagccagaagctctgggggcaggccagcaagctatatggacaggcctctggatgactgtgatgcctgcgcaccttgagaaccatcggcctggatagcatctgaacactgatggctcctggtgcgtctagagaagacacaggccatgtctgggacgcgggggagatggactagcacgctcccccagccacagggcagcatgatgcccagttccctcagaaggatgtccttcatcttttccttgccgtgtgtgttcaaccccaccctctcagcagcccgggaagggcaggacactgcacacacaagagggccgttcccagtcccattccagattcatctgtcaccagacccacgggaggaggcagactggttccaggaggatgacagcccttgttctgacacctgtgtctgataccagggcctacaaatccgcactggactacaccaaacgaagtctggggattttcattgacctccagaagaaagagaaggaggcgcatgcctggctgcaagcagggaagatctattacatcttgcggcagagcgagctggtggacctctacatccaggtggcacagaacgtggccctgtacacaggcgaccccaacctggggctggagctgtttgaggcggctggagacatcttcttcgacggggcctgggagcgggagaaagctgtgtccttctaccgggaccgggccctgcccctggcagtgactacgggcaaccgcaaggcggagctgcggctgtgcaacaagctggtggcactgctggccacgctggaggagccccaggagggcttggagtttgcccacatggccctagcactcagcatcactctgggggaccggctgaacgagcgcgtggcctaccaccggctggccgccctgcaacaccgactgggccatggcgagctggcagagcacttctacctcaaggccctgtcgctctgcaactcgccgctggagtttgacgaggagaccctctactacgtgaaggtgtacctggtgctcggtgacatcatcttctacgacctgaaggacccgtttgatgcagccgggtactaccagctggcgctggcggccgccgtggacctgggcaacaagaaggcacagctgaagatctacacgcggctggccaccatctaccacaacttcctcctggaccgtgagaagtcgctcttcttctaccagaaggccaggaccttcgccacagagctcaacgtccgcagggtcaacctgcctcctctgccactctgcgggtgggccccctggttggcccccagccaccctcgctgaggacagcatccaagggagtgggttttgtgcaagggctgggggtctcctgcctctcctcgtgtcgccggtggctcattttctggcaaatggaggcacgaacgcaggggccaaatagcaataaatgggttttgttttttaaaaaaaaaaa

SEQ ID NO: 433628 - DNA, 3249 bp, Homo sapiens
agcaggctgtacggccgagatgtaaggatgagaccgagcagccgcaggaaaaagaaatacctccaccttgcctgagcccggagccacaggagaccttgcagaaggtgaagaatgttctggaacaatgcaagacctgcccaggctgcccccaggagccagcgtcctggggtctctgtgcggcatccagcgacgtgagcttgcaggaccccgaggagccctccttctgcttggaagccgaggacgactgggaggacccagaggccctgagctcactgctgctgttcctgaacgcccctgggtacaaggccagcttccgtggcctgtacgatgtggcgctgccgtggctgagcagcgtgttccgcagcttcagcgacgaggaggagctgactgggcgcctggcacaggcccggggggcggccaagaaagctggcctcctcatggccctggccaggctctgcttcctcctggggcggctgtgcagcaggaggctcaagctgtcccaggcccgggtgtactttgaggaagcgctgggggccctggagggcagcttcggggacctgttcctggtggtggctgtgtacgccaacctggccagcatttaccggaagcagaagaaccgggagaagtgtgcacaggtggtgcccaaagccatggccctgctcctggggacgcccgaccacatctgcagcaccgaggcggagggggccccacagcctccctgcccagacttcccactacctcaggcaagcgctggcctccctgaccccgggcacaggccaggcgctgtgcggccccctctacaccagcttggcccagctgtacagccaccatggctgccacggcccggccatcaccttcatgacgcaggcagtggaagccagtgctattgccggagtccgtgccatcgtggaccacctggtggccctggcctggctgcacgtgcttcatgggcagagcccggtggccctggacatcctgcagtctgtccgggatgcagtggtggccagcgaggaccaggagggcgtgattgccaacatggtggccgtggctctgaagaggacgggccggacgaggcaggcagctgagagctactaccgcgccctgcgggtggctcgggacctgggccagcaaaggaaccaggcagtggggctggccaacttcggggccctgtgcctgcatgcgggtgccagcaggctggcccagcactacctcctggaggccgtgcggctgttctcgaggctgccccttggggagtgtggccgggacttcacccacgtgctcctgcagctgggccatctctgcacccgccagggcccggcccagcagggcaagggctactacgagtgggcccttctggtcgccgtggagatgggccacgtggagagccagctgcgggccgtccagcggctgtgccacttctacagcgccgtcatgcccagcgaggcccagtgtgtcatctaccatgagctccagctctccctggcctgcaaggtggccgacaaggtgctggaggggcagctcctggagaccatcagccagctctacctgtccctgggcaccgagcgggcccagtgacattgctgcactcacaccccttcgactcaccaagagagcagggaaggagccggattccacagggacccgggagatcggctccagccttggcctcaggttcacagcaggaaaatgggccagtgtgttagagccatgttctcaaagtgtggtccctggaccagcagagcagcatccatgtcacctaggagcttgtggcaagtgggagttctagggcccgccccaggcccgtggagccagaagctctgggggcaggccagcaagctatatggacaggcctctggatgactgtgatgcctgcgcaccttgagaaccatcggcctggatagcatctgaacactgatggctcctggtgcgtctagagaagacacaggccatgtctgggacgcgggggagatggactagcacgctcccccagccacagggcagcatgatgcccagttccctcagaaggatgtccttcatcttttccttgccgtgtgtgttcaaccccaccctctcagcagcccgggaagggcaggacactgcacacacaagagggccgttcccagtcccattccagattcatctgtcaccagacccacgggaggaggcagactggttccaggaggatgacagcccttgttctgacacctgtgtctgataccagggcctacaaatccgcactggactacaccaaacgaagtctggggattttcattgacctccagaagaaagagaaggaggcgcatgcctggctgcaagcagggaagatctattacatcttgcggcagagcgagctggtggacctctacatccaggtggcacagaacgtggccctgtacacaggcgaccccaacctggggctggagctgtttgaggcggctggagacatcttcttcgacggggcctgggagcgggagaaagctgtgtccttctaccgggaccgggccctgcccctggcagtgactacgggcaaccgcaaggcggagctgcggctgtgcaacaagctggtggcactgctggccacgctggaggagccccaggagggcttggagtttgcccacatggccctagcactcagcatcactctgggggaccggctgaacgagcgcgtggcctaccaccggctggccgccctgcaacaccgactgggccatggcgagctggcagagcacttctacctcaaggccctgtcgctctgcaactcgccgctggagtttgacgaggagaccctctactacgtgaaggtgtacctggtgctcggtgacatcatcttctacgacctgaaggacccgtttgatgcagccgggtactaccagctggcgctggcggccgccgtggacctgggcaacaagaaggcacagctgaagatctacacgcggctggccaccatctaccacaacttcctcctggaccgtgagaagtcgctcttcttctaccagaaggccaggaccttcgccacagagctcaacgtccgcagggtcaacctgcctcctctgccactctgcgggtgggccccctggttggcccccagccaccctcgctgaggacagcatccaagggagtgggttttgtgcaagggctgggggtctcctgcctctcctcgtgtcgccggtggctcattttctggcaaatggaggcacgaacgcaggggccaaatagcaataaatgggttttgttttttaaaaaaaaaaa

SEQ ID NO: 433629 - DNA, 797 bp, Homo sapiens
gtgggtgctgcgggaagcctgaccccacctgcctgtgtggcaggaccgggccctgcccctggcagtgactacgggcaaccgcaaggcggagctgcggctgtgcaacaagctggtggcactgctggccacgctggaggagccccaggagggcttggagtttgcccacatggccctagcactcagcatcactctgggggaccggctgaacgagcgcgtggcctaccaccggctggccgccctgcaacaccgactgggccatggcgagctggcagagcacttctacctcaaggccctgtcgctctgcaactcgccgctggagtttgacgaggagaccctctactacgtgaaggtgtacctggtgctcggtgacatcatcttctacgacctgaaggacccgtttgatgcagccgggtactaccagctggcgctggcggccgccgtggacctgggcaacaagaaggcacagctgaagatctacacgcggctggccaccatctaccacaacttcctcctggaccgtgagaagtcgctcttcttctaccagaaggccaggaccttcgccacagagctcaacgtccgcagggtcaacctgcctcctctgccactctgcgggtgggccccctggttggcccccagccaccctcgctgaggacagcatccaagggagtgggttttgtgcaagggctgggggtctcctgcctctcctcgtgtcgccggtggctcattttctggcaaatggaggcacgaacgcaggggccaaatagcaataaatgggttttgttttttaaaaaaaaaaa

SEQ ID NO: 433630 - DNA, 4465 bp, Homo sapiens
ctggagacagccccgtggggccagccagcgctgggccaggagcggccacctggttcctgcgtgctacggccctgtgggcctgggagctgcctctgaggaacacgccgcagggccaggcatgtgaggtctctgcgggtcatggagaacctccctgccgtgaccactgaggagccgacccccatggggaggggtcctgtgggaccctcaggaggtggcagcacccgggaccaggtccggactgtggtcatgaggccctctgtgagctgggagaaagcggggcccgaggaggccaaggcgccagtgagaggcgagagacctggagcgtttggcgccttcagaggagccaggcctttgcttggtctcccctaatcctgggaacctgctgtgttgcagacgaggctcctcctgcccgcgtggctgggcctgctgctgggacccctccctgccagatgggggtttatcccacagacctgaccctgcagctgctggctgtgcggaggaagagcagactgcgggaccccggcctacagcagaccctccgggggccagctccgcctgctggagaatgatagccgggagatggcccgcgtgcttggggaattatcagccaggctgctgtccatccacagtgaccaggaccggatcgtggtgacgtttaagacttttgaagaaatctggaagttttccacctaccatgctctcggcttcactcatcactgcctggcaaacctgctcatggaccaggccttctggctgctcttgcccagtgaggaggaggagacggccatccaagtccatgtggatgagaacgccttaaggctgacccacgagagcctcctcatccaagaagggcccttctttgtcctgtgtcctgaccaccatgtgagagtgatgacgggtccccgggatgcaggaaatggcccccaggccctcaggcaggcttcgggggcaccccagggagaggcggccccggaaacagactcttcaccgccgagccccagcgtgtcctccgaggaggtggcagtggcggccgccccggagcctttgattccatttcatcagtgggctcttaggatcccccaggaccccatcgacgatgccatgggtggccctgtgatgcccggcaacccgctgatggctgtgggcctggcctcggcattggcagacttccagggctcggggcccgaagagatgaccttccgaggtggcgacctcatcgagatccttggggcgcaggtgcccagcctgccctggtgcgtgggccgacacgcagcctcgggccgggtggggtttgtgcggagcagcctcatcagcatgcagggccccgtgtccgagttggaaagtgcgatttttctcaatgaggaagaaaagtcattcttcagcgagggctgcttttctgaggaggatgccaggcagttgctgaggcggatgtcgggcaccgatgtctgcagcgtgtacagcctggactcagtagaggaagctgagaccgagcagccgcaggaaaaagaaatacctccaccttgcctgagcccggagccacaggagaccttgcagaaggtgaagaatgttctggaacaatgcaagacctgcccaggctgcccccaggagccagcgtcctggggtctctgtgcggcatccagcgacgtgagcttgcaggaccccgaggagccctccttctgcttggaagccgaggacgactgggaggacccagaggccctgagctcactgctgctgttcctgaacgcccctgggtacaaggccagcttccgtggcctgtacgatgtggcgctgccgtggctgagcagcgtgttccgcagcttcagcgacgaggaggagctgactgggcgcctggcacaggcccggggggcggccaagaaagctggcctcctcatggccctggccaggctctgcttcctcctggggcggctgtgcagcaggaggctcaagctgtcccaggcccgggtgtactttgaggaagcgctgggggccctggagggcagcttcggggacctgttcctggtggtggctgtgtacgccaacctggccagcatttaccggaagcagaagaaccgggagaagtgtgcacaggtggtgcccaaagccatggccctgctcctggggacgcccgaccacatctgcagcaccgaggcggagggggagctcctgcagctggcgctgcggcgggcggtgggtggccagagcctgcaggccgaggcccgggcctgcttcctgctggccaggcaccacgtgcacctcaagcagcccgaggaggccctgcccttcctagagcggctgctgcttttgcacagggactcgggagccccagaggccgcgtggctctcagactgctacctactcctggctgacatctacagccgcaagtgcctgccccacctggtgctgagctgtgtcaaggtggcctcattgcggacacggggctcgctggccggctcgctgaggagtgtgaacctggtgctccagaacgccccccagccccacagcctccctgcccagacttcccactacctcaggcaagcgctggcctccctgaccccgggcacaggccaggcgctgtgcggccccctctacaccagcttggcccagctgtacagccaccatggctgccacggcccggccatcaccttcatgacgcaggcagtggaagccagtgctattgccggagtccgtgccatcgtggaccacctggtggccctggcctggctgcacgtgcttcatgggcagagcccggtggccctggacatcctgcagtctgtccgggatgcagtggtggccagcgaggaccaggagggcgtgattgccaacatggtggccgtggctctgaagaggacgggccggacgaggcaggcagctgagagctactaccgcgccctgcgggtggctcgggacctgggccagcaaaggaaccaggcagtggggctggccaacttcggggccctgtgcctgcatgcgggtgccagcaggctggcccagcactacctcctggaggccgtgcggctgttctcgaggctgccccttggggagtgtggccgggacttcacccacgtgctcctgcagctgggccatctctgcacccgccagggcccggcccagcagggcaagggctactacgagtgggcccttctggtcgccgtggagatgggccacgtggagagccagctgcgggccgtccagcggctgtgccacttctacagcgccgtcatgcccagcgaggcccagtgtgtcatctaccatgagctccagctctccctggcctgcaaggtggccgacaaggtgctggaggggcagctcctggagaccatcagccagctctacctgtccctgggcaccgagcgggcccagtgacattgctgcactcacaccccttcgactcaccaagagagcagggaaggagccggattccacagggacccgggagatcggctccagccttggcctcaggttcacagcaggaaaatgggccagtgtgttagagccatgttctcaaagtgtggtccctggaccagcagagcagcatccatgtcacctaggagcttgtggcaagtgggagttctagggcccgccccaggcccgtggagccagaagctctgggggcaggccagcaagctatatggacaggcctctggatgactgtgatgcctgcgcaccttgagaaccatcggcctggatagcatctgaacactgatggctcctggtgcgtctagagaagacacaggccatgtctgggacgcgggggagatggactagcacgctcccccagccacagggcagcatgatgcccagttccctcagaaggatgtccttcatcttttccttgccgtgtgtgttcaaccccaccctctcagcagcccgggaagggcaggacactgcacacacaagagggccgttcccagtcccattccagattcatctgtcaccagacccacgggaggaggcagactggttccaggaggatgacagcccttgttctgacacctgtgtctgataccagggcctacaaatccgcactggactacaccaaacgaagtctggggattttcattgacctccagaagaaagagaaggaggcgcatgcctggctgcaagcagggaagatctattacatcttgcggcagagcgagctggtggacctctacatccaggtgagtgatgagggatgcaggagggcctctgcacatgttcactctccatccatccatccgtccattgatgatgatgatagatgatctttccatcatctatccatttacctgttcatccttccttccatccatccatccttccatcatctacccattcacctatgggtccttccatccatccatcatccatccatccatccttccattatccatccattcacctgttcatccatccatccatccatcatccatccatccatccttccattatccatccattcacctgttcgtcccgaactgagaca

SEQ ID NO: 433631 - DNA, 939 bp, Homo sapiens
tctgtgggttgcctggagccctggtgcccaggagcgcgtgggctgcatgccttttgggctctcctggttaaaaacagtgagcaaaggcaggtggctatatgtaggcacagagctgggccatccaagtccgactttgccaaagcctcacggtagatgggggcaggccttattagttctgctttgtagatgggaaagtgagtctgggagctgggaagggactggccagaactgcccaggtgaccgcagtgcctggaggcgagccaggtgctgccggggtctgcatgcctgccccggggagccacgtcctcacacctgcccccttggcctgcaccccaggggaccggctgaacgagcgcgtggcctaccaccggctggccgccctgcaacaccgactgggccatggcgagctggcagagcacttctacctcaaggccctgtcgctctgcaactcgccgctggagtttgacgaggagaccctctactacgtgaaggtgtacctggtgctcggtgacatcatcttctacgacctgaaggacccgtttgatgcagccgggtactaccagctggcgctggcggccgccgtggacctgggcaacaagaaggcacagctgaagatctacacgcggctggccaccatctaccacaacttcctcctggaccgtgagaagtcgctcttcttctaccagaaggccaggaccttcgccacagagctcaacgtccgcagggtcaacctgcctcctctgccactctgcgggtgggccccctggttggcccccagccaccctcgctgaggacagcatccaagggagtgggttttgtgcaagggctgggggtctcctgcctctcctcgtgtcgccggtggctcattttctggcaaatggaggcacgaacgcaggggccaaatagcaataaatgggttttgttttttaaaaaaaaaaa

SEQ ID NO: 433632 - DNA, 465 bp, Homo sapiens
caaggatgcagatataatgatgataaaattgaatcagactcagaaatggcttcttcccagccctgcctacaagtttttctctggggtcctctttcaaggatgtccacggtaccttcctcctgaaacttgaggaagtcttttgtcttccagctgctcagggttctctggtccaagaccctgctttaaagagagtctttggcgtgctcagactccagcgctccgttcttcaaggaggttgacttgcctctcgggccccgtaggtaccaagagactgtttacctcccagaatgtttgggcttgaagttacattaaagtgaagttatttgaaagaaagaaaacctcatcatttctaaggatgacttaattactgtgccttttcctttctttttacacatcctactgtcccttagggtaaaattttcagcattaaataaaacatttcaaatatattgtatatggctttag

SEQ ID NO: 433633 - DNA, 2837 bp, Homo sapiens
  misc_feature (45)..(45): n is a, c, g, or t
ttcggcggccccgactcgacccccccgggggaggacatctggaanaagtttgagctgcggcgggccgggcggcgggcggcgagcgggggaagatggcggagctggggaagaagtactgcgtgtactgcctggccgaggtgagcccgctgcgcttccgctgcaccgagtgccaggacatcgagctgtgccccgagtgcttctcggccggcgccgagatcggccaccaccgccgctaccacggctaccagctggtggacggcgggcgcttcacgctctgggggcccgaggccgagggcggctggaccagtcgcgaggagcagctgctgctggacgccatcgagcagttcggcttcggaaactgggaagatatggctgcccacgttggtgcttcccggactccccaagaggtgatggagcattacgtgagcatgtacatccacgggaacctggggaaggcctgcatccccgacaccatccccaaccgcgtgacagaccacacctgtcccagcggaggccccctctcacccagcctcaccaccccgctgcccccgctggacatctctgtggctgagcagcagcagctgggctacatgccgctgcgggatgattacgagatcgagtatgaccaggatgccgagacgctcatcagcgggctctctgtcaactatgatgacgacgacgtggagatcgagctgaagcgcgcccacgtggacatgtacgtgcggaagctgaaagagagacagcggcggaagaacatcgcccgtgactacaatctggtgccagccttcctggggaaggacaagaaggagaaggaaaaggcgctgaagcgcaagatcaccaaggaggagaaggagctgcgcctgaagctgaggccgctgtaccagttcatgtcatgcaaggagtttgatgacctttttgaaaacatgcacaaagaaaaaatgctccgggccaagatccgagaactgcagcggtaccggcgaaacgggatcaccaagatggaagagtcggcagagtacgaggcagcgcggcataaacgggagaaggtgctctgcagctctttaaacttgagtccagcccgctacgtgactgtgaagactattataattaaagaccacctccagaagcggcaaggaatcccctccaaaagccgccttcctagctacctggacaaagtcctaaagaaaaggattttgaatttcctcacagaaagcggctggatctccagggacgcgtcttgaagctgagacgctttgaaagccagggtgatgctcagacagtgtgccagccaaaatgacttgggggaggggagccgcttccccactgttgctcttttttaaacaaattgagttcctttttttaagatagaaattcttttcatggtcctctgaaagaagcaatagtaacaatcttatattggatcatgggggaagcaaatgtgtgtattttaagtgagttcctgcgagtcatacactgcgatgatgctccgcctttacccgttcagttgggagcttattgtgagattggatcatttccttttgagtgttcttctctttggtacaaaacctattgtgggtgacaggagcagtgttttcctgctggacccgcaagccaccagctatttcctggtgacacaagctcttctcaggcggggctgcctgcaggctcccgttttctgagcccacgctgcccacagctgaccccagcgcagccccgggcacgcggcactttacatgggggcagcttgggcccagactcctccgctgtgtagcagatgaggaaaatcaggccagaggacaacaggctggcgttttgttgggaactgaagaggaatctgttgaacacagcgaccagatgaccttccatttcaccggcggcagcagtttcagcgtgcagttcccaaaccccaaagctgaccctgcgccccatttgaatacggccagagcctgctggttcactttgggtagagccgtgcctcttgggcaggctcccatagtgaccacgtccccacgaatgggaaagcacgttagtgggagggacgtaggacacgtgtggaccgccaggccctctcagtccattttccggggctgctcggtgctgctgttaagacgtgagtgcatttcacttggaagaacccattgtacaaagttcaaggctaagagttctgaattctggcgtcagcttcctcaggattttcttcagttgcaagtacctttccactgaaaatatgagcatgcccgcctggctagtaggcatctgtaagagtgtcgccaggcccgcgccagctgaggcctcagactagccaggcaagagccgtctgaccagttggctggcggtggttctggtggagcacgagggagcccgggtggtgccctgagcctcgagctgctctctgtcactgtcttgaatcagactcagaaatggcttcttcccagccctgcctacaagtttttctctggggtcctctttcaaggatgtccacggtaccttcctcctgaaacttgaggaagtcttttgtcttccagctgctcagggttctctggtccaagaccctgctttaaagagagtctttggcgtgctcagactccagcgctccgttcttcaaggaggttgacttgcctctcgggccccgtaggtaccaagagactgtttacctcccagaatgtttgggcttgaagttacattaaagtgaagttatttgaaagaaagaaaacctcatcatttctaaggatgacttaattactgtgccttttcctttctttttacacatcctactgtcccttagggtaaaattttcagcattaaataaaacatttcaaatatattgtatatggctttag

SEQ ID NO: 433634 - DNA, 5037 bp, Homo sapiens
ctggagacagccccgtggggccagccagcgctgggccaggagcggccacctggttcctgcgtgctacggccctgtgggcctgggagctgcctctgaggaacacgccgcagggccaggcatgtgaggtctctgcgggtcatggagaacctccctgccgtgaccactgaggagccgacccccatggggaggggtcctgtgggaccctcaggaggtggcagcacccgggaccaggtccggactgtggtcatgaggccctctgtgagctgggagaaagcggggcccgaggaggccaaggcgccagtgagaggcgagagacctggagcgtttggcgccttcagaggagccaggcctttgcttggtctcccctaatcctgggaacctgctgtgttgcagacgaggctcctcctgcccgcgtggctgggcctgctgctgggacccctccctgccagatgggggtttatcccacagacctgaccctgcagctgctggctgtgcggaggaagagcagactgcgggaccccggcctacagcagaccctccgggggccagctccgcctgctggagaatgatagccgggagatggcccgcgtgcttggggaattatcagccaggctgctgtccatccacagtgaccaggaccggatcgtggtgacgtttaagacttttgaagaaatctggaagttttccacctaccatgctctcggcttcactcatcactgcctggcaaacctgctcatggaccaggccttctggctgctcttgcccagtgaggaggaggagacggccatccaagtccatgtggatgagaacgccttaaggctgacccacgagagcctcctcatccaagaagggcccttctttgtcctgtgtcctgaccaccatgtgagagtgatgacgggtccccgggatgcaggaaatggcccccaggccctcaggcaggcttcgggggcaccccagggagaggcggccccggaaacagactcttcaccgccgagccccagcgtgtcctccgaggaggtggcagtggcggccgccccggagcctttgattccatttcatcagtgggctcttaggatcccccaggaccccatcgacgatgccatgggtggccctgtgatgcccggcaacccgctgatggctgtgggcctggcctcggcattggcagacttccagggctcggggcccgaagagatgaccttccgaggtggcgacctcatcgagatccttggggcgcaggtgcccagcctgccctggtgcgtgggccgacacgcagcctcgggccgggtggggtttgtgcggagcagcctcatcagcatgcagggccccgtgtccgagttggaaagtgcgatttttctcaatgaggaagaaaagtcattcttcagcgagggctgcttttctgaggaggatgccaggcagttgctgaggcggatgtcgggcaccgatgtctgcagcgtgtacagcctggactcagtagaggaagctgagaccgagcagccgcaggaaaaagaaatacctccaccttgcctgagcccggagccacaggagaccttgcagaaggtgaagaatgttctggaacaatgcaagacctgcccaggctgcccccaggagccagcgtcctggggtctctgtgcggcatccagcgacgtgagcttgcaggaccccgaggagccctccttctgcttggaagccgaggacgactgggaggacccagaggccctgagctcactgctgctgttcctgaacgcccctgggtacaaggccagcttccgtggcctgtacgatgtggcgctgccgtggctgagcagcgtgttccgcagcttcagcgacgaggaggagctgactgggcgcctggcacaggcccggggggcggccaagaaagctggcctcctcatggccctggccaggctctgcttcctcctggggcggctgtgcagcaggaggctcaagctgtcccaggcccgggtgtactttgaggaagcgctgggggccctggagggcagcttcggggacctgttcctggtggtggctgtgtacgccaacctggccagcatttaccggaagcagaagaaccgggagaagtgtgcacaggtggtgcccaaagccatggccctgctcctggggacgcccgaccacatctgcagcaccgaggcggagggggagctcctgcagctggcgctgcggcgggcggtgggtggccagagcctgcaggccgaggcccgggcctgcttcctgctggccaggcaccacgtgcacctcaagcagcccgaggaggccctgcccttcctagagcggctgctgcttttgcacagggactcgggagccccagaggccgcgtggctctcagactgctacctactcctggctgacatctacagccgcaagtgcctgccccacctggtgctgagctgtgtcaaggtggcctcattgcggacacggggctcgctggccggctcgctgaggagtgtgaacctggtgctccagaacgccccccagccccacagcctccctgcccagacttcccactacctcaggcaagcgctggcctccctgaccccgggcacaggccaggcgctgtgcggccccctctacaccagcttggcccagctgtacagccaccatggctgccacggcccggccatcaccttcatgacgcaggcagtggaagccagtgctattgccggagtccgtgccatcgtggaccacctggtggccctggcctggctgcacgtgcttcatgggcagagcccggtggccctggacatcctgcagtctgtccgggatgcagtggtggccagcgaggaccaggagggcgtgattgccaacatggtggccgtggctctgaagaggacgggccggacgaggcaggcagctgagagctactaccgcgccctgcgggtggctcgggacctgggccagcaaaggaaccaggcagtggggctggccaacttcggggccctgtgcctgcatgcgggtgccagcaggctggcccagcactacctcctggaggccgtgcggctgttctcgaggctgccccttggggagtgtggccgggacttcacccacgtgctcctgcagctgggccatctctgcacccgccagggcccggcccagcagggcaagggctactacgagtgggcccttctggtcgccgtggagatgggccacgtggagagccagctgcgggccgtccagcggctgtgccacttctacagcgccgtcatgcccagcgaggcccagtgtgtcatctaccatgagctccagctctccctggcctgcaaggtggccgacaaggtgctggaggggcagctcctggagaccatcagccagctctacctgtccctgggcaccgagcgggcccagtgacattgctgcactcacaccccttcgactcaccaagagagcagggaaggagccggattccacagggacccgggagatcggctccagccttggcctcaggttcacagcaggaaaatgggccagtgtgttagagccatgttctcaaagtgtggtccctggaccagcagagcagcatccatgtcacctaggagcttgtggcaagtgggagttctagggcccgccccaggcccgtggagccagaagctctgggggcaggccagcaagctatatggacaggcctctggatgactgtgatgcctgcgcaccttgagaaccatcggcctggatagcatctgaacactgatggctcctggtgcgtctagagaagacacaggccatgtctgggacgcgggggagatggactagcacgctcccccagccacagggcagcatgatgcccagttccctcagaaggatgtccttcatcttttccttgccgtgtgtgttcaaccccaccctctcagcagcccgggaagggcaggacactgcacacacaagagggccgttcccagtcccattccagattcatctgtcaccagacccacgggaggaggcagactggttccaggaggatgacagcccttgttctgacacctgtgtctgataccagggcctacaaatccgcactggactacaccaaacgaagtctggggattttcattgacctccagaagaaagagaaggaggcgcatgcctggctgcaagcagggaagatctattacatcttgcggcagagcgagctggtggacctctacatccaggtggcacagaacgtggccctgtacacaggcgaccccaacctggggctggagctgtttgaggcggctggagacatcttcttcgacggggcctgggagcgggagaaagctgtgtccttctaccgggaccgggccctgcccctggcagtgactacgggcaaccgcaaggcggagctgcggctgtgcaacaagctggtggcactgctggccacgctggaggagccccaggagggcttggagtttgcccacatggccctagcactcagcatcactctgggggaccggctgaacgagcgcgtggcctaccaccggctggccgccctgcaacaccgactgggccatggcgagctggcagagcacttctacctcaaggccctgtcgctctgcaactcgccgctggagtttgacgaggagaccctctactacgtgaaggtgtacctggtgctcggtgacatcatcttctacgacctgaaggacccgtttgatgcagccgggtactaccagctggcgctggcggccgccgtggacctgggcaacaagaaggcacagctgaagatctacacgcggctggccaccatctaccacaacttcctcctggaccgtgagaagtcgctcttcttctaccagaaggccaggaccttcgccacagagctcaacgtccgcagggtcaacctgcctcctctgccactctgcgggtgggccccctggttggcccccagccaccctcgctgaggacagcatccaagggagtgggttttgtgcaagggctgggggtctcctgcctctcctcgtgtcgccggtggctcattttctggcaaatggaggcacgaacgcaggggccaaatagcaataaatgggttttgttttttaaaaaaaaaaa

SEQ ID NO: 433635 - DNA, 4740 bp, Homo sapiens
ctggagacagccccgtggggccagccagcgctgggccaggagcggccacctggttcctgcgtgctacggccctgtgggcctgggagctgcctctgaggaacacgccgcagggccaggcatgtgaggtctctgcgggtcatggagaacctccctgccgtgaccactgaggagccgacccccatggggaggggtcctgtgggaccctcaggaggtggcagcacccgggaccaggtccggactgtggtcatgaggccctctgtgagctgggagaaagcggggcccgaggaggccaaggcgccagtgagaggcgagagacctggagcgtttggcgccttcagaggagccaggcctttgcttggtctcccctaatcctgggaacctgctgtgttgcagacgaggctcctcctgcccgcgtggctgggcctgctgctgggacccctccctgccagatgggggtttatcccacagacctgaccctgcagctgctggctgtgcggaggaagagcagactgcgggaccccggcctacagcagaccctccgggggccagctccgcctgctggagaatgatagccgggagatggcccgcgtgcttggggaattatcagccaggctgctgtccatccacagtgaccaggaccggatcgtggtgacgtttaagacttttgaagaaatctggaagttttccacctaccatgctctcggcttcactcatcactgcctggcaaacctgctcatggaccaggccttctggctgctcttgcccagtgaggaggaggagacggccatccaagtccatgtggatgagaacgccttaaggctgacccacgagagcctcctcatccaagaagggcccttctttgtcctgtgtcctgaccaccatgtgagagtgatgacgggtccccgggatgcaggaaatggcccccaggccctcaggcaggcttcgggggcaccccagggagaggcggccccggaaacagactcttcaccgccgagccccagcgtgtcctccgaggaggtggcagtggcggccgccccggagcctttgattccatttcatcagtgggctcttaggatcccccaggaccccatcgacgatgccatgggtggccctgtgatgcccggcaacccgctgatggctgtgggcctggcctcggcattggcagacttccagggctcggggcccgaagagatgaccttccgaggtggcgacctcatcgagatccttggggcgcaggtgcccagcctgccctggtgcgtgggccgacacgcagcctcgggccgggtggggtttgtgcggagcagcctcatcagcatgcagggccccgtgtccgagttggaaagtgcgatttttctcaatgaggaagaaaagtcattcttcagcgagggctgcttttctgaggaggatgccaggcagttgctgaggcggatgtcgggcaccgatgtctgcagcgtgtacagcctggactcagtagaggaagctgagaccgagcagccgcaggaaaaagaaatacctccaccttgcctgagcccggagccacaggagaccttgcagaaggtgaagaatgttctggaacaatgcaagacctgcccaggctgcccccaggagccagcgtcctggggtctctgtgcggcatccagcgacgtgagcttgcaggaccccgaggagccctccttctgcttggaagccgaggacgactgggaggacccagaggccctgagctcactgctgctgttcctgaacgcccctgggtacaaggccagcttccgtggcctgtacgatgtggcgctgccgtggctgagcagcgtgttccgcagcttcagcgacgaggaggagctgactgggcgcctggcacaggcccggggggcggccaagaaagctggcctcctcatggccctggccaggctctgcttcctcctggggcggctgtgcagcaggaggctcaagctgtcccaggcccgggtgtactttgaggaagcgctgggggccctggagggcagcttcggggacctgttcctggtggtggctgtgtacgccaacctggccagcatttaccggaagcagaagaaccgggagaagtgtgcacaggtggtgcccaaagccatggccctgctcctggggacgcccgaccacatctgcagcaccgaggcggagggggagctcctgcagctggcgctgcggcgggcggtgggtggccagagcctgcaggccgaggcccgggcctgcttcctgctggccaggcaccacgtgcacctcaagcagcccgaggaggccctgcccttcctagagcggctgctgcttttgcacagggactcgggagccccagaggccgcgtggctctcagactgctacctactcctggctgacatctacagccgcaagtgcctgccccacctggtgctgagctgtgtcaaggtggcctcattgcggacacggggctcgctggccggctcgctgaggagtgtgaacctggtgctccagaacgccccccagccccacagcctccctgcccagacttcccactacctcaggcaagcgctggcctccctgaccccgggcacaggccaggcgctgtgcggccccctctacaccagcttggcccagctgtacagccaccatggctgccacggcccggccatcaccttcatgacgcaggcagtggaagccagtgctattgccggagtccgtgccatcgtggaccacctggtggccctggcctggctgcacgtgcttcatgggcagagcccggtggccctggacatcctgcagtctgtccgggatgcagtggtggccagcgaggaccaggagggcgtgattgccaacatggtggccgtggctctgaagaggacgggccggacgaggcaggcagctgagagctactaccgcgccctgcgggtggctcgggacctgggccagcaaaggaaccaggcagtggggctggccaacttcggggccctgtgcctgcatgcgggtgccagcaggctggcccagcactacctcctggaggccgtgcggctgttctcgaggctgccccttggggagtgtggccgggacttcacccacgtgctcctgcagctgggccatctctgcacccgccagggcccggcccagcagggcaagggctactacgagtgggcccttctggtcgccgtggagatgggccacgtggagagccagctgcgggccgtccagcggctgtgccacttctacagcgccgtcatgcccagcgaggcccagtgtgtcatctaccatgagctccagctctccctggcctgcaaggtggccgacaaggtgctggaggggcagctcctggagaccatcagccagctctacctgtccctgggcaccgagcgggcccagtgacattgctgcactcacaccccttcgactcaccaagagagcagggaaggagccggattccacagggacccgggagatcggctccagccttggcctcaggttcacagcaggaaaatgggccagtgtgttagagccatgttctcaaagtgtggtccctggaccagcagagcagcatccatgtcacctaggagcttgtggcaagtgggagttctagggcccgccccaggcccgtggagccagaagctctgggggcaggccagcaagctatatggacaggcctctggatgactgtgatgcctgcgcaccttgagaaccatcggcctggatagcatctgaacactgatggctcctgggcctacaaatccgcactggactacaccaaacgaagtctggggattttcattgacctccagaagaaagagaaggaggcgcatgcctggctgcaagcagggaagatctattacatcttgcggcagagcgagctggtggacctctacatccaggtggcacagaacgtggccctgtacacaggcgaccccaacctggggctggagctgtttgaggcggctggagacatcttcttcgacggggcctgggagcgggagaaagctgtgtccttctaccgggaccgggccctgcccctggcagtgactacgggcaaccgcaaggcggagctgcggctgtgcaacaagctggtggcactgctggccacgctggaggagccccaggagggcttggagtttgcccacatggccctagcactcagcatcactctgggggaccggctgaacgagcgcgtggcctaccaccggctggccgccctgcaacaccgactgggccatggcgagctggcagagcacttctacctcaaggccctgtcgctctgcaactcgccgctggagtttgacgaggagaccctctactacgtgaaggtgtacctggtgctcggtgacatcatcttctacgacctgaaggacccgtttgatgcagccgggtactaccagctggcgctggcggccgccgtggacctgggcaacaagaaggcacagctgaagatctacacgcggctggccaccatctaccacaacttcctcctggaccgtgagaagtcgctcttcttctaccagaaggccaggaccttcgccacagagctcaacgtccgcagggtcaacctgcctcctctgccactctgcgggtgggccccctggttggcccccagccaccctcgctgaggacagcatccaagggagtgggttttgtgcaagggctgggggtctcctgcctctcctcgtgtcgccggtggctcattttctggcaaatggaggcacgaacgcaggggccaaatagcaataaatgggttttgttttttaaaaaaaaaaa

SEQ ID NO: 433636 - DNA, 4886 bp, Homo sapiens
ctggagacagccccgtggggccagccagcgctgggccaggagcggccacctggttcctgcgtgctacggccctgtgggcctgggagctgcctctgaggaacacgccgcagggccaggcatgtgaggtctctgcgggtcatggagaacctccctgccgtgaccactgaggagccgacccccatggggaggggtcctgtgggaccctcaggaggtggcagcacccgggaccaggtccggactgtggtcatgaggccctctgtgagctgggagaaagcggggcccgaggaggccaaggcgccagtgagaggcgagagacctggagcgtttggcgccttcagaggagccaggcctttgcttggtctcccctaatcctgggaacctgctgtgttgcagacgaggctcctcctgcccgcgtggctgggcctgctgctgggacccctccctgccagatgggggtttatcccacagacctgaccctgcagctgctggctgtgcggaggaagagcagactgcgggaccccggcctacagcagaccctccgggggccagctccgcctgctggagaatgatagccgggagatggcccgcgtgcttggggaattatcagccaggctgctgtccatccacagtgaccaggaccggatcgtggtgacgtttaagacttttgaagaaatctggaagttttccacctaccatgctctcggcttcactcatcactgcctggcaaacctgctcatggaccaggccttctggctgctcttgcccagtgaggaggaggagacggccatccaagtccatgtggatgagaacgccttaaggctgacccacgagagcctcctcatccaagaagggcccttctttgtcctgtgtcctgaccaccatgtgagagtgatgacgggtccccgggatgcaggaaatggcccccaggccctcaggcaggcttcgggggcaccccagggagaggcggccccggaaacagactcttcaccgccgagccccagcgtgtcctccgaggaggtggcagtggcggccgccccggagcctttgattccatttcatcagtgggctcttaggatcccccaggaccccatcgacgatgccatgggtggccctgtgatgcccggcaacccgctgatggctgtgggcctggcctcggcattggcagacttccagggctcggggcccgaagagatgaccttccgaggtggcgacctcatcgagatccttggggcgcaggtgcccagcctgccctggtgcgtgggccgacacgcagcctcgggccgggtggggtttgtgcggagcagcctcatcagcatgcagggccccgtgtccgagttggaaagtgcgatttttctcaatgaggaagaaaagtcattcttcagcgagggctgcttttctgaggaggatgccaggcagttgctgaggcggatgtcgggcaccgatgtctgcagcgtgtacagcctggactcagtagaggaagctgagaccgagcagccgcaggaaaaagaaatacctccaccttgcctgagcccggagccacaggagaccttgcagaaggtgaagaatgttctggaacaatgcaagacctgcccaggctgcccccaggagccagcgtcctggggtctctgtgcggcatccagcgacgtgagcttgcaggaccccgaggagccctccttctgcttggaagccgaggacgactgggaggacccagaggccctgagctcactgctgctgttcctgaacgcccctgggtacaaggccagcttccgtggcctgtacgatgtggcgctgccgtggctgagcagcgtgttccgcagcttcagcgacgaggaggagctgactgggcgcctggcacaggcccggggggcggccaagaaagctggcctcctcatggccctggccaggctctgcttcctcctggggcggctgtgcagcaggaggctcaagctgtcccaggcccgggtgtactttgaggaagcgctgggggccctggagggcagcttcggggacctgttcctggtggtggctgtgtacgccaacctggccagcatttaccggaagcagaagaaccgggagaagtgtgcacaggtggtgcccaaagccatggccctgctcctggggacgcccgaccacatctgcagcaccgaggcggagggggagctcctgcagctggcgctgcggcgggcggtgggtggccagagcctgcaggccgaggcccgggcctgcttcctgctggccaggcaccacgtgcacctcaagcagcccgaggaggccctgcccttcctagagcggctgctgcttttgcacagggactcgggagccccagaggccgcgtggctctcagactgctacctactcctggctgacatctacagccgcaagtgcctgccccacctggtgctgagctgtgtcaaggtggcctcattgcggacacggggctcgctggccggctcgctgaggagtgtgaacctggtgctccagaacgccccccagccccacagcctccctgcccagacttcccactacctcaggcaagcgctggcctccctgaccccgggcacaggccaggcgctgtgcggccccctctacaccagcttggcccagctgtacagccaccatggctgccacggcccggccatcaccttcatgacgcaggcagtggaagccagtgctattgccggagtccgtgccatcgtggaccacctggtggccctggcctggctgcacgtgcttcatgggcagagcccggtggccctggacatcctgcagtctgtccgggatgcagtggtggccagcgaggaccaggagggcgtgattgccaacatggtggccgtggctctgaagaggacgggccggacgaggcaggcagctgagagctactaccgcgccctgcgggtggctcgggacctgggccagcaaaggaaccaggcagtggggctggccaacttcggggccctgtgcctgcatgcgggtgccagcaggctggcccagcactacctcctggaggccgtgcggctgttctcgaggctgccccttggggagtgtggccgggacttcacccacgtgctcctgcagctgggccatctctgcacccgccagggcccggcccagcagggcaagggctactacgagtgggcccttctggtcgccgtggagatgggccacgtggagagccagctgcgggccgtccagcggctgtgccacttctacagcgccgtcatgcccagcgaggcccagtgtgtcatctaccatgagctccagctctccctggcctgcaaggtggccgacaaggtgctggaggggcagctcctggagaccatcagccagctctacctgtccctgggcaccgagcgggcccagtgacattgctgcactcacaccccttcgactcaccaagagagcagggaaggagccggattccacagggacccgggagatcggctccagccttggcctcaggttcacagcaggaaaatgggccagtgtgttagagccatgttctcaaagtgtggtccctggaccagcagagcagcatccatgtcacctaggagcttgtggcaagtgggagttctagggcccgccccaggcccgtggagccagaagctctgggggcaggccagcaagctatatggacaggcctctggatgactgtgatgcctgcgcaccttgagaaccatcggcctggatagcatctgaacactgatggctcctggtgcgtctagagaagacacaggccatgtctgggacgcgggggagatggactagcacgctcccccagccacagggcagcatgatgcccagttccctcagaaggatgtccttcatcttttccttgccgtgtgtgttcaaccccaccctctcagcagcccgggaagggcaggacactgcacacacaagagggccgttcccagtcccattccagattcatctgtcaccagacccacgggaggaggcagactggttccaggaggatgacagcccttgttctgacacctgtgtctgataccagggcctacaaatccgcactggactacaccaaacgaagtctggggattttcattgacctccagaagaaagagaaggaggcgcatgcctggctgcaagcagggaagatctattacatcttgcggcagagcgagctggtggacctctacatccaggtggcacagaacgtggccctgtacacaggcgaccccaacctggggctggagctgtttgaggcggctggagacatcttcttcgacggggcctgggagcgggagaaagctgtgtccttctaccgggggaccggctgaacgagcgcgtggcctaccaccggctggccgccctgcaacaccgactgggccatggcgagctggcagagcacttctacctcaaggccctgtcgctctgcaactcgccgctggagtttgacgaggagaccctctactacgtgaaggtgtacctggtgctcggtgacatcatcttctacgacctgaaggacccgtttgatgcagccgggtactaccagctggcgctggcggccgccgtggacctgggcaacaagaaggcacagctgaagatctacacgcggctggccaccatctaccacaacttcctcctggaccgtgagaagtcgctcttcttctaccagaaggccaggaccttcgccacagagctcaacgtccgcagggtcaacctgcctcctctgccactctgcgggtgggccccctggttggcccccagccaccctcgctgaggacagcatccaagggagtgggttttgtgcaagggctgggggtctcctgcctctcctcgtgtcgccggtggctcattttctggcaaatggaggcacgaacgcaggggccaaatagcaataaatgggttttgttttttaaaaaaaaaaa

SEQ ID NO: 433637 - DNA, 1410 bp, Homo sapiens
atctagaggatacccactctgaccgattcctgcgagtcatacactgcgatgatgctccgcctttacccgttcagttgggagcttattgtgagattggatcatttccttttgagtgttcttctctttggtacaaaacctattgtgggtgacaggagcagtgttttcctgctggacccgcaagccaccagctatttcctggtgacacaagctcttctcaggcggggctgcctgcaggctcccgttttctgagcccacgctgcccacagctgaccccagcgcagccccgggcacgcggcactttacatgggggcagcttgggcccagactcctccgctgtgtagcagatgaggaaaatcaggccagaggacaacaggctggcgttttgttgggaactgaagaggaatctgttgaacacagcgaccagatgaccttccatttcaccggcggcagcagtttcagcgtgcagttcccaaaccccaaagctgaccctgcgccccatttgaatacggccagagcctgctggttcactttgggtagagccgtgcctcttgggcaggctcccatagtgaccacgtccccacgaatgggaaagcacgttagtgggagggacgtaggacacgtgtggaccgccaggccctctcagtccattttccggggctgctcggtgctgctgttaagacgtgagtgcatttcacttggaagaacccattgtacaaagttcaaggctaagagttctgaattctggcgtcagcttcctcaggattttcttcagttgcaagtacctttccactgaaaatatgagcatgcccgcctggctagtaggcatctgtaagagtgtcgccaggcccgcgccagctgaggcctcagactagccaggcaagagccgtctgaccagttggctggcggtggttctggtggagcacgagggagcccgggtggtgccctgagcctcgagctgctctctgtcactgtcttgaatcagactcagaaatggcttcttcccagccctgcctacaagtttttctctggggtcctctttcaaggatgtccacggtaccttcctcctgaaacttgaggaagtcttttgtcttccagctgctcagggttctctggtccaagaccctgctttaaagagagtctttggcgtgctcagactccagcgctccgttcttcaaggaggttgacttgcctctcgggccccgtaggtaccaagagactgtttacctcccagaatgtttgggcttgaagttacattaaagtgaagttatttgaaagaaagaaaacctcatcatttctaaggatgacttaattactgtgccttttcctttctttttacacatcctactgtcccttagggtaaaattttcagcattaaataaaacatttcaaatatattgtatatggctttag

SEQ ID NO: 433638 - DNA, 2295 bp, Homo sapiens
gcctcacctgcagctgcgcctccttgcacctgcgcctgtgctttttctcccagcactgcggacgcgactcgagggtgacgctcgctccgctcgtcccgctcgtcatggcctacccgggatacggaggaggggccagctgcgggccgtccagcggctgtgccacttctacagcgccgtcatgcccagcgaggcccagtgtgtcatctaccatgagctccagctctccctggcctgcaaggtggccgacaaggtgctggaggggcagctcctggagaccatcagccagctctacctgtccctgggcaccgagcggtcatctcaaccccagcagaagcagttacatgcattctgggctgttcttcctacctggtggcttttgtcatctgacctctgcctgccccgagtcttcactcctggccttcacctgtccccttaaatgtgaccacagcagccacctgtggcttctctcccacagaagacagagccagttgtgtcacctgcttccctggggcagggtttcaaggtctcacatcccacatgtggcccacttggctctcctggagcatcctgacctggtggggtaaccatggccctggccaccccacccacagggcccagtgacattgctgcactcacaccccttcgactcaccaagagagcagggaaggagccggattccacagggacccgggagatcggctccagccttggcctcaggttcacagcaggaaaatgggccagtgtgttagagccatgttctcaaagtgtggtccctggaccagcagagcagcatccatgtcacctaggagcttgtggcaagtgggagttctagggcccgccccaggcccgtggagccagaagctctgggggcaggccagcaagctatatggacaggcctctggatgactgtgatgcctgcgcaccttgagaaccatcggcctggatagcatctgaacactgatggctcctggtgcgtctagagaagacacaggccatgtctgggacgcgggggagatggactagcacgctcccccagccacagggcagcatgatgcccagttccctcagaaggatgtccttcatcttttccttgccgtgtgtgttcaaccccaccctctcagcagcccgggaagggcaggacactgcacacacaagagggccgttcccagtcccattccagattcatctgtcaccagacccacgggaggaggcagactggttccaggaggatgacagcccttgttctgacacctgtgtctgataccagggcctacaaatccgcactggactacaccaaacgaagtctggggattttcattgacctccagaagaaagagaaggaggcgcatgcctggctgcaagcagggaagatctattacatcttgcggcagagcgagctggtggacctctacatccaggtggcacagaacgtggccctgtacacaggcgaccccaacctggggctggagctgtttgaggcggctggagacatcttcttcgacggggcctgggagcgggagaaagctgtgtccttctaccgggaccgggccctgcccctggcagtgactacgggcaaccgcaaggcggagctgcggctgtgcaacaagctggtggcactgctggccacgctggaggagccccaggagggcttggagtttgcccacatggccctagcactcagcatcactctgggggaccggctgaacgagcgcgtggcctaccaccggctggccgccctgcaacaccgactgggccatggcgagctggcagagcacttctacctcaaggccctgtcgctctgcaactcgccgctggagtttgacgaggagaccctctactacgtgaaggtgtacctggtgctcggtgacatcatcttctacgacctgaaggacccgtttgatgcagccgggtactaccagctggcgctggcggccgccgtggacctgggcaacaagaaggcacagctgaagatctacacgcggctggccaccatctaccacaacttcctcctggaccgtgagaagtcgctcttcttctaccagaaggccaggaccttcgccacagagctcaacgtccgcagggtcaacctgcctcctctgccactctgcgggtgggccccctggttggcccccagccaccctcgctgaggacagcatccaagggagtgggttttgtgcaagggctgggggtctcctgcctctcctcgtgtcgccggtggctcattttctggcaaatggaggcacgaacgcaggggccaaatagcaataaatgggttttgttttttaaaaaaaaaaa

SEQ ID NO: 433639 - DNA, 4320 bp, Homo sapiens
ctggagacagccccgtggggccagccagcgctgggccaggagcggccacctggttcctgcgtgctacggccctgtgggcctgggagctgcctctgaggaacacgccgcagggccaggcatgtgaggtctctgcgggtcatggagaacctccctgccgtgaccactgaggagccgacccccatggggaggggtcctgtgggaccctcaggaggtggcagcacccgggaccaggtccggactgtggtcatgaggccctctgtgagctgggagaaagcggggcccgaggaggccaaggcgccagtgagaggcgagagacctggagcgtttggcgccttcagaggagccaggcctttgcttggtctcccctaatcctgggaacctgctgtgttgcagacgaggctcctcctgcccgcgtggctgggcctgctgctgggacccctccctgccagatgggggtttatcccacagacctgaccctgcagctgctggctgtgcggaggaagagcagactgcgggaccccggcctacagcagaccctccgggggccagctccgcctgctggagaatgatagccgggagatggcccgcgtgcttggggaattatcagccaggctgctgtccatccacagtgaccaggaccggatcgtggtgacgtttaagacttttgaagaaatctggaagttttccacctaccatgctctcggcttcactcatcactgcctggcaaacctgctcatggaccaggccttctggctgctcttgcccagtgaggaggaggagacggccatccaagtccatgtggatgagaacgccttaaggctgacccacgagagcctcctcatccaagaagggcccttctttgtcctgtgtcctgaccaccatgtgagagtgatgacgggtccccgggatgcaggaaatggcccccaggccctcaggcaggcttcgggggcaccccagggagaggcggccccggaaacagactcttcaccgccgagccccagcgtgtcctccgaggaggtggcagtggcggccgccccggagcctttgattccatttcatcagtgggctcttaggatcccccaggaccccatcgacgatgccatgggtggccctgtgatgcccggcaacccgctgatggctgtgggcctggcctcggcattggcagacttccagggctcggggcccgaagagatgaccttccgaggtggcgacctcatcgagatccttggggcgcaggtgcccagcctgccctggtgcgtgggccgacacgcagcctcgggccgggtggggtttgtgcggagcagcctcatcagcatgcagggccccgtgtccgagttggaaagtgcgatttttctcaatgaggaagaaaagtcattcttcagcgagggctgcttttctgaggaggatgccaggcagttgctgaggcggatgtcgggcaccgatgtctgcagcgtgtacagcctggactcagtagaggaagctgagaccgagcagccgcaggaaaaagaaatacctccaccttgcctgagcccggagccacaggagaccttgcagaaggtgaagaatgttctggaacaatgcaagacctgcccaggctgcccccaggagccagcgtcctggggtctctgtgcggcatccagcgacgtgagcttgcaggaccccgaggagccctccttctgcttggaagccgaggacgactgggaggacccagaggccctgagctcactgctgctgttcctgaacgcccctgggtacaaggccagcttccgtggcctgtacgatgtggcgctgccgtggctgagcagcgtgttccgcagcttcagcgacgaggaggagctgactgggcgcctggcacaggcccggggggcggccaagaaagctggcctcctcatggccctggccaggctctgcttcctcctggggcggctgtgcagcaggaggctcaagctgtcccaggcccgggtgtactttgaggaagcgctgggggccctggagggcagcttcggggacctgttcctggtggtggctgtgtacgccaacctggccagcatttaccggaagcagaagaaccgggagaagtgtgcacaggtggtgcccaaagccatggccctgctcctggggacgcccgaccacatctgcagcaccgaggcggagggggagctcctgcagctggcgctgcggcgggcggtgggtggccagagcctgcaggccgaggcccgggcctgcttcctgctggccaggcaccacgtgcacctcaagcagcccgaggaggccctgcccttcctagagcggctgctgcttttgcacagggactcgggagccccagaggccgcgtggctctcagactgctacctactcctggctgacatctacagccgcaagtgcctgccccacctggtgctgagctgtgtcaaggtggcctcattgcggacacggggctcgctggccggctcgctgaggagtgtgaacctggtgctccagaacgccccccagccccacagcctccctgcccagacttcccactacctcaggcaagcgctggcctccctgaccccgggcacaggccaggcgctgtgcggccccctctacaccagcttggcccagctgtacagccaccatggctgccacggcccggccatcaccttcatgacgcaggcagtggaagccagtgctattgccggagtccgtgccatcgtggaccacctggtggccctggcctggctgcacgtgcttcatgggcagagcccggtggccctggacatcctgcagtctgtccgggatgcagtggtggccagcgaggaccaggagggcgtgattgccaacatggtggccgtggctctgaagaggacgggccggacgaggcaggcagctgagagctactaccgcgccctgcgggtggctcgggacctgggccagcaaaggaaccaggcagtggggctggccaacttcggggccctgtgcctgcatgcgggtgccagcaggctggcccagcactacctcctggaggccgtgcggctgttctcgaggctgccccttggggagtgtggccgggacttcacccacgtgctcctgcagctgggccatctctgcacccgccagggcccggcccagcagggcaagggctactacgagtgggcccttctggtcgccgtggagatgggccacgtggagagccagctgcgggccgtccagcggctgtgccacttctacagcgccgtcatgcccagcgaggcccagtgtgtcatctaccatgagctccagctctccctggcctgcaaggtggccgacaaggtgctggaggggcagctcctggagaccatcagccagctctacctgtccctgggcaccgagcgggcccagtgacattgctgcactcacaccccttcgactcaccaagagagcagggaaggagccggattccacagggacccgggagatcggctccagccttggcctcaggttcacagcaggaaaatgggccagtgtgttagagccatgttctcaaagtgtggtccctggaccagcagagcagcatccatgtcacctaggagcttgtggcaagtgggagttctagggcccgccccaggcccgtggagccagaagctctgggggcaggccagcaagctatatggacaggcctctggatgactgtgatgcctgcgcaccttgagaaccatcggcctggatagcatctgaacactgatggctcctggtgcgtctagagaagacacaggccatgtctgggacgcgggggagatggactagcacgctcccccagccacagggcagcatgatgcccagttccctcagaaggatgtccttcatcttttccttgccgtgtgtgttcaaccccaccctctcagcagcccgggaagggcaggacactgcacacacaagagggccgttcccagtcccattccagattcatctgtcaccagacccacgggaggaggcagactggttccaggaggatgacagcccttgttctgacacctgtgtctgataccagggcctacaaatccgcactggactacaccaaacgaagtctggggattttcattgacctccagaagaaagagaaggaggcgcatgcctggctgcaagcagggaagatctattacatcttgcggcagagcgagctggtggacctctacatccaggtggcacagaacgtggccctgtacacaggcgaccccaacctggggctggagctgtttgaggcggctggagacatcttcttcgacggggcctgggagcgggagaaagctgtgtccttctaccgggtgagctggcctgtgggctgatgtgggtgggccccag

SEQ ID NO: 433640 - DNA, 546 bp, Homo sapiens
atgattgtgtagagtcatcttctctctgttggccttggggttcaggggggcctcggtccagcagcactgggtgctcctccggggccacgcgcagctcgttgtagaaggtgtggtgccagatcttctccatgtcgtcccagttggtgacgatgccatgctctctggggtcctctttcaaggatgtccacggtaccttcctcctgaaacttgaggaagtcttttgtcttccagctgctcagggttctctggtccaagaccctgctttaaagagagtctttggcgtgctcagactccagcgctccgttcttcaaggaggttgacttgcctctcgggccccgtaggtaccaagagactgtttacctcccagaatgtttgggcttgaagttacattaaagtgaagttatttgaaagaaagaaaacctcatcatttctaaggatgacttaattactgtgccttttcctttctttttacacatcctactgtcccttagggtaaaattttcagcattaaataaaacatttcaaatatattgtatatggctttag

SEQ ID NO: 433641 - DNA, 265 bp, Homo sapiens
caaccgcaaggcggagctgcggctgtgcaacaagctggtggcactgctggccacgctggaggagccccaggagggcttggagtttgcccacatggccctagcactcagcatcactctgggtaagccccctgagcccctgccctgccaggacccacactttgccagagctcagcctccaggtctgcagggcaggagccgaaacagctgccggattttcctggtctcctgtccaggcaggcacatctgcccagctggctcccccgtc

SEQ ID NO: 433642 - DNA, 575 bp, Homo sapiens
ggggtggaagggaccacatccagcaggctgaggcaaggagttggtgcacacctacaagggctgcatcaggtcccaggactgctactccggcgttatatccaccaccatgggccccaaggaccacatggtaaccagctccttctgctgccagagcgacggctgcaacagtgcctttttgtctgttcccttgaccaatcttactgagaatggcctgatgtgccccgcctgcactgcgagcttcagggacaaatgcatggggcccatgacccactgtactggaaaggaaaaccactgcgtctccttatctggacacgtgcaggctggtattttcaaacccagatttgctatgcggggctgtgctacagagagtatgtgctttaccaagcctggtgctgaagtacccacaggcaccaatgtcctcttcctccatcatatagagtgcactcactccccctgaaaagctatctgaacagaggaagataatgtagtgtgaagtccccatttgtcctcagcctgtaactccccgtgtgcctataaagaagttaatagagcaagcctgagtcctgtgggcgtga

SEQ ID NO: 433643 - DNA, 953 bp, Homo sapiens
ggcggtcgcctgtgatcgcagctactcgggaggtggaggttgcagtgagccaagatcgcgccattgcactccagcctgggcaactccgtctaaaaaaaataagaaaagaaagaaaaaaaagaaagagaccatcccaggaagttgtggggttggggaggcctagggttaggcaagaccttgaggcaggggttgaagccagggagtggtcagccagcactgtccctgcctgtccccatcccacagagggcaaggagttggtgcacacctacaagggctgcatcaggtcccaggactgctactccggcgttatatccaccaccatgggccccaaggaccacatggtaaccagctccttctgctgccagagcgacggctgcaacagtgcctttttgtctgttcccttgaccaatcttactgagaatggcctgatgtgccccgcctgcactgcgagcttcagggacaaatgcatggggcccatgacccactgtactggaaaggaaaaccactgcgtctccttatctggacacgtgcaggctggtgagtggtgcctgaatctctggaaaaggaaacagaactagaggtccaaacttctaggttcgatgggaggagagggttccagagaagtgggtgaggatgtgttctgggattatgaggaagaaggggctgaggtccctgattccagtctgaaatctccctttcaggtattttcaaacccagatttgctatgcggggctgtgctacagagagtatgtgctttaccaagcctggtgctgaagtacccacaggcaccaatgtcctcttcctccatcatatagagtgcactcactccccctgaaaagctatctgaacagaggaagataatgtagtgtgaagtccccatttgtcctcagcctgtaactccccgtgtgcctataaagaagttaatagagcaagcctgagtcctgtgggcgtga

SEQ ID NO: 433644 - DNA, 732 bp, Homo sapiens
gtggccataggcggcctgaaatagagcaaggagttggtgcacacctacaagggctgcatcaggtcccaggactgctactccggcgttatatccaccaccatgggccccaaggaccacatggtaaccagctccttctgctgccagagcgacggctgcaacagtgcctttttgtctgttcccttgaccaatcttactgagaatggcctgatgtgccccgcctgcactgcgagcttcagggacaaatgcatggggcccatgacccactgtactggaaaggaaaaccactgcgtctccttatctggacacgtgcaggctggtgagtggtgcctgaatctctggaaaaggaaacagaactagaggtccaaacttctaggttcgatgggaggagagggttccagagaagtgggtgaggatgtgttctgggattatgaggaagaaggggctgaggtccctgattccagtctgaaatctccctttcaggtattttcaaacccagatttgctatgcggggctgtgctacagagagtatgtgctttaccaagcctggtgctgaagtacccacaggcaccaatgtcctcttcctccatcatatagagtgcactcactccccctgaaaagctatctgaacagaggaagataatgtagtgtgaagtccccatttgtcctcagcctgtaactccccgtgtgcctataaagaagttaatagagcaagcctgagtcctgtgggcgtga

SEQ ID NO: 433645 - DNA, 789 bp, Homo sapiens
ggcggtcgcctgtgatcgcagctactcgggaggtggaggttgcagtgagccaagatcgcgccattgcactccagcctgggcaactccgtctaaaaaaaataagaaaagaaagaaaaaaaagaaagagaccatcccaggaagttgtggggttggggaggcctagggttaggcaagaccttgaggcaggggttgaagccagggagtggtcagccagcactgtccctgcctgtccccatcccacagagggcaaggagttggtgcacacctacaagggctgcatcaggtcccaggactgctactccggcgttatatccaccaccatgggccccaaggaccacatggtaaccagctccttctgctgccagagcgacggctgcaacagtgcctttttgtctgttcccttgaccaatcttactgagaatggcctgatgtgccccgcctgcactgcgagcttcagggacaaatgcatggggcccatgacccactgtactggaaaggaaaaccactgcgtctccttatctggacacgtgcaggctggtattttcaaacccagatttgctatgcggggctgtgctacagagagtatgtgctttaccaagcctggtgctgaagtacccacaggcaccaatgtcctcttcctccatcatatagagtgcactcactccccctgaaaagctatctgaacagaggaagataatgtagtgtgaagtccccatttgtcctcagcctgtaactccccgtgtgcctataaagaagttaatagagcaagcctgagtcctgtgggcgtga

SEQ ID NO: 433646 - DNA, 896 bp, Homo sapiens
ggcggtcgcctgtgatcgcagctactcgggaggtggaggttgcagtgagccaagatcgcgccattgcactccagcctgggcaactccgtctaaaaaaaataagaaaagaaagaaaaaaaagaaagagaccatcccaggaagttgtggggttggggaggcctagggttaggcaagaccttgaggcaggggttgaagccagggagtggtcagccagcactgtccctgcctgtccccatcccacagagggcaaggagttggtgcacacctacaagggctgcatcaggtcccaggactgctactccggcgttatatccaccaccatgggccccaaggaccacatggtaaccagctccttctgctgccagagcgacggctgcaacagtgcctttttgtctgttcccttgaccaatcttactgagaatggcctgatgtgccccgcctgcactgcgagcttcagggacaaatgcatggggcccatgacccactgtactggaaaggaaaaccactgcgtctccttatctggacacgtgcaggctggtattttcaaacccagatttgctatgcggggctgtgctacagagagtatgtgctttaccaagcctggtgctgaagtacccacaggcaccaatgtcctcttcctccatcatatagagtgcactcactccccctgaaaagctatctgaacagaggaagataatgtagtgtgaagtccccatttgtcctcagcctgtaactccccgtgtgcctataaagaagttaatagagccccccaccaccccccccccccccccaaaactttggggggggcccgtccccacattcgccctataggaggccgacttaaattaactggccgtgttttaacaacctcgggactgaaaaaacctggcgttacc

SEQ ID NO: 433647 - DNA, 712 bp, Homo sapiens
ggcggtcgcctgtgatcgcagctactcgggaggtggaggttgcagtgagccaagatcgcgccattgcactccagcctgggcaactccgtctaaaaaaaataagaaaagaaagaaaaaaaagaaagagaccatcccaggaagttgtggggttggggaggcctagggttaggcaagaccttgaggcaggggttgaagccagggagtggtcagccagcactgtccctgcctgtccccatcccacagagggcaaggagttggtgcacacctacaagggctgcatcaggtcccaggactgctactccggcgttatatccaccaccatgggccccaaggaccacatggtaaccagctccttctgctgccagagcgacggctgcaacagtgcctttttgtctgttcccttgaccaatcttactgagaatggcctgatgtgccccgcctgcactgcgagcttcagggacaaatgcatggggcccatgacccactgtactggaaaggaaaaccactgcgtctccttatctggacacgtgcaggctgagtcttactctgtctcccaggctggagtgcagtgaaaccatcacagttcactgcagcctcaacctcatgggctgaatcgatcctccccgctcagcctccctggtagctgggactacaggcatgcgccaccatgcccagctatttcctgtaatttttttgtagagacagggtttcc

SEQ ID NO: 433648 - DNA, 4312 bp, Homo sapiens
  misc_feature (1725)..(1725): n is a, c, g, or t
agcggagagcagcgacagagccttcctcaaacctgtagtgactgccacactttgcaaggacaccgtagagggggcatgtccgcgctccaacttcctcccgacgcagcctctgattggctcctgggcttataagaaacgcgtgaatgagcagctgccgcgggcagaaagttgccggaggtctccgggtggtatcgccctttcctctttgccagcccgctggcgagccgagccggggcaagatgaggtcgtcctgtgtcctgctcaccgccctggtggcgctggccgcctattacgtctacatcccgctgcctggctccgtgtccgacccctggaagctgatgctgctggacgccactttccggggtgcacagcaagtgagtaacctgatccactacctgggactgagccatcacctgctggcactgaattttatcattgtttcttttggcaaaaaaagcgcgtggtcttctgcccaagtgaaggtgaccgacacagactttgatggtgtggaagtcagagtgtttgaaggccctccgaagcccgaagagccactgaaacgcagcgtcgtttatatccacggaggaggctgggccttggcaagtgcaaaaatcaggtattatgatgagctgtgtacagcaatggctgaggaattgaatgctgtcattgtttccattgaatacaggctagttccaaaggtttattttcctgagcaaattcatgatgttgtacgggccacaaagtatttcctgaagccagaagtcttacagaagtatatggttgatccaggcagaatttgcatttctggtgacagtgctggtggaaatctggctgctgcccttggacaacagtttactcaagatgccagcctaaaaaataagctcaaactacaagctttaatttatccagttcttcaagctttagattttaacacaccatcttatcagcaaaatgtgaacaccccaatcctgccccgctatgtcatggtgaagtattgggtggactacttcaaaggcaactatgactttgtgcaggcaatgatcgttaacaatcacacttcacttgatgtggaagaggctgctgctgtcagggcccgtctaaactggacatccctcttgcctgcatccttcacaaagaactacaagcctgttgtacagaccacaggcaatgccaggattgtccaggagcttcctcagttgctggatgcccgctccgccccactcattgcagaccaggcagtgctgcagctcctcccaaagacctacattctgacgtgtgagcatgatgtcctcagagacgatggcatcatgtatgccaagcgtttggagagtgccggtgtggaggtgaccctggatcactttgaggatggctttcacggatgtatgattttcactagctggcccaccaacttctcagtgggaatccggactaggaatagttacatcaagtggctagatcaaaacctgtaaaggagcaaaacttccagaagcctcgagcccctcttgacctcctacacctgctttggaaagacatgcactttttagttgactaattcttcctcccattcccctctacttgcgagttatggaatttctattccataactgaagtctttatgataacctaatttttaaaaatgaatttgactaacttaagtgcaaaacatgtaaatttggttcccagagtgggccaatctctctgttcttgttatcttagccaactatactnatacctacagctacagaaagcaggactaggaactggaaataactttgggtcctgccttcattaggacgttctttttagaagcagttcttccagctctggatcatagagtgacctttaataagttaaaaaaacgaggactccttaattctgctagagttaaccttgagttcagagcagtattaaatgcgtgcactttcaggtcagtactggggaccaagtaccctctggtcttttgtgaatggatggttttgtttcctatgggaattttggcaaaggttttctggaaagaacaagtttctcaaaggactttcttcctctagaatgttcattttatgagatcgctatctgtaagtccagttggattacaggaatacttgaaagttactttctaccactattagaaaatatgaagtcgcatgcactggatatctatatatcattaggtttttgttgtgtttttggttatgctgtcccccttctccttggggagatatttgggagcaaacttatttagatttagagtaaacttttcattatagagcaagtaaaaacagacaaatgaaacaacctagtgtttcacataaaaatacttctgacataaagtaccaagagcagtgtgaatatacttggcatagtcaaaaaagaaaatacatttaatattagttcaaaattgttaaaaatacctttagaaggtctagtctattattgaaaactcaattttttcacttatatggctttaaaatggagctattttgctacaatataatgtattgtttatttttttaagttatttaatgttaatatacatagctagacttaaggtttttcagaaagatgtccataataaatattaaaaacaatggtattttttaaaaaactgccttagggttttaaaaccttccctacagttataaccacgtgtaattttgtggaaatgatataacagctattaatactactataacataggcataaatattttcgtgtttatatgcatatacaagttaaaataattagaaactatgactgcgcctagtaaagtcatctaggtttatagttcagtagcttaggcaaggcacacactgctcatctccgctttttagggtcagaggaacacaagctcatgttctgagtgaagggcgtacactggcacctggtgttgcctagatcccccatctcctccttccagccaggtctggaagtttcaacagcccaagcttaacttcatgtaaagtcttcactgccagtgggaacatctttgacacaacaagacactccaattgtgatttgagttgaggatctctgcctgccttcctgccgtccttccttcttccccgatccatgctacttttaggggctgcggagagcagcagcagagctgagtaatgatacagggcaccacggagagaaagtagaaccatttcactcctgggaagatggggtatttcccacttccagcaacgaaataacaaatgaaaagttgcatacttattgatgtattgtatgagccagtagcattttatgtacaaaacagaagtcaatgcaacagtatgtatgtgtgcctgtgtgtgtataaaaataaccattgaagctaacttgctaatgtacttaggcaagccacttcccatctctgggcctcgtctttcctccctctaaaatcaaagagctgaattatgtgatccttgaggtctcttccacttataataccaactgtcttgtcagactggcaaattatattggcctctccttatgtggtggtttttttggtaggtcatagttccttatacacagacacctgcatcatcgaaggtctttttttcctaaaaaaaaaaaatgggattttagttcttattctgtgataactatcctcctcatataatactattctttttgacaccatttgaaggaaccaatatttggaccttattttgaggttgtctgtctcgaagaaaaagaaaataaaatgtataggcagggttccttcaattggcattttccccagaattgtgagccaaagcctatagtaattgcagacagcaaatgattccggatctctaaaaggctctctcagatgaaaagggagtaaaggaaaaaagaggtcaaccactgtttctgataatgtacttgagtttcattgttcttttagtttgtattcttataaaaaatgtttacactctgcagattgattttttttttttagtactgtggctttcttttcctattttatgaaaaaaatgataatctttttgtaaaattgtctgtgaaatataaacattaatatataaagaaaaaccttgaagtgctgtatagtgaagtataaattaatgttttattgatttgtgaagaatttaagactattatataattatcttggtggatctattttatgcatgaccttttaacctttgactttgcttatttcccactacgaaggggaaggtagattttatgaatgattttaatagcaaatatattttataaagtgaaaatccagtgtggaggtagcaaagcatctatctattctgaatcatgtttggaaataaaattgctccatctgggaatgtgctttcaattttcccgtctcatt

SEQ ID NO: 433649 - DNA, 4190 bp, Homo sapiens
  misc_feature (1725)..(1725): n is a, c, g, or t
agcggagagcagcgacagagccttcctcaaacctgtagtgactgccacactttgcaaggacaccgtagagggggcatgtccgcgctccaacttcctcccgacgcagcctctgattggctcctgggcttataagaaacgcgtgaatgagcagctgccgcgggcagaaagttgccggaggtctccgggtggtatcgccctttcctctttgccagcccgctggcgagccgagccggggcaagatgaggtcgtcctgtgtcctgctcaccgccctggtggcgctggccgcctattacgtctacatcccgctgcctggctccgtgtccgacccctggaagctgatgctgctggacgccactttccggggtgcacagcaagtgagtaacctgatccactacctgggactgagccatcacctgctggcactgaattttatcattgtttcttttggcaaaaaaagcgcgtggtcttctgcccaagtgaaggtgaccgacacagactttgatggtgtggaagtcagagtgtttgaaggccctccgaagcccgaagagccactgaaacgcagcgtcgtttatatccacggaggaggctgggccttggcaagtgcaaaaatcaggtattatgatgagctgtgtacagcaatggctgaggaattgaatgctgtcattgtttccattgaatacaggctagttccaaaggtttattttcctgagcaaattcatgatgttgtacgggccacaaagtatttcctgaagccagaagtcttacagaagtatatggttgatccaggcagaatttgcatttctggtgacagtgctggtggaaatctggctgctgcccttggacaacagtttactcaagatgccagcctaaaaaataagctcaaactacaagctttaatttatccagttcttcaagctttagattttaacacaccatcttatcagcaaaatgtgaacaccccaatcctgccccgctatgtcatggtgaagtattgggtggactacttcaaaggcaactatgactttgtgcaggcaatgatcgttaacaatcacacttcacttgatgtggaagaggctgctgctgtcagggcccgtctaaactggacatccctcttgcctgcatccttcacaaagaactacaagcctgttgtacagaccacaggcaatgccaggattgtccaggagcttcctcagttgctggatgcccgctccgccccactcattgcagaccaggcagtgctgcagctcctcccaaagacctacattctgacgtgtgagcatgatgtcctcagagacgatggcatcatgtatgccaagcgtttggagagtgccggtgtggaggtgaccctggatcactttgaggatggctttcacggatgtatgattttcactagctggcccaccaacttctcagtgggaatccggactaggaatagttacatcaagtggctagatcaaaacctgtaaaggagcaaaacttccagaagcctcgagcccctcttgacctcctacacctgctttggaaagacatgcactttttagttgactaattcttcctcccattcccctctacttgcgagttatggaatttctattccataactgaagtctttatgataacctaatttttaaaaatgaatttgactaacttaagtgcaaaacatgtaaatttggttcccagagtgggccaatctctctgttcttgttatcttagccaactatactnatacctacagctacagaaagcaggactaggaactggaaataactttgggtcctgccttcattaggacgttctttttagaagcagttcttccagctctggatcatagagtgacctttaataagttaaaaaaacgaggactccttaattctgctagagttaaccttgagttcagagcagtattaaatgcgtgcactttcaggtcagtactggggaccaagtaccctctggtcttttgtgaatggatggttttgtttcctatgggaattttggcaaaggttttctggaaagaacaagtttctcaaaggactttcttcctctagaatgttcattttatgagatcgctatctgtaagtccagttggattacaggaatacttgaaagttactttctaccactattagaaaatatgaagtcgcatgcactggatatctatatatcattaggtttttgttgtgtttttggttatgctgtcccccttctccttggggagatatttgggagcaaacttatttagatttagagtaaacttttcattatagagcaagtaaaaacagacaaatgaaacaacctagtgtttcacataaaaatacttctgacataaagtaccaagagcagtgtgaatatacttggcatagtcaaaaaagaaaatacatttaatattagttcaaaattgttaaaaatacctttagaaggtctagtctattattgaaaactcaattttttcacttatatggctttaaaatggagctattttgctacaatataatgtattgtttatttttttaagttatttaatgttaatatacatagctagacttaaggtttttcagaaagatgtccataataaatattaaaaacaatggtattttttaaaaaactgccttagggttttaaaaccttccctacagttataaccacgtgtaattttgtggaaatgatataacagctattaatactactataacataggcataaatattttcgtgtttatatgcatatacaagttaaaataattagaaactatgactgcgcctagtaaagtcatctaggtttatagttcagtagcttaggcaaggcacacactgctcatctccgctttttagggtcagaggaacacaagctcatgttctgagtgaagggcgtacactggcacctggtgttgcctagatcccccatctcctccttccagccaggtctggaagtttcaacagcccaagcttaacttcatgtaaagtcttcactgccagtgggaacatctttgacacaacaagacactccaattgtgatttgagttgaggatctctgcctgccttcctgccgtccttccttcttccccgatccatgctacttttaggggctgcggagagcagcagcagagctgagtaatgatacagggcaccacggagagaaagtagaaccatttcactcctgggaagatggggtatttcccacttccagcaacgaaataacaaatgaaaagttgcatacttattgatgtattgtatgagccagtagcattttatgtacaaaacagaagtcaatgcaacagtatgtatgtgtgcctgtgtgtgtataaaaataaccattgaagctaacttgctaatgtacttaggcaagccacttcccatctctgggcctcgtctttcctccctctaaaatcaaagagctgaattatgtgatccttgaggtctcttccacttataataccaactgtcttgtcagactggcaaattatattggcctctccttatgtggtggtttttttggtaggtcatagttccttatacacagacacctgcatcatcgaaggtctttttttcctaaaaaaaaaaaatgggattttagttcttattctgtgataactatcctcctcatataatactattctttttgacaccatttgaaggaaccaatatttggaccttattttgaggttgtctgtctcgaagaaaaagaaaataaaatgtataggcagggttccttcaattggcattttccccagaattgtgagccaaagcctatagtaattgcagacagcaaatgattccggatctctaaaaggctctctcagatgaaaagggagtaaaggaaaaaagaggtcaaccactgtttctgataatgtacttgagtttcattgttcttttagtttgtattcttataaaaaatgtttacactctgcagattgattttttttttttagtactgtggctttcttttcctattttatgaaaaaaatgataatctttttgtaaaattgtctgtgaaatataaacattaatatataaagaaaaaccttgaagtgctgtatagtgaagtataaattaatgttttattgatttgtgaagaatttaagactattatataattatcttggtggatctattttatgcatgaccttttaacctttgactttgcttatttcccactacgaaggagggatgagcaggggatactctagagtcagc

SEQ ID NO: 433650 - DNA, 3272 bp, Homo sapiens
  misc_feature (685)..(685): n is a, c, g, or t
atgtccagtttagacgggccctgacagcagcagcctcttccacatcaagtgaagtgtgattgttaacgatcattgcctgcatccttcacaaagaactacaagcctgttgtacagaccacaggcaatgccaggattgtccaggagcttcctcagttgctggatgcccgctccgccccactcattgcagaccaggcagtgctgcagctcctcccaaagacctacattctgacgtgtgagcatgatgtcctcagagacgatggcatcatgtatgccaagcgtttggagagtgccggtgtggaggtgaccctggatcactttgaggatggctttcacggatgtatgattttcactagctggcccaccaacttctcagtgggaatccggactaggaatagttacatcaagtggctagatcaaaacctgtaaaggagcaaaacttccagaagcctcgagcccctcttgacctcctacacctgctttggaaagacatgcactttttagttgactaattcttcctcccattcccctctacttgcgagttatggaatttctattccataactgaagtctttatgataacctaatttttaaaaatgaatttgactaacttaagtgcaaaacatgtaaatttggttcccagagtgggccaatctctctgttcttgttatcttagccaactatactnatacctacagctacagaaagcaggactaggaactggaaataactttgggtcctgccttcattaggacgttctttttagaagcagttcttccagctctggatcatagagtgacctttaataagttaaaaaaacgaggactccttaattctgctagagttaaccttgagttcagagcagtattaaatgcgtgcactttcaggtcagtactggggaccaagtaccctctggtcttttgtgaatggatggttttgtttcctatgggaattttggcaaaggttttctggaaagaacaagtttctcaaaggactttcttcctctagaatgttcattttatgagatcgctatctgtaagtccagttggattacaggaatacttgaaagttactttctaccactattagaaaatatgaagtcgcatgcactggatatctatatatcattaggtttttgttgtgtttttggttatgctgtcccccttctccttggggagatatttgggagcaaacttatttagatttagagtaaacttttcattatagagcaagtaaaaacagacaaatgaaacaacctagtgtttcacataaaaatacttctgacataaagtaccaagagcagtgtgaatatacttggcatagtcaaaaaagaaaatacatttaatattagttcaaaattgttaaaaatacctttagaaggtctagtctattattgaaaactcaattttttcacttatatggctttaaaatggagctattttgctacaatataatgtattgtttatttttttaagttatttaatgttaatatacatagctagacttaaggtttttcagaaagatgtccataataaatattaaaaacaatggtattttttaaaaaactgccttagggttttaaaaccttccctacagttataaccacgtgtaattttgtggaaatgatataacagctattaatactactataacataggcataaatattttcgtgtttatatgcatatacaagttaaaataattagaaactatgactgcgcctagtaaagtcatctaggtttatagttcagtagcttaggcaaggcacacactgctcatctccgctttttagggtcagaggaacacaagctcatgttctgagtgaagggcgtacactggcacctggtgttgcctagatcccccatctcctccttccagccaggtctggaagtttcaacagcccaagcttaacttcatgtaaagtcttcactgccagtgggaacatctttgacacaacaagacactccaattgtgatttgagttgaggatctctgcctgccttcctgccgtccttccttcttccccgatccatgctacttttaggggctgcggagagcagcagcagagctgagtaatgatacagggcaccacggagagaaagtagaaccatttcactcctgggaagatggggtatttcccacttccagcaacgaaataacaaatgaaaagttgcatacttattgatgtattgtatgagccagtagcattttatgtacaaaacagaagtcaatgcaacagtatgtatgtgtgcctgtgtgtgtataaaaataaccattgaagctaacttgctaatgtacttaggcaagccacttcccatctctgggcctcgtctttcctccctctaaaatcaaagagctgaattatgtgatccttgaggtctcttccacttataataccaactgtcttgtcagactggcaaattatattggcctctccttatgtggtggtttttttggtaggtcatagttccttatacacagacacctgcatcatcgaaggtctttttttcctaaaaaaaaaaaatgggattttagttcttattctgtgataactatcctcctcatataatactattctttttgacaccatttgaaggaaccaatatttggaccttattttgaggttgtctgtctcgaagaaaaagaaaataaaatgtataggcagggttccttcaattggcattttccccagaattgtgagccaaagcctatagtaattgcagacagcaaatgattccggatctctaaaaggctctctcagatgaaaagggagtaaaggaaaaaagaggtcaaccactgtttctgataatgtacttgagtttcattgttcttttagtttgtattcttataaaaaatgtttacactctgcagattgattttttttttttagtactgtggctttcttttcctattttatgaaaaaaatgataatctttttgtaaaattgtctgtgaaatataaacattaatatataaagaaaaaccttgaagtgctgtatagtgaagtataaattaatgttttattgatttgtgaagaatttaagactattatataattatcttggtggatctattttatgcatgaccttttaacctttgactttgcttatttcccactacgaaggggaaggtagattttatgaatgattttaatagcaaatatattttataaagtgaaaatccagtgtggaggtagcaaagcatctatctattctgaatcatgtttggaaataaaattgctccatctgggaatgtgctttcaattttcccgtctcatt

SEQ ID NO: 433651 - DNA, 869 bp, Homo sapiens
ttcctcccgacgcagcctctgattggctcctgggcttataagaaacgcgtgaatgagcagctgccgcgggcagaaagttgccggaggtctccgggtggtatcgccctttcctctttgccagcccgctggcgagccgagccggggcaagatgaggtcgtcctgtgtcctgctcaccgccctggtggcgctggccgcctattacgtctacatcccgctgcctggctccgtgtccgacccctggaagctgatgctgctggacgccactttccggggtgcacagcaagtggtgaggtgcagcccagcgctgcttctctcttcctcctcttacgcaatatttgaaggggatacaaaattcctccgccgggttccacgaaaacgcaggtttttcctaatgcattgaggctgtcgctttttgaggtggtccagtcgggaattttcagggtatcgcattcgcctccttgctagcagcgggctagatctgcatttccccgtctgcgtttgtgacggggaagaagtgcttgaatagaatttgacaactgtttaaaccttcgtctgtcctaaatatcttcctcttccttggtttgcaacgtcaaaggcaaatccttaagcagtttataaaccacccttcttcacactgtcgttctcccatagggcccggcagaggataaatatttttaggagagctcgggaaaagcaggctctggttcctgggaatgcagccaccttagaagcagaagcaggcaagggcagtctcgcaatgtccccaggctgtggagcgctccgttcccggagacagcaggcagggctctccatccaagcacttgaggaaccatagggatctctcgtttcacccgaggcagatctcagct

SEQ ID NO: 433652 - DNA, 853 bp, Homo sapiens
  misc_feature (838)..(838): n is a, c, g, or t
gcacactacggagtggtgacattccgttctcaagaaatagaagaaagcgggtctactaacccctaccacttatgtcttggatgaagatgaacctcgattccttgaagaagttgattacagtgcagaaagtaatgatgagttagatattgagttggctgaaaatgtaggagattatgaaccttctgctcaagaagaagtactttctgactctgaattatcaagaacatacctaccttgagcccgctgccatctcttgttaactgcaaagaataaatgaaatatcttggtttttatttcccaggaagcttgagagaaatgagtttatacagagctgactcaaaaagacaaaaagtaacttgggccagtttggtttcaagataataaatgtgttattaattaatgataaaattggcgcttgttttattttcgatattcaatgcactttatgtagcattgaatgatcaaatattggatttacctttaaaaaaaaaacctgagtatcattgcatgaatttttatctccctatggttatatcctgcatcaagtggataattttgaagtgtgttcagaatataaaattgaaattttagagttgttgaaaatcctgacttgttgaaaactaatatatatgtacatggatttctatagatgtgtttgtttagaagtgggtagatattgcagataagactgttcttcagaatcatgttaactattgggttgtgactgaagtagtccagggtttgccttgaaaccattacattctacatttaccaaattaaacaaataaaaactgtatctggcctcgttggcctcagcggtggagctctgcggccggancaccccccatctccc

SEQ ID NO: 433653 - DNA, 1046 bp, Homo sapiens
ctcctagttctggcacctgtactatattatcgattttaagattttaaatggatgaataggaatcacctaattcatgacaggagctgtgatgaaatgtgaagaatgccatgttaactgatatctcgaagtccacatatggtagaattagcaacatcagagggaagaacgtctgtgaaccaagttagagtgtttactgtaccagtggagacttgttgaatctttattagctatatgcaacaaaactatacatacttttaaaaatttatgtttgagaaaaaaattgtttgctacttttcagaaaaaacaaggagagaaatgacagccaaaggttctacaggaatggaaattctgctgtcaacattagaggtaaatcagtgacacgctttaattatgtaactactaatgccaagcaatactgaagaagaaaaagcgtatgtgtgtgtataaatacacacagaaacacatacacacgtacatatatacacacacacgtatatgtaataatttttgttttagaggtaaagccagtaaatggaaattcattttaggtttttaaaatactatttggaatggtggtataaatattttaatatgtattaggtgactattgaagtatatttcccttatatgattataatgataactgtaaattgtaatcctaacatgccattctagttggtatagaaaataaagcattagctggaaataaatctttagcttaaaacaaatgaaaattatcgtttattgttttagctgatatacatttgtgattttactacacatattggttaactatattatattgatgataattgaatttctacgccagtgtaaagtttttggtggaccagcaggatgtattcagaatcaggattctgtattttgttcagttgcaatgttaagaacaagaaatgaattcatgttcttcaataggaagtcttagcatcataaagatgtcatttctccctagattgctctgttactttagagcaatctcaataaaagttaccaacagttttttttttctctcttttcttttctttttt

SEQ ID NO: 433654 - DNA, 7124 bp, Homo sapiens
  misc_feature (5794)..(5794): n is a, c, g, or t
  misc_feature (6229)..(6229): n is a, c, g, or t
acgttgcccgggatgcggacaggttccgccgcctccagcgccccatcctgagccgattatctgcaattatgaaatgaagtaactcaagatgagcaagttaaaagtgataccagaaaaaagccttaccaataattctaggatcgtaggactcctggctcaactggagaagatcaatgctgagccttcagaatcagacactgcccgatatgttacatcaaaaattcttcatctggctcagagtcaagaaaaaacaaggagagaaatgacagccaaaggttctacaggaatggaaattctgctgtcaacattagagaacacaaaagatcttcaaactacacttaatatcttaagcattcttgttgagctggtgtcagctggtggaggtcgaagagtgagtttcttagtcaccaaaggtggttcacaaatattgttgcagttacttatgaatgccagcaaagaatctcccccacatgaggacttaatggtacagattcattctattcttgcaaagattggaccaaaagataaaaaatttggagtaaaggctagaattaatggggctctgaatataaccctgaatttggtcaagcagaatttgcagaatcatcgcttggttctaccttgccttcagcttttacgagtatattctgccaactctgtgaattcagtatccttagggaaaaatggagttgtggaactgatgtttaaaatcattggaccatttagtaagaagaattccagtcttataaaggttgctttagacactcttgctgcattgctaaaatcaaaaacaaatgccaggagagctgtagacagaggatatgtccaagtgcttttaacaatttatgtagattggcaccgccatgataaccggcatagaaacatgctcattcggaaaggaattttacagagtttaaaaagtgttacaaacatcaagttgggaagaaaagcatttattgatgccaatgggatgaaaattctgtataatacttcgcaattgcctgttattcctgtgactggtcctgtggctcagctctacagcttacctcctgaagtggatgacgtagtagatgaaagtgatgacaacgatgatattgatgtagaagctgaaaacgaaactgagaatgaagatgacctagatcaaaattttaagaatgatgatattgaaacagatattaacaaactaaaaccccagcaagaaccgggacgaacaatagaagatctaaaaatgtatgaacaccttttccctgagcttgttgatgattttcaggactatgatttaatctccaaagaaccaaagccttttgtatttgagggaaaagtacgtggtcctattgttgttcctacggcaggcgaggaaacatctgggaattctggcaatttaagaaaagttgtaatgaaggagaacatatcttctaaaggagatgaaggtgaaaagaagtctacctttatggatctagcaaaagaagatattaaagataatgatagaacattacaacagcagccaggtgatcaaaatagaactatttcatcagtccatggtttaaacaatgatattgtaaaggccttggaccgaattacattgcagaatattccttctcaaacagccccaggttttactgcagaaatgaagaaggactgcagtcttcctcttactgtccttacctgtgctaaagcatgtccacacatggctacttgtggaaatgttctgtttgagggaagaacagttcagctagggaagctttgctgcactggagttgaaactgaagatgatgaagatactgagtcaaattcatcggtagaacaagcatcggttgaagtacctgatggaccaacactccatgacccagacctctatattgagattgtgaaaaatacgaagtctgtcccagaatattcagaggtggcttatcccgattattttggtcacattccgcctccattcaaagagcctattttagaaaggccttatggtgtacaaaggacaaaaattgctcaagatattgaaaggctaatacatcagagtgatatcatagatcgtgtggtatatgacttggataacccaaattacaccattccagaagagggagatattttgaaatttaactccaaatttgagtctgggaatctgcgcaaagtaattcaaattagaaaaaatgaatatgatcttattctgaactcagacataaacagcaatcattatcatcagtggttttactttgaagtcagtggaatgcgaccaggtgttgcttacaggtttaacatcattaactgtgaaaagtccaacagtcagtttaattatggtatgcaaccactcatgtattcggttcaggaagcattaaatgccagaccatggtggattcgtatggggactgacatttgttactataaaaatcatttctcaagaagttcagttgctgcaggtgggcaaaagggaaaatcctactatacaattacatttactgtcaattttccacataaagatgatgtttgctactttgcttatcactatccatatacgtattcaactttacagatgcatcttcaaaaattggaatcagcacacaatcctcagcaaatctattttcggaaagatgtgttatgtgaaaccctgtctggaaacagctgccccttggtgactataacagcaatgccagagtctaattattatgaacatatctgccatttcagaaatcgcccttacgttttcttgtctgctcgggtacatcctggagaaactaatgcaagttgggttatgaaaggaacgttggaatatctcatgagcaataaccccactgctcagagcttacgagaatcttatatttttaaaattgtccctatgttaaatccagatggtgtcatcaatggaaatcatcgctgttctttaagtggagaggatttgaataggcagtggcaaagtccaagtccggatttacatcctacaatttaccatgctaaggggctgttgcaatacttggctgcagtgaagcgtttacccttggtttattgtgattatcatggccattcccgaaagaagaatgtatttatgtatggttgcagcatcaaagagacagtgtggcataccaatgataatgcaacttcatgtgatgttgtggaggatacgggatacaggacattgcctaagatactgagccatatcgccccagcattttgcatgagcagctgtagcttcgtagtggaaaaatctaaagaatccacagcacgtgttgtagtttggagggaaataggagtacaaagaagttataccatggagagtactttatgtggctgtgatcagggaaaatacaagggtttacagattggtacccgagaactggaagagatgggagcaaaattttgtgttggtcttttacgtttgaaaagactgacctctccattggagtataatctgccttccagcctgcttgactttgaaaatgatttaattgaatcaagctgcaaagtaactagccctaccacttatgtcttggatgaagatgaacctcgattccttgaagaagttgattacagtgcagaaagtaatgatgagttagatattgagttggctgaaaatgtaggagattatgaaccttctgctcaagaagaagtactttctgactctgaattatcaagaacatacctaccttgagcccgctgccatctcttgttaactgcaaagaataaatgaaatatcttggtttttatttcccaggaagcttgagagaaatgagtttatacagagctgactcaaaaagacaaaaagtaacttgggccagtttggtttcaagataataaatgtgttattaattaatgataaaattggcgcttgttttattttcgatattcaatgcactttatgtagcattgaatgatcaaatattggatttacctttaaaaaaaaaacctgagtatcattgcatgaatttttatctccctatggttatatcctgcatcaagtggataattttgaagtgtgttcagaatataaaattgaaattttagagttgttgaaaatcctgacttgttgaaaactaatatatatgtacatggatttctatagatgtgtttgtttagaagtgggtagatattgcagataagactgttcttcagaatcatgttaactattgggttgtgactgaagtagtccagggtttgccttgaaaccattacattctacatttaccaaattaaacaaataaaaactgtattaaatgttgcattcattttgtcatcttctttaaccagctcagattatttgatgtatagaactttgtgagaatgtgataaaaacccagaattggacacagtgataaaaagttgtttttaagaaatgctgggattacaggcgtgcgccaccgtgcctggctaaatcctttcttgtaatgaaacctacctgggttttagccctcttgctgcaagaatgactttatttttaaataaaataaagcaaatccattgactttggataagtgttttaagaactaagtttctgatataataaaacaacctccaaaagatacctcattgcagattttcgccaggattcaggtgcttaggttttggcacatatcttcctcactttttcctatagtgtttttaacctgttataattggaatgatagagatgtatttcagaattttgcatggtccaaatcaatgatttttctttttaatatgtaaagtatttcattaacagtgtagattctttctgatgtttggggagccatgtttaaaaatgtagtatggagcaattgaaaaaggggtctttttccctagcctaattcttactaatctcagaaaacaaagatcaaatagactgtgaagttgaactagtcctcttagtgtagtaaccaaatttaggaaagatcaggataatttaggaaggaaagtaatcatttatttaattatttataattataaacaattattttatgttttgtatattttatgtataaaacaattacatgttttattatagttatacttcttcagagagtagattatggagccaccatgtccatacagttagttgttccttggtattcttggattgattccaggaccccccacagttacccaaatccacagatgctgaagtctctgatataaaatggagtagtatttgcatttaacctatggacatcctcctgtatgctttaaatcatctctagattacttataatacctaatacaatataaatataaatgctctgtaaatagttttattgtatagtgtgtgtgtgtgttttaagagacgaggactcacaatgggacactttgaccaggctggtctcgaactcctgggcctacacaatcctcccacctcggcgtcgcaagtagctgggactacaggtactcaccactatgcctggcagttttttaaatttgcgtttttaaaaattgtttattatttattgaatattttctacctgagattgacttaatctgtggatatggaacctatagatatggagggctggctgtatatgaatttgtttttggcttttacaaaattagaaattaaaagtaactacagttactataatgtgcagaatgactcaaatatttccatttattatgttagtgtaaaaactcctaactacgtattataatattttatattaatgaagtactttagcatacattatgagcctgaataaagctttttattaaatattcacaagattgaaggagaaattctttatagttaggaaatgattttttcataaacaataaatagctttgaaaatataaaaaaaaatttagggctgggtgcagaggctcatgcctgtantcccagcactctgagaggccgaggcgggtggatcacttgaggtgaggagttcaagatcagcatggccaacatggtgaaactccacctccacgaaaaatacaaaaattagccaggcatggtggcatgcgcctgtaatcctagctacttgggtggctgaggcatgagactcacttgaacctgggaggcagaggttgcagcagtgagccgagatcaagccgctgcactccagctggggcgacaaagcaagactgtctcaaaaaataaaaacaaaaaaattaaaataaaatcctaactttcctagttagaaatataattaacttttattggctattagtagctaaaattgcccttatttttgcttctgtggcctcattttttttctcggttattcagtatttaaattatggcttagatgtcttcaatgctatagtcctnaaaattaatgatctacgttgtgcagcagtgatgggatctgataaactgagtctgatgatggagtttagatttatttcctttaccttgcatttggaactttgaatctcttaaatgtggttttggtctagtccactggttctcacgttgtaatgtgcatcagaatcttctgaagacacagattgctgattatgtagacctggggtggaggtccaagaatgtgcattccttgcaaattcccaggtggtgatgctgcagagccacactttgagaatcactagtataatccagtatgctcttccagcatcacaccttccttcctgagaatcacaggagttgtgaactgcagattagcattggggagaatttagatcaaactaatttgtagaatcaaggaggtcaagtaaggtcacaggggcacttgggttgagccagggttttagcccaggtcttctgacaactgcctcatgtccttaccacaaaggagctgctatcctttgcctttccccaaagagtgaagactgcttaaagctcaaggatctttcttgaatttgtgaaatttgttcaggcaaggtgaaaagcaaaaacctatggttcacattgactttttgtattgatcattgtcttttgaagacaggaagtatgatcagtctctgccacttgtgctagtttttgtgtggtgtttagaaacatgggcatttgtctggatcctaattacaaataagtaacctagaattctcttcagatagtgcactaacagcaatgaatctattctaaatttcaaatatccaaattaaaatgactgtattagcataagtactgaaatggataatacaataaatgtattaatggaattgtttttgtgcatgatacagaaataaatgatagtaacgaaact

SEQ ID NO: 433655 - DNA, 7265 bp, Homo sapiens
  misc_feature (5935)..(5935): n is a, c, g, or t
  misc_feature (6370)..(6370): n is a, c, g, or t
cggggtttgtatgaaaacaccgggcggcgggcggcgagggatccgccgtgatccaggtgctgagccgggtgctgcggctctgcgcggtccccgccagcgccccatcctgagccgattatctgcaattatgaaatgaagtaactcaagatgagcaagttaaaagtgataccagaaaaaagccttaccaataattctaggatcgtaggactcctggctcaactggagaagatcaatgctgagccttcagaatcagacactgcccgatatgttacatcaaaaattcttcatctggctcagagtcaagaaaaaacaaggagagaaatgacagccaaaggttctacaggaatggaaattctgctgtcaacattagagaacacaaaagatcttcaaactacacttaatatcttaagcattcttgttgagctggtgtcagctggtggaggtcgaagagtgagtttcttagtcaccaaaggtggttcacaaatattgttgcagttacttatgaatgccagcaaagaatctcccccacatgaggacttaatggtacagattcattctattcttgcaaagattggaccaaaagataaaaaatttggagtaaaggctagaattaatggggctctgaatataaccctgaatttggtcaagcagaatttgcagaatcatcgcttggttctaccttgccttcagcttttacgagtatattctgccaactctgtgaattcagtatccttagggaaaaatggagttgtggaactgatgtttaaaatcattggaccatttagtaagaagaattccagtcttataaaaaacaaatgccaggagagctgtagacagaggatatgtccaagtgcttttaacaatttatgtagattggcaccgccatgataaccggcatagaaacatgctcattcggaaaggaattttacagagtttaaaaagtgttacaaacatcaagttgggaagaaaagcatttattgatgccaatgggatgaaaattctgtataatacttcgcaagaatgtctggcagtcaggactctggatcctcttgtcaatacctccagtctgataatgaggaagtgtttcccaaaaaatcgactgccactcccaacaattaaaagttcttttcatttccagttgcctgttattcctgtgactggtcctgtggctcagctctacagcttacctcctgaagtggatgacgtagtagatgaaagtgatgacaacgatgatattgatgtagaagctgaaaacgaaactgagaatgaagatgacctagatcaaaattttaagaatgatgatattgaaacagatattaacaaactaaaaccccagcaagaaccgggacgaacaatagaagatctaaaaatgtatgaacaccttttccctgagcttgttgatgattttcaggactatgatttaatctccaaagaaccaaagccttttgtatttgagggaaaagtacgtggtcctattgttgttcctacggcaggcgaggaaacatctgggaattctggcaatttaagaaaagttgtaatgaaggagaacatatcttctaaaggagatgaaggtgaaaagaagtctacctttatggatctagcaaaagaagatattaaagataatgatagaacattacaacagcagccaggtgatcaaaatagaactatttcatcagtccatggtttaaacaatgatattgtaaaggccttggaccgaattacattgcagaatattccttctcaaacagccccaggttttactgcagaaatgaagaaggactgcagtcttcctcttactgtccttacctgtgctaaagcatgtccacacatggctacttgtggaaatgttctgtttgagggaagaacagttcagctagggaagctttgctgcactggagttgaaactgaagatgatgaagatactgagtcaaattcatcggtagaacaagcatcggttgaagtacctgatggaccaacactccatgacccagacctctatattgagattgtgaaaaatacgaagtctgtcccagaatattcagaggtggcttatcccgattattttggtcacattccgcctccattcaaagagcctattttagaaaggccttatggtgtacaaaggacaaaaattgctcaagatattgaaaggctaatacatcagagtgatatcatagatcgtgtggtatatgacttggataacccaaattacaccattccagaagagggagatattttgaaatttaactccaaatttgagtctgggaatctgcgcaaagtaattcaaattagaaaaaatgaatatgatcttattctgaactcagacataaacagcaatcattatcatcagtggttttactttgaagtcagtggaatgcgaccaggtgttgcttacaggtttaacatcattaactgtgaaaagtccaacagtcagtttaattatggtatgcaaccactcatgtattcggttcaggaagcattaaatgccagaccatggtggattcgtatggggactgacatttgttactataaaaatcatttctcaagaagttcagttgctgcaggtgggcaaaagggaaaatcctactatacaattacatttactgtcaattttccacataaagatgatgtttgctactttgcttatcactatccatatacgtattcaactttacagatgcatcttcaaaaattggaatcagcacacaatcctcagcaaatctattttcggaaagatgtgttatgtgaaaccctgtctggaaacagctgccccttggtgactataacagcaatgccagagtctaattattatgaacatatctgccatttcagaaatcgcccttacgttttcttgtctgctcgggtacatcctggagaaactaatgcaagttgggttatgaaaggaacgttggaatatctcatgagcaataaccccactgctcagagcttacgagaatcttatatttttaaaattgtccctatgttaaatccagatggtgtcatcaatggaaatcatcgctgttctttaagtggagaggatttgaataggcagtggcaaagtccaagtccggatttacatcctacaatttaccatgctaaggggctgttgcaatacttggctgcagtgaagcgtttacccttggtttattgtgattatcatggccattcccgaaagaagaatgtatttatgtatggttgcagcatcaaagagacagtgtggcataccaatgataatgcaacttcatgtgatgttgtggaggatacgggatacaggacattgcctaagatactgagccatatcgccccagcattttgcatgagcagctgtagcttcgtagtggaaaaatctaaagaatccacagcacgtgttgtagtttggagggaaataggagtacaaagaagttataccatggagagtactttatgtggctgtgatcagggaaaatacaagggtttacagattggtacccgagaactggaagagatgggagcaaaattttgtgttggtcttttacgtttgaaaagactgacctctccattggagtataatctgccttccagcctgcttgactttgaaaatgatttaattgaatcaagctgcaaagtaactagccctaccacttatgtcttggatgaagatgaacctcgattccttgaagaagttgattacagtgcagaaagtaatgatgagttagatattgagttggctgaaaatgtaggagattatgaaccttctgctcaagaagaagtactttctgactctgaattatcaagaacatacctaccttgagcccgctgccatctcttgttaactgcaaagaataaatgaaatatcttggtttttatttcccaggaagcttgagagaaatgagtttatacagagctgactcaaaaagacaaaaagtaacttgggccagtttggtttcaagataataaatgtgttattaattaatgataaaattggcgcttgttttattttcgatattcaatgcactttatgtagcattgaatgatcaaatattggatttacctttaaaaaaaaaacctgagtatcattgcatgaatttttatctccctatggttatatcctgcatcaagtggataattttgaagtgtgttcagaatataaaattgaaattttagagttgttgaaaatcctgacttgttgaaaactaatatatatgtacatggatttctatagatgtgtttgtttagaagtgggtagatattgcagataagactgttcttcagaatcatgttaactattgggttgtgactgaagtagtccagggtttgccttgaaaccattacattctacatttaccaaattaaacaaataaaaactgtattaaatgttgcattcattttgtcatcttctttaaccagctcagattatttgatgtatagaactttgtgagaatgtgataaaaacccagaattggacacagtgataaaaagttgtttttaagaaatgctgggattacaggcgtgcgccaccgtgcctggctaaatcctttcttgtaatgaaacctacctgggttttagccctcttgctgcaagaatgactttatttttaaataaaataaagcaaatccattgactttggataagtgttttaagaactaagtttctgatataataaaacaacctccaaaagatacctcattgcagattttcgccaggattcaggtgcttaggttttggcacatatcttcctcactttttcctatagtgtttttaacctgttataattggaatgatagagatgtatttcagaattttgcatggtccaaatcaatgatttttctttttaatatgtaaagtatttcattaacagtgtagattctttctgatgtttggggagccatgtttaaaaatgtagtatggagcaattgaaaaaggggtctttttccctagcctaattcttactaatctcagaaaacaaagatcaaatagactgtgaagttgaactagtcctcttagtgtagtaaccaaatttaggaaagatcaggataatttaggaaggaaagtaatcatttatttaattatttataattataaacaattattttatgttttgtatattttatgtataaaacaattacatgttttattatagttatacttcttcagagagtagattatggagccaccatgtccatacagttagttgttccttggtattcttggattgattccaggaccccccacagttacccaaatccacagatgctgaagtctctgatataaaatggagtagtatttgcatttaacctatggacatcctcctgtatgctttaaatcatctctagattacttataatacctaatacaatataaatataaatgctctgtaaatagttttattgtatagtgtgtgtgtgtgttttaagagacgaggactcacaatgggacactttgaccaggctggtctcgaactcctgggcctacacaatcctcccacctcggcgtcgcaagtagctgggactacaggtactcaccactatgcctggcagttttttaaatttgcgtttttaaaaattgtttattatttattgaatattttctacctgagattgacttaatctgtggatatggaacctatagatatggagggctggctgtatatgaatttgtttttggcttttacaaaattagaaattaaaagtaactacagttactataatgtgcagaatgactcaaatatttccatttattatgttagtgtaaaaactcctaactacgtattataatattttatattaatgaagtactttagcatacattatgagcctgaataaagctttttattaaatattcacaagattgaaggagaaattctttatagttaggaaatgattttttcataaacaataaatagctttgaaaatataaaaaaaaatttagggctgggtgcagaggctcatgcctgtantcccagcactctgagaggccgaggcgggtggatcacttgaggtgaggagttcaagatcagcatggccaacatggtgaaactccacctccacgaaaaatacaaaaattagccaggcatggtggcatgcgcctgtaatcctagctacttgggtggctgaggcatgagactcacttgaacctgggaggcagaggttgcagcagtgagccgagatcaagccgctgcactccagctggggcgacaaagcaagactgtctcaaaaaataaaaacaaaaaaattaaaataaaatcctaactttcctagttagaaatataattaacttttattggctattagtagctaaaattgcccttatttttgcttctgtggcctcattttttttctcggttattcagtatttaaattatggcttagatgtcttcaatgctatagtcctnaaaattaatgatctacgttgtgcagcagtgatgggatctgataaactgagtctgatgatggagtttagatttatttcctttaccttgcatttggaactttgaatctcttaaatgtggttttggtctagtccactggttctcacgttgtaatgtgcatcagaatcttctgaagacacagattgctgattatgtagacctggggtggaggtccaagaatgtgcattccttgcaaattcccaggtggtgatgctgcagagccacactttgagaatcactagtataatccagtatgctcttccagcatcacaccttccttcctgagaatcacaggagttgtgaactgcagattagcattggggagaatttagatcaaactaatttgtagaatcaaggaggtcaagtaaggtcacaggggcacttgggttgagccagggttttagcccaggtcttctgacaactgcctcatgtccttaccacaaaggagctgctatcctttgcctttccccaaagagtgaagactgcttaaagctcaaggatctttcttgaatttgtgaaatttgttcaggcaaggtgaaaagcaaaaacctatggttcacattgactttttgtattgatcattgtcttttgaagacaggaagtatgatcagtctctgccacttgtgctagtttttgtgtggtgtttagaaacatgggcatttgtctggatcctaattacaaataagtaacctagaattctcttcagatagtgcactaacagcaatgaatctattctaaatttcaaatatccaaattaaaatgactgtattagcataagtactgaaatggataatacaataaatgtattaatggaattgtttttgtgcatgatacagaaataaatgatagtaacgaaact

SEQ ID NO: 433656 - DNA, 7297 bp, Homo sapiens
  misc_feature (5967)..(5967): n is a, c, g, or t
  misc_feature (6402)..(6402): n is a, c, g, or t
ctcctagttctggcacctgtactatattatcgattttaagattttaaatggatgaataggaatcacctaattcatgacaggagctgtgatgaaatgtgaagaatgccatgttaactgatatctcgaagtccacatatggtagaattagcaacatcagagggaagaacgtctgtgaaccaagttagagtgtttactgtaccagtggagacttgttgaatctttattagctatatgcaacaaaactatacatacttttaaaaatttatgtttgagaaaaaaattgtttgctacttttcagaaaaaacaaggagagaaatgacagccaaaggttctacaggaatggaaattctgctgtcaacattagagaacacaaaagatcttcaaactacacttaatatcttaagcattcttgttgagctggtgtcagctggtggaggtcgaagagtgagtttcttagtcaccaaaggtggttcacaaatattgttgcagttacttatgaatgccagcaaagaatctcccccacatgaggacttaatggtacagattcattctattcttgcaaagattggaccaaaagataaaaaatttggagtaaaggctagaattaatggggctctgaatataaccctgaatttggtcaagcagaatttgcagaatcatcgcttggttctaccttgccttcagcttttacgagtatattctgccaactctgtgaattcagtatccttagggaaaaatggagttgtggaactgatgtttaaaatcattggaccatttagtaagaagaattccagtcttataaaggttgctttagacactcttgctgcattgctaaaatcaaaaacaaatgccaggagagctgtagacagaggatatgtccaagtgcttttaacaatttatgtagattggcaccgccatgataaccggcatagaaacatgctcattcggaaaggaattttacagagtttaaaaagtgttacaaacatcaagttgggaagaaaagcatttattgatgccaatgggatgaaaattctgtataatacttcgcaagaatgtctggcagtcaggactctggatcctcttgtcaatacctccagtctgataatgaggaagtgtttcccaaaaaatcgactgccactcccaacaattaaaagttcttttcatttccagttgcctgttattcctgtgactggtcctgtggctcagctctacagcttacctcctgaagtggatgacgtagtagatgaaagtgatgacaacgatgatattgatgtagaagctgaaaacgaaactgagaatgaagatgacctagatcaaaattttaagaatgatgatattgaaacagatattaacaaactaaaaccccagcaagaaccgggacgaacaatagaagatctaaaaatgtatgaacaccttttccctgagcttgttgatgattttcaggactatgatttaatctccaaagaaccaaagccttttgtatttgagggaaaagtacgtggtcctattgttgttcctacggcaggcgaggaaacatctgggaattctggcaatttaagaaaagttgtaatgaaggagaacatatcttctaaaggagatgaaggtgaaaagaagtctacctttatggatctagcaaaagaagatattaaagataatgatagaacattacaacagcagccaggtgatcaaaatagaactatttcatcagtccatggtttaaacaatgatattgtaaaggccttggaccgaattacattgcagaatattccttctcaaacagccccaggttttactgcagaaatgaagaaggactgcagtcttcctcttactgtccttacctgtgctaaagcatgtccacacatggctacttgtggaaatgttctgtttgagggaagaacagttcagctagggaagctttgctgcactggagttgaaactgaagatgatgaagatactgagtcaaattcatcggtagaacaagcatcggttgaagtacctgatggaccaacactccatgacccagacctctatattgagattgtgaaaaatacgaagtctgtcccagaatattcagaggtggcttatcccgattattttggtcacattccgcctccattcaaagagcctattttagaaaggccttatggtgtacaaaggacaaaaattgctcaagatattgaaaggctaatacatcagagtgatatcatagatcgtgtggtatatgacttggataacccaaattacaccattccagaagagggagatattttgaaatttaactccaaatttgagtctgggaatctgcgcaaagtaattcaaattagaaaaaatgaatatgatcttattctgaactcagacataaacagcaatcattatcatcagtggttttactttgaagtcagtggaatgcgaccaggtgttgcttacaggtttaacatcattaactgtgaaaagtccaacagtcagtttaattatggtatgcaaccactcatgtattcggttcaggaagcattaaatgccagaccatggtggattcgtatggggactgacatttgttactataaaaatcatttctcaagaagttcagttgctgcaggtgggcaaaagggaaaatcctactatacaattacatttactgtcaattttccacataaagatgatgtttgctactttgcttatcactatccatatacgtattcaactttacagatgcatcttcaaaaattggaatcagcacacaatcctcagcaaatctattttcggaaagatgtgttatgtgaaaccctgtctggaaacagctgccccttggtgactataacagcaatgccagagtctaattattatgaacatatctgccatttcagaaatcgcccttacgttttcttgtctgctcgggtacatcctggagaaactaatgcaagttgggttatgaaaggaacgttggaatatctcatgagcaataaccccactgctcagagcttacgagaatcttatatttttaaaattgtccctatgttaaatccagatggtgtcatcaatggaaatcatcgctgttctttaagtggagaggatttgaataggcagtggcaaagtccaagtccggatttacatcctacaatttaccatgctaaggggctgttgcaatacttggctgcagtgaagcgtttacccttggtttattgtgattatcatggccattcccgaaagaagaatgtatttatgtatggttgcagcatcaaagagacagtgtggcataccaatgataatgcaacttcatgtgatgttgtggaggatacgggatacaggacattgcctaagatactgagccatatcgccccagcattttgcatgagcagctgtagcttcgtagtggaaaaatctaaagaatccacagcacgtgttgtagtttggagggaaataggagtacaaagaagttataccatggagagtactttatgtggctgtgatcagggaaaatacaagggtttacagattggtacccgagaactggaagagatgggagcaaaattttgtgttggtcttttacgtttgaaaagactgacctctccattggagtataatctgccttccagcctgcttgactttgaaaatgatttaattgaatcaagctgcaaagtaactagccctaccacttatgtcttggatgaagatgaacctcgattccttgaagaagttgattacagtgcagaaagtaatgatgagttagatattgagttggctgaaaatgtaggagattatgaaccttctgctcaagaagaagtactttctgactctgaattatcaagaacatacctaccttgagcccgctgccatctcttgttaactgcaaagaataaatgaaatatcttggtttttatttcccaggaagcttgagagaaatgagtttatacagagctgactcaaaaagacaaaaagtaacttgggccagtttggtttcaagataataaatgtgttattaattaatgataaaattggcgcttgttttattttcgatattcaatgcactttatgtagcattgaatgatcaaatattggatttacctttaaaaaaaaaacctgagtatcattgcatgaatttttatctccctatggttatatcctgcatcaagtggataattttgaagtgtgttcagaatataaaattgaaattttagagttgttgaaaatcctgacttgttgaaaactaatatatatgtacatggatttctatagatgtgtttgtttagaagtgggtagatattgcagataagactgttcttcagaatcatgttaactattgggttgtgactgaagtagtccagggtttgccttgaaaccattacattctacatttaccaaattaaacaaataaaaactgtattaaatgttgcattcattttgtcatcttctttaaccagctcagattatttgatgtatagaactttgtgagaatgtgataaaaacccagaattggacacagtgataaaaagttgtttttaagaaatgctgggattacaggcgtgcgccaccgtgcctggctaaatcctttcttgtaatgaaacctacctgggttttagccctcttgctgcaagaatgactttatttttaaataaaataaagcaaatccattgactttggataagtgttttaagaactaagtttctgatataataaaacaacctccaaaagatacctcattgcagattttcgccaggattcaggtgcttaggttttggcacatatcttcctcactttttcctatagtgtttttaacctgttataattggaatgatagagatgtatttcagaattttgcatggtccaaatcaatgatttttctttttaatatgtaaagtatttcattaacagtgtagattctttctgatgtttggggagccatgtttaaaaatgtagtatggagcaattgaaaaaggggtctttttccctagcctaattcttactaatctcagaaaacaaagatcaaatagactgtgaagttgaactagtcctcttagtgtagtaaccaaatttaggaaagatcaggataatttaggaaggaaagtaatcatttatttaattatttataattataaacaattattttatgttttgtatattttatgtataaaacaattacatgttttattatagttatacttcttcagagagtagattatggagccaccatgtccatacagttagttgttccttggtattcttggattgattccaggaccccccacagttacccaaatccacagatgctgaagtctctgatataaaatggagtagtatttgcatttaacctatggacatcctcctgtatgctttaaatcatctctagattacttataatacctaatacaatataaatataaatgctctgtaaatagttttattgtatagtgtgtgtgtgtgttttaagagacgaggactcacaatgggacactttgaccaggctggtctcgaactcctgggcctacacaatcctcccacctcggcgtcgcaagtagctgggactacaggtactcaccactatgcctggcagttttttaaatttgcgtttttaaaaattgtttattatttattgaatattttctacctgagattgacttaatctgtggatatggaacctatagatatggagggctggctgtatatgaatttgtttttggcttttacaaaattagaaattaaaagtaactacagttactataatgtgcagaatgactcaaatatttccatttattatgttagtgtaaaaactcctaactacgtattataatattttatattaatgaagtactttagcatacattatgagcctgaataaagctttttattaaatattcacaagattgaaggagaaattctttatagttaggaaatgattttttcataaacaataaatagctttgaaaatataaaaaaaaatttagggctgggtgcagaggctcatgcctgtantcccagcactctgagaggccgaggcgggtggatcacttgaggtgaggagttcaagatcagcatggccaacatggtgaaactccacctccacgaaaaatacaaaaattagccaggcatggtggcatgcgcctgtaatcctagctacttgggtggctgaggcatgagactcacttgaacctgggaggcagaggttgcagcagtgagccgagatcaagccgctgcactccagctggggcgacaaagcaagactgtctcaaaaaataaaaacaaaaaaattaaaataaaatcctaactttcctagttagaaatataattaacttttattggctattagtagctaaaattgcccttatttttgcttctgtggcctcattttttttctcggttattcagtatttaaattatggcttagatgtcttcaatgctatagtcctnaaaattaatgatctacgttgtgcagcagtgatgggatctgataaactgagtctgatgatggagtttagatttatttcctttaccttgcatttggaactttgaatctcttaaatgtggttttggtctagtccactggttctcacgttgtaatgtgcatcagaatcttctgaagacacagattgctgattatgtagacctggggtggaggtccaagaatgtgcattccttgcaaattcccaggtggtgatgctgcagagccacactttgagaatcactagtataatccagtatgctcttccagcatcacaccttccttcctgagaatcacaggagttgtgaactgcagattagcattggggagaatttagatcaaactaatttgtagaatcaaggaggtcaagtaaggtcacaggggcacttgggttgagccagggttttagcccaggtcttctgacaactgcctcatgtccttaccacaaaggagctgctatcctttgcctttccccaaagagtgaagactgcttaaagctcaaggatctttcttgaatttgtgaaatttgttcaggcaaggtgaaaagcaaaaacctatggttcacattgactttttgtattgatcattgtcttttgaagacaggaagtatgatcagtctctgccacttgtgctagtttttgtgtggtgtttagaaacatgggcatttgtctggatcctaattacaaataagtaacctagaattctcttcagatagtgcactaacagcaatgaatctattctaaatttcaaatatccaaattaaaatgactgtattagcataagtactgaaatggataatacaataaatgtattaatggaattgtttttgtgcatgatacagaaataaatgatagtaacgaaact

SEQ ID NO: 433657 - DNA, 4379 bp, Homo sapiens
  misc_feature (4364)..(4364): n is a, c, g, or t
cggggtttgtatgaaaacaccgggcggcgggcggcgagggatccgccgtgatccaggtgctgagccgggtgctgcggctctgcgcggtccccgccagcgccccatcctgagccgattatctgcaattatgaaatgaagtaactcaagatgagcaagttaaaagtgataccagaaaaaagccttaccaataattctaggatcgtaggactcctggctcaactggagaagatcaatgctgagccttcagaatcagacactgcccgatatgttacatcaaaaattcttcatctggctcagagtcaagaaaaaacaaggagagaaatgacagccaaaggttctacaggaatggaaattctgctgtcaacattagaggtggaggtcgaagagtgagtttcttagtcaccaaaggtggttcacaaatattgttgcagttacttatgaatgccagcaaagaatctcccccacatgaggacttaatggtacagattcattctattcttgcaaagattggaccaaaagataaaaaatttggagtaaaggctagaattaatggggctctgaatataaccctgaatttggtcaagcagaatttgcagaatcatcgcttggttctaccttgccttcagcttttacgagtatattctgccaactctgtgaattcagtatccttagggaaaaatggagttgtggaactgatgtttaaaatcattggaccatttagtaagaagaattccagtcttataaaggttgctttagacactcttgctgcattgctaaaatcaaaaacaaatgccaggagagctgtagacagaggatatgtccaagtgcttttaacaatttatgtagattggcaccgccatgataaccggcatagaaacatgctcattcggaaaggaattttacagagtttaaaaagtgttacaaacatcaagttgggaagaaaagcatttattgatgccaatgggatgaaaattctgtataatacttcgcaagaatgtctggcagtcaggactctggatcctcttgtcaatacctccagtctgataatgaggaagtgtttcccaaaaaatcgactgccactcccaacaattaaaagttcttttcatttccagttgcctgttattcctgtgactggtcctgtggctcagctctacagcttacctcctgaagtggatgacgtagtagatgaaagtgatgacaacgatgatattgatgtagaagctgaaaacgaaactgagaatgaagatgacctagatcaaaattttaagaatgatgatattgaaacagatattaacaaactaaaaccccagcaagaaccgggacgaacaatagaagatctaaaaatgtatgaacaccttttccctgagcttgttgatgattttcaggactatgatttaatctccaaagaaccaaagccttttgtatttgagggaaaagtacgtggtcctattgttgttcctacggcaggcgaggaaacatctgggaattctggcaatttaagaaaagttgtaatgaaggagaacatatcttctaaaggagatgaaggtgaaaagaagtctacctttatggatctagcaaaagaagatattaaagataatgatagaacattacaacagcagccaggtgatcaaaatagaactatttcatcagtccatggtttaaacaatgatattgtaaaggccttggaccgaattacattgcagaatattccttctcaaacagccccaggttttactgcagaaatgaagaaggactgcagtcttcctcttactgtccttacctgtgctaaagcatgtccacacatggctacttgtggaaatgttctgtttgagggaagaacagttcagctagggaagctttgctgcactggagttgaaactgaagatgatgaagatactgagtcaaattcatcggtagaacaagcatcggttgaagtacctgatggaccaacactccatgacccagacctctatattgagattgtgaaaaatacgaagtctgtcccagaatattcagaggtggcttatcccgattattttggtcacattccgcctccattcaaagagcctattttagaaaggccttatggtgtacaaaggacaaaaattgctcaagatattgaaaggctaatacatcagagtgatatcatagatcgtgtggtatatgacttggataacccaaattacaccattccagaagagggagatattttgaaatttaactccaaatttgagtctgggaatctgcgcaaagtaattcaaattagaaaaaatgaatatgatcttattctgaactcagacataaacagcaatcattatcatcagtggttttactttgaagtcagtggaatgcgaccaggtgttgcttacaggtttaacatcattaactgtgaaaagtccaacagtcagtttaattatggtatgcaaccactcatgtattcggttcaggaagcattaaatgccagaccatggtggattcgtatggggactgacatttgttactataaaaatcatttctcaagaagttcagttgctgcaggtgggcaaaagggaaaatcctactatacaattacatttactgtcaattttccacataaagatgatgtttgctactttgcttatcactatccatatacgtattcaactttacagatgcatcttcaaaaattggaatcagcacacaatcctcagcaaatctattttcggaaagatgtgttatgtgaaaccctgtctggaaacagctgccccttggtgactataacagcaatgccagagtctaattattatgaacatatctgccatttcagaaatcgcccttacgttttcttgtctgctcgggtacatcctggagaaactaatgcaagttgggttatgaaaggaacgttggaatatctcatgagcaataaccccactgctcagagcttacgagaatcttatatttttaaaattgtccctatgttaaatccagatggtgtcatcaatggaaatcatcgctgttctttaagtggagaggatttgaataggcagtggcaaagtccaagtccggatttacatcctacaatttaccatgctaaggggctgttgcaatacttggctgcagtgaagcgtttacccttggtttattgtgattatcatggccattcccgaaagaagaatgtatttatgtatggttgcagcatcaaagagacagtgtggcataccaatgataatgcaacttcatgtgatgttgtggaggatacgggatacaggacattgcctaagatactgagccatatcgccccagcattttgcatgagcagctgtagcttcgtagtggaaaaatctaaagaatccacagcacgtgttgtagtttggagggaaataggagtacaaagaagttataccatggagagtactttatgtggctgtgatcagggaaaatacaagggtttacagattggtacccgagaactggaagagatgggagcaaaattttgtgttggtcttttacgtttgaaaagactgacctctccattggagtataatctgccttccagcctgcttgactttgaaaatgatttaattgaatcaagctgcaaagtaactagccctaccacttatgtcttggatgaagatgaacctcgattccttgaagaagttgattacagtgcagaaagtaatgatgagttagatattgagttggctgaaaatgtaggagattatgaaccttctgctcaagaagaagtactttctgactctgaattatcaagaacatacctaccttgagcccgctgccatctcttgttaactgcaaagaataaatgaaatatcttggtttttatttcccaggaagcttgagagaaatgagtttatacagagctgactcaaaaagacaaaaagtaacttgggccagtttggtttcaagataataaatgtgttattaattaatgataaaattggcgcttgttttattttcgatattcaatgcactttatgtagcattgaatgatcaaatattggatttacctttaaaaaaaaaacctgagtatcattgcatgaatttttatctccctatggttatatcctgcatcaagtggataattttgaagtgtgttcagaatataaaattgaaattttagagttgttgaaaatcctgacttgttgaaaactaatatatatgtacatggatttctatagatgtgtttgtttagaagtgggtagatattgcagataagactgttcttcagaatcatgttaactattgggttgtgactgaagtagtccagggtttgccttgaaaccattacattctacatttaccaaattaaacaaataaaaactgtatctggcctcgttggcctcagcggtggagctctgcggccggancaccccccatctccc

SEQ ID NO: 433658 - DNA, 3993 bp, Homo sapiens
cggggtttgtatgaaaacaccgggcggcgggcggcgagggatccgccgtgatccaggtgctgagccgggtgctgcggctctgcgcggtccccgccagcgccccatcctgagccgattatctgcaattatgaaatgaagtaactcaagatgagcaagttaaaagtgataccagaaaaaagccttaccaataattctaggatcgtaggactcctggctcaactggagaagatcaatgctgagccttcagaatcagacactgcccgatatgttacatcaaaaattcttcatctggctcagagtcaagaaaaaacaaggagagaaatgacagccaaaggttctacaggaatggaaattctgctgtcaacattagaggtggaggtcgaagagtgagtttcttagtcaccaaaggtggttcacaaatattgttgcagttacttatgaatgccagcaaagaatctcccccacatgaggacttaatggtacagattcattctattcttgcaaagattggaccaaaagataaaaaatttggagtaaaggctagaattaatggggctctgaatataaccctgaatttggtcaagcagaatttgcagaatcatcgcttggttctaccttgccttcagcttttacgagtatattctgccaactctgtgaattcagtatccttagggaaaaatggagttgtggaactgatgtttaaaatcattggaccatttagtaagaagaattccagtcttataaaggttgctttagacactcttgctgcattgctaaaatcaaaaacaaatgccaggagagctgtagacagaggatatgtccaagtgcttttaacaatttatgtagattggcaccgccatgataaccggcatagaaacatgctcattcggaaaggaattttacagagtttaaaaagtgttacaaacatcaagttgggaagaaaagcatttattgatgccaatgggatgaaaattctgtataatacttcgcaagaatgtctggcagtcaggactctggatcctcttgtcaatacctccagtctgataatgaggaagtgtttcccaaaaaatcgactgccactcccaacaattaaaagttcttttcatttccagttgcctgttattcctgtgactggtcctgtggctcagctctacagcttacctcctgaagtggatgacgtagtagatgaaagtgatgacaacgatgatattgatgtagaagctgaaaacgaaactgagaatgaagatgacctagatcaaaattttaagaatgatgatattgaaacagatattaacaaactaaaaccccagcaagaaccgggacgaacaatagaagatctaaaaatgtatgaacaccttttccctgagcttgttgatgattttcaggactatgatttaatctccaaagaaccaaagccttttgtatttgagggaaaagtacgtggtcctattgttgttcctacggcaggcgaggaaacatctgggaattctggcaatttaagaaaagttgtaatgaaggagaacatatcttctaaaggagatgaaggtgaaaagaagtctacctttatggatctagcaaaagaagatattaaagataatgatagaacattacaacagcagccaggtgatcaaaatagaactatttcatcagtccatggtttaaacaatgatattgtaaaggccttggaccgaattacattgcagaatattccttctcaaacagccccaggttttactgcagaaatgaagaaggactgcagtcttcctcttactgtccttacctgtgctaaagcatgtccacacatggctacttgtggaaatgttctgtttgagggaagaacagttcagctagggaagctttgctgcactggagttgaaactgaagatgatgaagatactgagtcaaattcatcggtagaacaagcatcggttgaagtacctgatggaccaacactccatgacccagacctctatattgagattgtgaaaaatacgaagtctgtcccagaatattcagaggtggcttatcccgattattttggtcacattccgcctccattcaaagagcctattttagaaaggccttatggtgtacaaaggacaaaaattgctcaagatattgaaaggctaatacatcagagtgatatcatagatcgtgtggtatatgacttggataacccaaattacaccattccagaagagggagatattttgaaatttaactccaaatttgagtctgggaatctgcgcaaagtaattcaaattagaaaaaatgaatatgatcttattctgaactcagacataaacagcaatcattatcatcagtggttttactttgaagtcagtggaatgcgaccaggtgttgcttacaggtttaacatcattaactgtgaaaagtccaacagtcagtttaattatggtatgcaaccactcatgtattcggttcaggaagcattaaatgccagaccatggtggattcgtatggggactgacatttgttactataaaaatcatttctcaagaagttcagttgctgcaggtgggcaaaagggaaaatcctactatacaattacatttactgtcaattttccacataaagatgatgtttgctactttgcttatcactatccatatacgtattcaactttacagatgcatcttcaaaaattggaatcagcacacaatcctcagcaaatctattttcggaaagatgtgttatgtgaaaccctgtctggaaacagctgccccttggtgactataacagcaatgccagagtctaattattatgaacatatctgccatttcagaaatcgcccttacgttttcttgtctgctcgggtacatcctggagaaactaatgcaagttgggttatgaaaggaacgttggaatatctcatgagcaataaccccactgctcagagcttacgagaatcttatatttttaaaattgtccctatgttaaatccagatggtgtcatcaatggaaatcatcgctgttctttaagtggagaggatttgaataggcagtggcaaagtccaagtccggatttacatcctacaatttaccatgctaaggggctgttgcaatacttggctgcagtgaagcgtttacccttggtttattgtgattatcatggccattcccgaaagaagaatgtatttatgtatggttgcagcatcaaagagacagtgtggcataccaatgataatgcaacttcatgtgatgttgtggaggatacgggatacaggacattgcctaagatactgagccatatcgccccagcattttgcatgagcagctgtagcttcgtagtggaaaaatctaaagaatccacagcacgtgttgtagtttggagggaaataggagtacaaagaagttataccatggagagtactttatgtggctgtgatcagggaaaatacaagggtttacagattggtacccgagaactggaagagatgggagcaaaattttgtgttggtcttttacgtttgaaaagactgacctctccattggagtataatctgccttccagcctgcttgactttgaaaatgatttaattgaatcaagctgcaaagtaactaggaaccttggcagctctgaacttcagtttttgcctccaatcctttgaaattgctgaaagctctgatgacttctctgcctctaacagctgcccttgcttggcctgggttccactggactttgccccacgcacctttttttctttgctgattttgctttgtatcctttcactgtaataagtcataactgaattcaactgtgtgctgagtcctgtgagtcttcctagcaaatcactaaccctatggtggtcttgggacccctgataagcatgttcattctgaatttctgtaaaggttggttatcccagaggttctaatgttctactgagaatgatcagagacagatggtattatgatccttttatggatgtgtgcagctgaggctgaaagagagaaatttacctgaggcca

SEQ ID NO: 433659 - DNA, 3715 bp, Homo sapiens
  misc_feature (2385)..(2385): n is a, c, g, or t
  misc_feature (2820)..(2820): n is a, c, g, or t
cttgatagttagtcctttgtatctctatataacccgcgcgggagagaagctcgctagtccccccctaccacttatgtcttggatgaagatgaacctcgattccttgaagaagttgattacagtgcagaaagtaatgatgagttagatattgagttggctgaaaatgtaggagattatgaaccttctgctcaagaagaagtactttctgactctgaattatcaagaacatacctaccttgagcccgctgccatctcttgttaactgcaaagaataaatgaaatatcttggtttttatttcccaggaagcttgagagaaatgagtttatacagagctgactcaaaaagacaaaaagtaacttgggccagtttggtttcaagataataaatgtgttattaattaatgataaaattggcgcttgttttattttcgatattcaatgcactttatgtagcattgaatgatcaaatattggatttacctttaaaaaaaaaacctgagtatcattgcatgaatttttatctccctatggttatatcctgcatcaagtggataattttgaagtgtgttcagaatataaaattgaaattttagagttgttgaaaatcctgacttgttgaaaactaatatatatgtacatggatttctatagatgtgtttgtttagaagtgggtagatattgcagataagactgttcttcagaatcatgttaactattgggttgtgactgaagtagtccagggtttgccttgaaaccattacattctacatttaccaaattaaacaaataaaaactgtattaaatgttgcattcattttgtcatcttctttaaccagctcagattatttgatgtatagaactttgtgagaatgtgataaaaacccagaattggacacagtgataaaaagttgtttttaagaaatgctgggattacaggcgtgcgccaccgtgcctggctaaatcctttcttgtaatgaaacctacctgggttttagccctcttgctgcaagaatgactttatttttaaataaaataaagcaaatccattgactttggataagtgttttaagaactaagtttctgatataataaaacaacctccaaaagatacctcattgcagattttcgccaggattcaggtgcttaggttttggcacatatcttcctcactttttcctatagtgtttttaacctgttataattggaatgatagagatgtatttcagaattttgcatggtccaaatcaatgatttttctttttaatatgtaaagtatttcattaacagtgtagattctttctgatgtttggggagccatgtttaaaaatgtagtatggagcaattgaaaaaggggtctttttccctagcctaattcttactaatctcagaaaacaaagatcaaatagactgtgaagttgaactagtcctcttagtgtagtaaccaaatttaggaaagatcaggataatttaggaaggaaagtaatcatttatttaattatttataattataaacaattattttatgttttgtatattttatgtataaaacaattacatgttttattatagttatacttcttcagagagtagattatggagccaccatgtccatacagttagttgttccttggtattcttggattgattccaggaccccccacagttacccaaatccacagatgctgaagtctctgatataaaatggagtagtatttgcatttaacctatggacatcctcctgtatgctttaaatcatctctagattacttataatacctaatacaatataaatataaatgctctgtaaatagttttattgtatagtgtgtgtgtgtgttttaagagacgaggactcacaatgggacactttgaccaggctggtctcgaactcctgggcctacacaatcctcccacctcggcgtcgcaagtagctgggactacaggtactcaccactatgcctggcagttttttaaatttgcgtttttaaaaattgtttattatttattgaatattttctacctgagattgacttaatctgtggatatggaacctatagatatggagggctggctgtatatgaatttgtttttggcttttacaaaattagaaattaaaagtaactacagttactataatgtgcagaatgactcaaatatttccatttattatgttagtgtaaaaactcctaactacgtattataatattttatattaatgaagtactttagcatacattatgagcctgaataaagctttttattaaatattcacaagattgaaggagaaattctttatagttaggaaatgattttttcataaacaataaatagctttgaaaatataaaaaaaaatttagggctgggtgcagaggctcatgcctgtantcccagcactctgagaggccgaggcgggtggatcacttgaggtgaggagttcaagatcagcatggccaacatggtgaaactccacctccacgaaaaatacaaaaattagccaggcatggtggcatgcgcctgtaatcctagctacttgggtggctgaggcatgagactcacttgaacctgggaggcagaggttgcagcagtgagccgagatcaagccgctgcactccagctggggcgacaaagcaagactgtctcaaaaaataaaaacaaaaaaattaaaataaaatcctaactttcctagttagaaatataattaacttttattggctattagtagctaaaattgcccttatttttgcttctgtggcctcattttttttctcggttattcagtatttaaattatggcttagatgtcttcaatgctatagtcctnaaaattaatgatctacgttgtgcagcagtgatgggatctgataaactgagtctgatgatggagtttagatttatttcctttaccttgcatttggaactttgaatctcttaaatgtggttttggtctagtccactggttctcacgttgtaatgtgcatcagaatcttctgaagacacagattgctgattatgtagacctggggtggaggtccaagaatgtgcattccttgcaaattcccaggtggtgatgctgcagagccacactttgagaatcactagtataatccagtatgctcttccagcatcacaccttccttcctgagaatcacaggagttgtgaactgcagattagcattggggagaatttagatcaaactaatttgtagaatcaaggaggtcaagtaaggtcacaggggcacttgggttgagccagggttttagcccaggtcttctgacaactgcctcatgtccttaccacaaaggagctgctatcctttgcctttccccaaagagtgaagactgcttaaagctcaaggatctttcttgaatttgtgaaatttgttcaggcaaggtgaaaagcaaaaacctatggttcacattgactttttgtattgatcattgtcttttgaagacaggaagtatgatcagtctctgccacttgtgctagtttttgtgtggtgtttagaaacatgggcatttgtctggatcctaattacaaataagtaacctagaattctcttcagatagtgcactaacagcaatgaatctattctaaatttcaaatatccaaattaaaatgactgtattagcataagtactgaaatggataatacaataaatgtattaatggaattgtttttgtgcatgatacagaaataaatgatagtaacgaaact

SEQ ID NO: 433660 - DNA, 700 bp, Homo sapiens
acagttcttcctcttccagtgtggcccagggaaacaaaaagattagacaacccgatttacacatcttttgaaaaaattcccagcatatagcacagtatgtggcacatgactgtcattgaaacaaatagggggtcaattataaagggatgaagtgagtcattgaaatttataataaatagaaaacaggatgtttcattcaggctatcgcaacataagacattatttttaaaaactgagaacattagtaaaattcacctttacagtgctttccaaattttgaagcactttcttatatggtcccatgggtttgtcaacagctgggacagccttagagagatgttaaataagaaatctcatttactttttctctggtgattgaaatactttatataagtcacattctaccattggctatgcatattgtagaatgcttacctctgacctacttatagcacattttgtatcatagtggatgacgtagtagatgaaagtgatgacaacgatgatattgatgtagaagctgaaaacgaaactgagaatgaagatgacctagatcaaaattttaaggttagtataaatttctgtaattagttagctttataaatgatatactacagttgtaaaacaaaaattgggtaaataaatatatatgtaattttaggttttactttgtccacatctttttaccatgaatgactat

SEQ ID NO: 433661 - DNA, 7239 bp, Homo sapiens
  misc_feature (5909)..(5909): n is a, c, g, or t
  misc_feature (6344)..(6344): n is a, c, g, or t
cggggtttgtatgaaaacaccgggcggcgggcggcgagggatccgccgtgatccaggtgctgagccgggtgctgcggctctgcgcggtccccgccagcgccccatcctgagccgattatctgcaattatgaaatgaagtaactcaagatgagcaagttaaaagtgataccagaaaaaagccttaccaataattctaggatcgtaggactcctggctcaactggagaagatcaatgctgagccttcagaatcagacactgcccgatatgttacatcaaaaattcttcatctggctcagagtcaagaaaaaacaaggagagaaatgacagccaaaggttctacaggaatggaaattctgctgtcaacattagaggtggaggtcgaagagtgagtttcttagtcaccaaaggtggttcacaaatattgttgcagttacttatgaatgccagcaaagaatctcccccacatgaggacttaatggtacagattcattctattcttgcaaagattggaccaaaagataaaaaatttggagtaaaggctagaattaatggggctctgaatataaccctgaatttggtcaagcagaatttgcagaatcatcgcttggttctaccttgccttcagcttttacgagtatattctgccaactctgtgaattcagtatccttagggaaaaatggagttgtggaactgatgtttaaaatcattggaccatttagtaagaagaattccagtcttataaaggttgctttagacactcttgctgcattgctaaaatcaaaaacaaatgccaggagagctgtagacagaggatatgtccaagtgcttttaacaatttatgtagattggcaccgccatgataaccggcatagaaacatgctcattcggaaaggaattttacagagtttaaaaagtgttacaaacatcaagttgggaagaaaagcatttattgatgccaatgggatgaaaattctgtataatacttcgcaagaatgtctggcagtcaggactctggatcctcttgtcaatacctccagtctgataatgaggaagtgtttcccaaaaaatcgactgccactcccaacaattaaaagttcttttcatttccagttgcctgttattcctgtgactggtcctgtggctcagctctacagcttacctcctgaagtggatgacgtagtagatgaaagtgatgacaacgatgatattgatgtagaagctgaaaacgaaactgagaatgaagatgacctagatcaaaattttaagaatgatgatattgaaacagatattaacaaactaaaaccccagcaagaaccgggacgaacaatagaagatctaaaaatgtatgaacaccttttccctgagcttgttgatgattttcaggactatgatttaatctccaaagaaccaaagccttttgtatttgagggaaaagtacgtggtcctattgttgttcctacggcaggcgaggaaacatctgggaattctggcaatttaagaaaagttgtaatgaaggagaacatatcttctaaaggagatgaaggtgaaaagaagtctacctttatggatctagcaaaagaagatattaaagataatgatagaacattacaacagcagccaggtgatcaaaatagaactatttcatcagtccatggtttaaacaatgatattgtaaaggccttggaccgaattacattgcagaatattccttctcaaacagccccaggttttactgcagaaatgaagaaggactgcagtcttcctcttactgtccttacctgtgctaaagcatgtccacacatggctacttgtggaaatgttctgtttgagggaagaacagttcagctagggaagctttgctgcactggagttgaaactgaagatgatgaagatactgagtcaaattcatcggtagaacaagcatcggttgaagtacctgatggaccaacactccatgacccagacctctatattgagattgtgaaaaatacgaagtctgtcccagaatattcagaggtggcttatcccgattattttggtcacattccgcctccattcaaagagcctattttagaaaggccttatggtgtacaaaggacaaaaattgctcaagatattgaaaggctaatacatcagagtgatatcatagatcgtgtggtatatgacttggataacccaaattacaccattccagaagagggagatattttgaaatttaactccaaatttgagtctgggaatctgcgcaaagtaattcaaattagaaaaaatgaatatgatcttattctgaactcagacataaacagcaatcattatcatcagtggttttactttgaagtcagtggaatgcgaccaggtgttgcttacaggtttaacatcattaactgtgaaaagtccaacagtcagtttaattatggtatgcaaccactcatgtattcggttcaggaagcattaaatgccagaccatggtggattcgtatggggactgacatttgttactataaaaatcatttctcaagaagttcagttgctgcaggtgggcaaaagggaaaatcctactatacaattacatttactgtcaattttccacataaagatgatgtttgctactttgcttatcactatccatatacgtattcaactttacagatgcatcttcaaaaattggaatcagcacacaatcctcagcaaatctattttcggaaagatgtgttatgtgaaaccctgtctggaaacagctgccccttggtgactataacagcaatgccagagtctaattattatgaacatatctgccatttcagaaatcgcccttacgttttcttgtctgctcgggtacatcctggagaaactaatgcaagttgggttatgaaaggaacgttggaatatctcatgagcaataaccccactgctcagagcttacgagaatcttatatttttaaaattgtccctatgttaaatccagatggtgtcatcaatggaaatcatcgctgttctttaagtggagaggatttgaataggcagtggcaaagtccaagtccggatttacatcctacaatttaccatgctaaggggctgttgcaatacttggctgcagtgaagcgtttacccttggtttattgtgattatcatggccattcccgaaagaagaatgtatttatgtatggttgcagcatcaaagagacagtgtggcataccaatgataatgcaacttcatgtgatgttgtggaggatacgggatacaggacattgcctaagatactgagccatatcgccccagcattttgcatgagcagctgtagcttcgtagtggaaaaatctaaagaatccacagcacgtgttgtagtttggagggaaataggagtacaaagaagttataccatggagagtactttatgtggctgtgatcagggaaaatacaagggtttacagattggtacccgagaactggaagagatgggagcaaaattttgtgttggtcttttacgtttgaaaagactgacctctccattggagtataatctgccttccagcctgcttgactttgaaaatgatttaattgaatcaagctgcaaagtaactagccctaccacttatgtcttggatgaagatgaacctcgattccttgaagaagttgattacagtgcagaaagtaatgatgagttagatattgagttggctgaaaatgtaggagattatgaaccttctgctcaagaagaagtactttctgactctgaattatcaagaacatacctaccttgagcccgctgccatctcttgttaactgcaaagaataaatgaaatatcttggtttttatttcccaggaagcttgagagaaatgagtttatacagagctgactcaaaaagacaaaaagtaacttgggccagtttggtttcaagataataaatgtgttattaattaatgataaaattggcgcttgttttattttcgatattcaatgcactttatgtagcattgaatgatcaaatattggatttacctttaaaaaaaaaacctgagtatcattgcatgaatttttatctccctatggttatatcctgcatcaagtggataattttgaagtgtgttcagaatataaaattgaaattttagagttgttgaaaatcctgacttgttgaaaactaatatatatgtacatggatttctatagatgtgtttgtttagaagtgggtagatattgcagataagactgttcttcagaatcatgttaactattgggttgtgactgaagtagtccagggtttgccttgaaaccattacattctacatttaccaaattaaacaaataaaaactgtattaaatgttgcattcattttgtcatcttctttaaccagctcagattatttgatgtatagaactttgtgagaatgtgataaaaacccagaattggacacagtgataaaaagttgtttttaagaaatgctgggattacaggcgtgcgccaccgtgcctggctaaatcctttcttgtaatgaaacctacctgggttttagccctcttgctgcaagaatgactttatttttaaataaaataaagcaaatccattgactttggataagtgttttaagaactaagtttctgatataataaaacaacctccaaaagatacctcattgcagattttcgccaggattcaggtgcttaggttttggcacatatcttcctcactttttcctatagtgtttttaacctgttataattggaatgatagagatgtatttcagaattttgcatggtccaaatcaatgatttttctttttaatatgtaaagtatttcattaacagtgtagattctttctgatgtttggggagccatgtttaaaaatgtagtatggagcaattgaaaaaggggtctttttccctagcctaattcttactaatctcagaaaacaaagatcaaatagactgtgaagttgaactagtcctcttagtgtagtaaccaaatttaggaaagatcaggataatttaggaaggaaagtaatcatttatttaattatttataattataaacaattattttatgttttgtatattttatgtataaaacaattacatgttttattatagttatacttcttcagagagtagattatggagccaccatgtccatacagttagttgttccttggtattcttggattgattccaggaccccccacagttacccaaatccacagatgctgaagtctctgatataaaatggagtagtatttgcatttaacctatggacatcctcctgtatgctttaaatcatctctagattacttataatacctaatacaatataaatataaatgctctgtaaatagttttattgtatagtgtgtgtgtgtgttttaagagacgaggactcacaatgggacactttgaccaggctggtctcgaactcctgggcctacacaatcctcccacctcggcgtcgcaagtagctgggactacaggtactcaccactatgcctggcagttttttaaatttgcgtttttaaaaattgtttattatttattgaatattttctacctgagattgacttaatctgtggatatggaacctatagatatggagggctggctgtatatgaatttgtttttggcttttacaaaattagaaattaaaagtaactacagttactataatgtgcagaatgactcaaatatttccatttattatgttagtgtaaaaactcctaactacgtattataatattttatattaatgaagtactttagcatacattatgagcctgaataaagctttttattaaatattcacaagattgaaggagaaattctttatagttaggaaatgattttttcataaacaataaatagctttgaaaatataaaaaaaaatttagggctgggtgcagaggctcatgcctgtantcccagcactctgagaggccgaggcgggtggatcacttgaggtgaggagttcaagatcagcatggccaacatggtgaaactccacctccacgaaaaatacaaaaattagccaggcatggtggcatgcgcctgtaatcctagctacttgggtggctgaggcatgagactcacttgaacctgggaggcagaggttgcagcagtgagccgagatcaagccgctgcactccagctggggcgacaaagcaagactgtctcaaaaaataaaaacaaaaaaattaaaataaaatcctaactttcctagttagaaatataattaacttttattggctattagtagctaaaattgcccttatttttgcttctgtggcctcattttttttctcggttattcagtatttaaattatggcttagatgtcttcaatgctatagtcctnaaaattaatgatctacgttgtgcagcagtgatgggatctgataaactgagtctgatgatggagtttagatttatttcctttaccttgcatttggaactttgaatctcttaaatgtggttttggtctagtccactggttctcacgttgtaatgtgcatcagaatcttctgaagacacagattgctgattatgtagacctggggtggaggtccaagaatgtgcattccttgcaaattcccaggtggtgatgctgcagagccacactttgagaatcactagtataatccagtatgctcttccagcatcacaccttccttcctgagaatcacaggagttgtgaactgcagattagcattggggagaatttagatcaaactaatttgtagaatcaaggaggtcaagtaaggtcacaggggcacttgggttgagccagggttttagcccaggtcttctgacaactgcctcatgtccttaccacaaaggagctgctatcctttgcctttccccaaagagtgaagactgcttaaagctcaaggatctttcttgaatttgtgaaatttgttcaggcaaggtgaaaagcaaaaacctatggttcacattgactttttgtattgatcattgtcttttgaagacaggaagtatgatcagtctctgccacttgtgctagtttttgtgtggtgtttagaaacatgggcatttgtctggatcctaattacaaataagtaacctagaattctcttcagatagtgcactaacagcaatgaatctattctaaatttcaaatatccaaattaaaatgactgtattagcataagtactgaaatggataatacaataaatgtattaatggaattgtttttgtgcatgatacagaaataaatgatagtaacgaaact

SEQ ID NO: 433662 - DNA, 7056 bp, Homo sapiens
  misc_feature (5726)..(5726): n is a, c, g, or t
  misc_feature (6161)..(6161): n is a, c, g, or t
cggggtttgtatgaaaacaccgggcggcgggcggcgagggatccgccgtgatccaggtgctgagccgggtgctgcggctctgcgcggtccccgccagcgccccatcctgagccgattatctgcaattatgaaatgaagtaactcaagatgagcaagttaaaagtgataccagaaaaaagccttaccaataattctaggatcgtaggactcctggctcaactggagaagatcaatgctgagccttcagaatcagacactgcccgatatgttacatcaaaaattcttcatctggctcagagtcaagaaaaaacaaggagagaaatgacagccaaaggttctacaggaatggaaattctgctgtcaacattagagaacacaaaagatcttcaaactacacttaatatcttaagcattcttgttgagctggtgtcagctggtggaggtcgaagagtgagtttcttagtcaccaaaggtggttcacaaatattgttgcagttacttatgaatgccagcaaagaatctcccccacatgaggacttaatggtacagattcattctattcttgcaaagattggaccaaaagataaaaaatttggagtaaaggctagaattaatggggctctgaatataaccctgaatttggtcaagcagaatttgcagaatcatcgcttggttctaccttgccttcagcttttacgagtatattctgccaactctgtgaattcagtatccttagggaaaaatggagttgtggaactgatgtttaaaatcattggaccatttagtaagaagaattccagtcttataaagaatgtctggcagtcaggactctggatcctcttgtcaatacctccagtctgataatgaggaagtgtttcccaaaaaatcgactgccactcccaacaattaaaagttcttttcatttccagttgcctgttattcctgtgactggtcctgtggctcagctctacagcttacctcctgaagtggatgacgtagtagatgaaagtgatgacaacgatgatattgatgtagaagctgaaaacgaaactgagaatgaagatgacctagatcaaaattttaagaatgatgatattgaaacagatattaacaaactaaaaccccagcaagaaccgggacgaacaatagaagatctaaaaatgtatgaacaccttttccctgagcttgttgatgattttcaggactatgatttaatctccaaagaaccaaagccttttgtatttgagggaaaagtacgtggtcctattgttgttcctacggcaggcgaggaaacatctgggaattctggcaatttaagaaaagttgtaatgaaggagaacatatcttctaaaggagatgaaggtgaaaagaagtctacctttatggatctagcaaaagaagatattaaagataatgatagaacattacaacagcagccaggtgatcaaaatagaactatttcatcagtccatggtttaaacaatgatattgtaaaggccttggaccgaattacattgcagaatattccttctcaaacagccccaggttttactgcagaaatgaagaaggactgcagtcttcctcttactgtccttacctgtgctaaagcatgtccacacatggctacttgtggaaatgttctgtttgagggaagaacagttcagctagggaagctttgctgcactggagttgaaactgaagatgatgaagatactgagtcaaattcatcggtagaacaagcatcggttgaagtacctgatggaccaacactccatgacccagacctctatattgagattgtgaaaaatacgaagtctgtcccagaatattcagaggtggcttatcccgattattttggtcacattccgcctccattcaaagagcctattttagaaaggccttatggtgtacaaaggacaaaaattgctcaagatattgaaaggctaatacatcagagtgatatcatagatcgtgtggtatatgacttggataacccaaattacaccattccagaagagggagatattttgaaatttaactccaaatttgagtctgggaatctgcgcaaagtaattcaaattagaaaaaatgaatatgatcttattctgaactcagacataaacagcaatcattatcatcagtggttttactttgaagtcagtggaatgcgaccaggtgttgcttacaggtttaacatcattaactgtgaaaagtccaacagtcagtttaattatggtatgcaaccactcatgtattcggttcaggaagcattaaatgccagaccatggtggattcgtatggggactgacatttgttactataaaaatcatttctcaagaagttcagttgctgcaggtgggcaaaagggaaaatcctactatacaattacatttactgtcaattttccacataaagatgatgtttgctactttgcttatcactatccatatacgtattcaactttacagatgcatcttcaaaaattggaatcagcacacaatcctcagcaaatctattttcggaaagatgtgttatgtgaaaccctgtctggaaacagctgccccttggtgactataacagcaatgccagagtctaattattatgaacatatctgccatttcagaaatcgcccttacgttttcttgtctgctcgggtacatcctggagaaactaatgcaagttgggttatgaaaggaacgttggaatatctcatgagcaataaccccactgctcagagcttacgagaatcttatatttttaaaattgtccctatgttaaatccagatggtgtcatcaatggaaatcatcgctgttctttaagtggagaggatttgaataggcagtggcaaagtccaagtccggatttacatcctacaatttaccatgctaaggggctgttgcaatacttggctgcagtgaagcgtttacccttggtttattgtgattatcatggccattcccgaaagaagaatgtatttatgtatggttgcagcatcaaagagacagtgtggcataccaatgataatgcaacttcatgtgatgttgtggaggatacgggatacaggacattgcctaagatactgagccatatcgccccagcattttgcatgagcagctgtagcttcgtagtggaaaaatctaaagaatccacagcacgtgttgtagtttggagggaaataggagtacaaagaagttataccatggagagtactttatgtggctgtgatcagggaaaatacaagggtttacagattggtacccgagaactggaagagatgggagcaaaattttgtgttggtcttttacgtttgaaaagactgacctctccattggagtataatctgccttccagcctgcttgactttgaaaatgatttaattgaatcaagctgcaaagtaactagccctaccacttatgtcttggatgaagatgaacctcgattccttgaagaagttgattacagtgcagaaagtaatgatgagttagatattgagttggctgaaaatgtaggagattatgaaccttctgctcaagaagaagtactttctgactctgaattatcaagaacatacctaccttgagcccgctgccatctcttgttaactgcaaagaataaatgaaatatcttggtttttatttcccaggaagcttgagagaaatgagtttatacagagctgactcaaaaagacaaaaagtaacttgggccagtttggtttcaagataataaatgtgttattaattaatgataaaattggcgcttgttttattttcgatattcaatgcactttatgtagcattgaatgatcaaatattggatttacctttaaaaaaaaaacctgagtatcattgcatgaatttttatctccctatggttatatcctgcatcaagtggataattttgaagtgtgttcagaatataaaattgaaattttagagttgttgaaaatcctgacttgttgaaaactaatatatatgtacatggatttctatagatgtgtttgtttagaagtgggtagatattgcagataagactgttcttcagaatcatgttaactattgggttgtgactgaagtagtccagggtttgccttgaaaccattacattctacatttaccaaattaaacaaataaaaactgtattaaatgttgcattcattttgtcatcttctttaaccagctcagattatttgatgtatagaactttgtgagaatgtgataaaaacccagaattggacacagtgataaaaagttgtttttaagaaatgctgggattacaggcgtgcgccaccgtgcctggctaaatcctttcttgtaatgaaacctacctgggttttagccctcttgctgcaagaatgactttatttttaaataaaataaagcaaatccattgactttggataagtgttttaagaactaagtttctgatataataaaacaacctccaaaagatacctcattgcagattttcgccaggattcaggtgcttaggttttggcacatatcttcctcactttttcctatagtgtttttaacctgttataattggaatgatagagatgtatttcagaattttgcatggtccaaatcaatgatttttctttttaatatgtaaagtatttcattaacagtgtagattctttctgatgtttggggagccatgtttaaaaatgtagtatggagcaattgaaaaaggggtctttttccctagcctaattcttactaatctcagaaaacaaagatcaaatagactgtgaagttgaactagtcctcttagtgtagtaaccaaatttaggaaagatcaggataatttaggaaggaaagtaatcatttatttaattatttataattataaacaattattttatgttttgtatattttatgtataaaacaattacatgttttattatagttatacttcttcagagagtagattatggagccaccatgtccatacagttagttgttccttggtattcttggattgattccaggaccccccacagttacccaaatccacagatgctgaagtctctgatataaaatggagtagtatttgcatttaacctatggacatcctcctgtatgctttaaatcatctctagattacttataatacctaatacaatataaatataaatgctctgtaaatagttttattgtatagtgtgtgtgtgtgttttaagagacgaggactcacaatgggacactttgaccaggctggtctcgaactcctgggcctacacaatcctcccacctcggcgtcgcaagtagctgggactacaggtactcaccactatgcctggcagttttttaaatttgcgtttttaaaaattgtttattatttattgaatattttctacctgagattgacttaatctgtggatatggaacctatagatatggagggctggctgtatatgaatttgtttttggcttttacaaaattagaaattaaaagtaactacagttactataatgtgcagaatgactcaaatatttccatttattatgttagtgtaaaaactcctaactacgtattataatattttatattaatgaagtactttagcatacattatgagcctgaataaagctttttattaaatattcacaagattgaaggagaaattctttatagttaggaaatgattttttcataaacaataaatagctttgaaaatataaaaaaaaatttagggctgggtgcagaggctcatgcctgtantcccagcactctgagaggccgaggcgggtggatcacttgaggtgaggagttcaagatcagcatggccaacatggtgaaactccacctccacgaaaaatacaaaaattagccaggcatggtggcatgcgcctgtaatcctagctacttgggtggctgaggcatgagactcacttgaacctgggaggcagaggttgcagcagtgagccgagatcaagccgctgcactccagctggggcgacaaagcaagactgtctcaaaaaataaaaacaaaaaaattaaaataaaatcctaactttcctagttagaaatataattaacttttattggctattagtagctaaaattgcccttatttttgcttctgtggcctcattttttttctcggttattcagtatttaaattatggcttagatgtcttcaatgctatagtcctnaaaattaatgatctacgttgtgcagcagtgatgggatctgataaactgagtctgatgatggagtttagatttatttcctttaccttgcatttggaactttgaatctcttaaatgtggttttggtctagtccactggttctcacgttgtaatgtgcatcagaatcttctgaagacacagattgctgattatgtagacctggggtggaggtccaagaatgtgcattccttgcaaattcccaggtggtgatgctgcagagccacactttgagaatcactagtataatccagtatgctcttccagcatcacaccttccttcctgagaatcacaggagttgtgaactgcagattagcattggggagaatttagatcaaactaatttgtagaatcaaggaggtcaagtaaggtcacaggggcacttgggttgagccagggttttagcccaggtcttctgacaactgcctcatgtccttaccacaaaggagctgctatcctttgcctttccccaaagagtgaagactgcttaaagctcaaggatctttcttgaatttgtgaaatttgttcaggcaaggtgaaaagcaaaaacctatggttcacattgactttttgtattgatcattgtcttttgaagacaggaagtatgatcagtctctgccacttgtgctagtttttgtgtggtgtttagaaacatgggcatttgtctggatcctaattacaaataagtaacctagaattctcttcagatagtgcactaacagcaatgaatctattctaaatttcaaatatccaaattaaaatgactgtattagcataagtactgaaatggataatacaataaatgtattaatggaattgtttttgtgcatgatacagaaataaatgatagtaacgaaact

SEQ ID NO: 433663 - DNA, 3931 bp, Homo sapiens
cggggtttgtatgaaaacaccgggcggcgggcggcgagggatccgccgtgatccaggtgctgagccgggtgctgcggctctgcgcggtccccgccagcgccccatcctgagccgattatctgcaattatgaaatgaagtaactcaagatgagcaagttaaaagtgataccagaaaaaagccttaccaataattctaggatcgtaggactcctggctcaactggagaagatcaatgctgagccttcagaatcagacactgcccgatatgttacatcaaaaattcttcatctggctcagagtcaagaaaaaacaaggagagaaatgacagccaaaggttctacaggaatggaaattctgctgtcaacattagaggtggaggtcgaagagtgagtttcttagtcaccaaaggtggttcacaaatattgttgcagttacttatgaatgccagcaaagaatctcccccacatgaggacttaatggtacagattcattctattcttgcaaagattggaccaaaagataaaaaatttggagtaaaggctagaattaatggggctctgaatataaccctgaatttggtcaagcagaatttgcagaatcatcgcttggttctaccttgccttcagcttttacgagtatattctgccaactctgtgaattcagtatccttagggaaaaatggagttgtggaactgatgtttaaaatcattggaccatttagtaagaagaattccagtcttataaaggttgctttagacactcttgctgcattgctaaaatcaaaaacaaatgccaggagagctgtagacagaggatatgtccaagtgcttttaacaatttatgtagattggcaccgccatgataaccggcatagaaacatgctcattcggaaaggaattttacagagtttaaaaagtgttacaaacatcaagttgggaagaaaagcatttattgatgccaatgggatgaaaattctgtataatacttcgcaagaatgtctggcagtcaggactctggatcctcttgtcaatacctccagtctgataatgaggaagtgtttcccaaaaaatcgactgccactcccaacaattaaaagttcttttcatttccagttgcctgttattcctgtgactggtcctgtggctcagctctacagcttacctcctgaagtggatgacgtagtagatgaaagtgatgacaacgatgatattgatgtagaagctgaaaacgaaactgagaatgaagatgacctagatcaaaattttaagaatgatgatattgaaacagatattaacaaactaaaaccccagcaagaaccgggacgaacaatagaagatctaaaaatgtatgaacaccttttccctgagcttgttgatgattttcaggactatgatttaatctccaaagaaccaaagccttttgtatttgagggaaaagtacgtggtcctattgttgttcctacggcaggcgaggaaacatctgggaattctggcaatttaagaaaagttgtaatgaaggagaacatatcttctaaaggagatgaaggtgaaaagaagtctacctttatggatctagcaaaagaagatattaaagataatgatagaacattacaacagcagccaggtgatcaaaatagaactatttcatcagtccatggtttaaacaatgatattgtaaaggccttggaccgaattacattgcagaatattccttctcaaacagccccaggttttactgcagaaatgaagaaggactgcagtcttcctcttactgtccttacctgtgctaaagcatgtccacacatggctacttgtggaaatgttctgtttgagggaagaacagttcagctagggaagctttgctgcactggagttgaaactgaagatgatgaagatactgagtcaaattcatcggtagaacaagcatcggttgaagtacctgatggaccaacactccatgacccagacctctatattgagattgtgaaaaatacgaagtctgtcccagaatattcagaggtggcttatcccgattattttggtcacattccgcctccattcaaagagcctattttagaaaggccttatggtgtacaaaggacaaaaattgctcaagatattgaaaggctaatacatcagagtgatatcatagatcgtgtggtatatgacttggataacccaaattacaccattccagaagagggagatattttgaaatttaactccaaatttgagtctgggaatctgcgcaaagtaattcaaattagaaaaaatgaatatgatcttattctgaactcagacataaacagcaatcattatcatcagtggttttactttgaagtcagtggaatgcgaccaggtgttgcttacaggtttaacatcattaactgtgaaaagtccaacagtcagtttaattatggtatgcaaccactcatgtattcggttcaggaagcattaaatgccagaccatggtggattcgtatggggactgacatttgttactataaaaatcatttctcaagaagttcagttgctgcaggtgggcaaaagggaaaatcctactatacaattacatttactgtcaattttccacataaagatgatgtttgctactttgcttatcactatccatatacgtattcaactttacagatgcatcttcaaaaattggaatcagcacacaatcctcagcaaatctattttcggaaagatgtgttatgtgaaaccctgtctggaaacagctgccccttggtgactataacagcaatgccagagtctaattattatgaacatatctgccatttcagaaatcgcccttacgttttcttgtctgctcgggtacatcctggagaaactaatgcaagttgggttatgaaaggaacgttggaatatctcatgagcaataaccccactgctcagagcttacgagaatcttatatttttaaaattgtccctatgttaaatccagatggtgtcatcaatggaaatcatcgctgttctttaagtggagaggatttgaataggcagtggcaaagtccaagtccggatttacatcctacaatttaccatgctaaggggctgttgcaatacttggctgcagtgaagcgtttacccttggtttattgtgattatcatggccattcccgaaagaagaatgtatttatgtatggttgcagcatcaaagagacagtgtggcataccaatgataatgcaacttcatgtgatgttgtggaggatacgggatacaggacattgcctaagatactgagccatatcgccccagcattttgcatgagcagctgtagcttcgtagtggaaaaatctaaagaatccacagcacgtgttgtagtttggagggaaataggagtacaaagaagttataccatggagagtactttatgtggctgtgatcagggaaaatacaagggtttacagattggtacccgagaactggaagagatgggagcaaaattttgtgttggtcttttacgtttgaaaagactgacctctccattggagtataatctgccttccagcctgcttgactttgaaaatgatttaattgaatcaagctgcaaagtaactagccctaccacttatgtcttggatgaagatgaacctcgattccttgaagaagttgattacagtgcagaaagtaatgatgagttagatattgagttggctgaaaatgtaggagattatgaaccttctgctcaagaagaagtactttctgactctgaattatcaagaacatacctaccttgagcccgctgccatctcttgttaactgcaaagaataaatgaaatatcttggtttttatttcccaggaagcttgagagaaatgagtttatacagagctgactcaaaaagacaaaaagtaacttgggccagtttggtttcaagataataaatgtgttattaattaatgata

SEQ ID NO: 433664 - DNA, 3714 bp, Homo sapiens
  misc_feature (30)..(30): n is a, c, g, or t
  misc_feature (2384)..(2384): n is a, c, g, or t
  misc_feature (2819)..(2819): n is a, c, g, or t
aagtgacgaggtcggcctactgggaggctncagggagcgcgggagcgcacttcgactagcaccctaccacttatgtcttggatgaagatgaacctcgattccttgaagaagttgattacagtgcagaaagtaatgatgagttagatattgagttggctgaaaatgtaggagattatgaaccttctgctcaagaagaagtactttctgactctgaattatcaagaacatacctaccttgagcccgctgccatctcttgttaactgcaaagaataaatgaaatatcttggtttttatttcccaggaagcttgagagaaatgagtttatacagagctgactcaaaaagacaaaaagtaacttgggccagtttggtttcaagataataaatgtgttattaattaatgataaaattggcgcttgttttattttcgatattcaatgcactttatgtagcattgaatgatcaaatattggatttacctttaaaaaaaaaacctgagtatcattgcatgaatttttatctccctatggttatatcctgcatcaagtggataattttgaagtgtgttcagaatataaaattgaaattttagagttgttgaaaatcctgacttgttgaaaactaatatatatgtacatggatttctatagatgtgtttgtttagaagtgggtagatattgcagataagactgttcttcagaatcatgttaactattgggttgtgactgaagtagtccagggtttgccttgaaaccattacattctacatttaccaaattaaacaaataaaaactgtattaaatgttgcattcattttgtcatcttctttaaccagctcagattatttgatgtatagaactttgtgagaatgtgataaaaacccagaattggacacagtgataaaaagttgtttttaagaaatgctgggattacaggcgtgcgccaccgtgcctggctaaatcctttcttgtaatgaaacctacctgggttttagccctcttgctgcaagaatgactttatttttaaataaaataaagcaaatccattgactttggataagtgttttaagaactaagtttctgatataataaaacaacctccaaaagatacctcattgcagattttcgccaggattcaggtgcttaggttttggcacatatcttcctcactttttcctatagtgtttttaacctgttataattggaatgatagagatgtatttcagaattttgcatggtccaaatcaatgatttttctttttaatatgtaaagtatttcattaacagtgtagattctttctgatgtttggggagccatgtttaaaaatgtagtatggagcaattgaaaaaggggtctttttccctagcctaattcttactaatctcagaaaacaaagatcaaatagactgtgaagttgaactagtcctcttagtgtagtaaccaaatttaggaaagatcaggataatttaggaaggaaagtaatcatttatttaattatttataattataaacaattattttatgttttgtatattttatgtataaaacaattacatgttttattatagttatacttcttcagagagtagattatggagccaccatgtccatacagttagttgttccttggtattcttggattgattccaggaccccccacagttacccaaatccacagatgctgaagtctctgatataaaatggagtagtatttgcatttaacctatggacatcctcctgtatgctttaaatcatctctagattacttataatacctaatacaatataaatataaatgctctgtaaatagttttattgtatagtgtgtgtgtgtgttttaagagacgaggactcacaatgggacactttgaccaggctggtctcgaactcctgggcctacacaatcctcccacctcggcgtcgcaagtagctgggactacaggtactcaccactatgcctggcagttttttaaatttgcgtttttaaaaattgtttattatttattgaatattttctacctgagattgacttaatctgtggatatggaacctatagatatggagggctggctgtatatgaatttgtttttggcttttacaaaattagaaattaaaagtaactacagttactataatgtgcagaatgactcaaatatttccatttattatgttagtgtaaaaactcctaactacgtattataatattttatattaatgaagtactttagcatacattatgagcctgaataaagctttttattaaatattcacaagattgaaggagaaattctttatagttaggaaatgattttttcataaacaataaatagctttgaaaatataaaaaaaaatttagggctgggtgcagaggctcatgcctgtantcccagcactctgagaggccgaggcgggtggatcacttgaggtgaggagttcaagatcagcatggccaacatggtgaaactccacctccacgaaaaatacaaaaattagccaggcatggtggcatgcgcctgtaatcctagctacttgggtggctgaggcatgagactcacttgaacctgggaggcagaggttgcagcagtgagccgagatcaagccgctgcactccagctggggcgacaaagcaagactgtctcaaaaaataaaaacaaaaaaattaaaataaaatcctaactttcctagttagaaatataattaacttttattggctattagtagctaaaattgcccttatttttgcttctgtggcctcattttttttctcggttattcagtatttaaattatggcttagatgtcttcaatgctatagtcctnaaaattaatgatctacgttgtgcagcagtgatgggatctgataaactgagtctgatgatggagtttagatttatttcctttaccttgcatttggaactttgaatctcttaaatgtggttttggtctagtccactggttctcacgttgtaatgtgcatcagaatcttctgaagacacagattgctgattatgtagacctggggtggaggtccaagaatgtgcattccttgcaaattcccaggtggtgatgctgcagagccacactttgagaatcactagtataatccagtatgctcttccagcatcacaccttccttcctgagaatcacaggagttgtgaactgcagattagcattggggagaatttagatcaaactaatttgtagaatcaaggaggtcaagtaaggtcacaggggcacttgggttgagccagggttttagcccaggtcttctgacaactgcctcatgtccttaccacaaaggagctgctatcctttgcctttccccaaagagtgaagactgcttaaagctcaaggatctttcttgaatttgtgaaatttgttcaggcaaggtgaaaagcaaaaacctatggttcacattgactttttgtattgatcattgtcttttgaagacaggaagtatgatcagtctctgccacttgtgctagtttttgtgtggtgtttagaaacatgggcatttgtctggatcctaattacaaataagtaacctagaattctcttcagatagtgcactaacagcaatgaatctattctaaatttcaaatatccaaattaaaatgactgtattagcataagtactgaaatggataatacaataaatgtattaatggaattgtttttgtgcatgatacagaaataaatgatagtaacgaaact

SEQ ID NO: 433665 - DNA, 821 bp, Homo sapiens
ggcgtggccttccgcggaagggaagagtcccgcagtcggaggcggccggctgggcgtgcgctcgctccccgaagccggggctgggccggagccgggcgagggctgggagctgggccgggtccggggacagcgggcgaggggcagctgccggagccgggcagccaggccgctcagggcaggggacagctggcgccggttctgcggtctccggggcccagatgtgaggcggcggcgcccccggcccgagagcgcacgatgggggccccgctcgccgtagcgctgggcgccctccactacctggcacttttcctgcaactcggcggcgccacgcggcccgccggccacgcgccctgggacaaccacgtctccggccacgccctgttcacagagacaccccatgacatgacagcacggacgggcgaggacgtggagatggcctgctccttccgcggcagcggctccccctcctactcgctggagatccagtggtggtatgtacggagccaccgggactggaccgacaagcaggcgtgggcctcgaaccagctaaaagcatctcagcaggaagacgcagggaaggaggcaaccaaaataagtgtggtcaaggtggtgggcagcaacatctcccacaagctgcgcctgtcccgggtgaagcccacggacgaaggcacctacgagtgccgcgtcatcgacttcagcgacggcaaggcccggcaccacaaggtcaaggcctacctgcgggtgcagccagggggagaactccgtcctgcatctgcccgaagcccctcccgccgcgcccgccccgccgccccccaagccag

SEQ ID NO: 433666 - DNA, 770 bp, Homo sapiens
ggcgtggccttccgcggaagggaagagtcccgcagtcggaggcggccggctgggcgtgcgctcgctccccgaagccggggctgggccggagccgggcgagggctgggagctgggccgggtccggggacagcgggcgaggggcagctgccggagccgggcagccaggccgctcagggcaggggacagctggcgccggttctgcggtctccggggcccagatgtgaggcggcggcgcccccggcccgagagcgcacgatgggggccccgctcgccgtagcgctgggcgccctccactacctggcacttttcctgcaactcggcggcgccacgcggcccgccggccacgcgccctgggacaaccacgtctccggccacgccctgttcacagagacaccccatgacatgacagcacggacgggcgaggacgtggagatggcctgctccttccgcggcagcggctccccctcctactcgctggagatccagtggtggtatgtacggagccaccgggactggaccgacaagcaggcgtgggcctcgaaccaggtggtcaaggtggtgggcagcaacatctcccacaagctgcgcctgtcccgggtgaagcccacggacgaaggcacctacgagtgccgcgtcatcgacttcagcgacggcaaggcccggcaccacaaggtcaaggcctacctgcgggtgcagccagggggagaactccgtcctgcatctgcccgaagcccctcccgccgcgcccgccccgccgccccccaagccag

SEQ ID NO: 433667 - DNA, 887 bp, Homo sapiens
ggcgtggccttccgcggaagggaagagtcccgcagtcggaggcggccggctgggcgtgcgctcgctccccgaagccggggctgggccggagccgggcgagggctgggagctgggccgggtccggggacagcgggcgaggggcagctgccggagccgggcagccaggccgctcagggcaggggacagctggcgccggttcattgcgtgatctcctgtgtgtgcccgagattgtgatggctggctgtgcatgccgccctgtgtctcctgcagtatgctgggcactgatgtgtggtggcccctgcgtccgcctgatagctgcttgtggctgcccttctcactttaccttgtgcagcgttttccttgctaacttctggcgggctgcccacgcgggccctgcctggcccactgctgccctgtggacaaccactgtctcctggccacgccctgttcacagagacaccccatgacatgacagcacggacgggcgaggacgtggagatggcctgctccttccgcggcagcggctccccctcctactcgctggagatccagtggtggtatgtacggagccaccgggactggaccgacaagcaggcgtgggcctcgaaccagctaaaagcatctcagcaggaagacgcagggaaggaggcaaccaaaataagtgtggtcaaggtggtgggcagcaacatctcccacaagctgcgcctgtcccgggtgaagcccacggacgaaggcacctacgagtgccgcgtcatcgacttcagcgacggcaaggcccggcaccacaaggtcaaggcctacctgcgggtgcagccagggggagaactccgtcctgcatctgcccgaagcccctcccgccgcgcccgccccgccgccccccaagccag

SEQ ID NO: 433668 - DNA, 927 bp, Homo sapiens
agattgcaccattacactccagcctaggcaacaagagcaagatgctgtctcaaaaaataaaaataaaaagctgtaagattttataacttcatgaggcagatccttcagctctgccggcatttgggccttaacctgaaatcagtactaagaagtcaagatcaggagaaaggagtatcttaattatgggcatttctttggtatagtcttggattctttattcctaggtagatttcgggcagacaacttgaacaagctgaagaacctatgcagcaagacaatcggagagaaaatgaaggtaagagaactgaataacaaacagccatgagaacttgagcggagatatttgatcttgctcttagctaatgttcacagaagttctaactcagtgtttaagtctacaagatgttcaatttcttaccaaaggggaaaatattattttaaaaagatagggaggcagggaacttggaggcattttcatatactttaccacaagtccatcttctgtgttcaggtaagattctttgttgtctagctgtttgttgtctattctgttcttatattagaaatataaattccaccagtcatcttttttatggcagatttcagatttgtcgtctcagcgtagttatgctccataatgaaaactacagattcagagttcaaatcttgctacgttatgtgtcttttaggcaagttaatgcctcagcctcagttttctcatttataaaatgacaatactaacactcacctacagaatggaattgttagaacttttttttttttaatttaaacgccaagcaatggttatggatagaactaaatttcttttaaatgtagaaaatttggcacagtgtctagaacatgtagttgttcagcaattgtgagttataatgaatggcaagtaatgttactggccttcatccaaaa

SEQ ID NO: 433669 - DNA, 932 bp, Homo sapiens
  misc_feature (26)..(26): n is a, c, g, or t
  misc_feature (31)..(31): n is a, c, g, or t
  misc_feature (51)..(51): n is a, c, g, or t
gagacaaacaacacaaataatcggcnaggtngaggccggtgttaatcggcngaggcgtgctgcggcgcgatccttgcttccctgagcgttggcccgggaggaaagaagatggtgctggatctggatttgtttcgggtggataaaggaggggacccagccctcatccgagagacgcaggagaagcgcttcaaggacccgggactagtggaccagctggtgaaggcagacagcgagtggcgacgatgatcaaaggcttctcctgagactgcgtcacttctgcaacacagtagattcattccttcggtatcggaagcatttcggggcgttggaggccgctcttggccaaaataaatgaccctgaagcttttcggaaggccatcccccgacctatgggcatacctttaagaattagaaaagtcttttccgtggtagatcaaacgcgaggggagtgaggaggcgagcaaaagattgtaatgactgaagctgtttaattgtgatttgtggacgttttcctttaaagacattggcagagttgggctagaacctggaactgccggatcttggagtcatatcgggcatctatcatgaagccgaataaaaccatagaaccatctgcccataaatctctgcctgtattaactggagtggtcgctggttgggcggatgctgtcaagtacttgtgatttgatttgtctgatgcaataggtctgcaaccatctgggagctaggtcgatgacagtacactgcaaaggcagccactatccaagagtgtgatggatttctattaggaaaattgattttctcctgtttataaggatcttggatgtcaacagaatattgtgactgggtgggggggaacaggtgagagcctatggagaagtgggggggaaacatggttatgtgttgtgatggtattgctattgtgaaaaaga

SEQ ID NO: 433670 - DNA, 722 bp, Homo sapiens
ggcgggtcagcgcgccggcgcagtgcggcggtcacaggctgagtgctgcggcgcgatccttgcttccctgagcgttggcccgggaggaaagaagatggtgctggatctggatttgtttcgggtggataaaggaggggacccagccctcatccgagagacgcaggagaagcgcttcaaggacccgggactagtggaccagctggtgaaggcagacagcgagtggcgacgatgtagatttcgggcagacaacttgaacaagctgaagaacctatgcagcaagacaatcggagagaaaatgaagaaaaaagagccagtgggagatgatgagtctgtcccagagaatgtgctgagtttcgatgaccttactgcagacgctttagctaacctgaaagtctcacaaatcaaaaaagtccgactcctcattgatgaagccatcctgaagtgtgacgcggagcggataaagttggaagcagagcggtttgagaacctccgagagattgggaaccttctgcacccttctgtacccatcagtaacgatgaggatgtggacaacaaagtagagaggatttggggtgattgtacagtcaggaagaagtactctcatgtggacctggtggtgatggtagatggctttgaaggcgaaaagggggccgtggtggctgggagtcgagggtacttcttgaagggtaagagctgggaaccagtgaggataggattatgaa

SEQ ID NO: 433671 - DNA, 722 bp, Homo sapiens
gtgtaatttcagtcacgggacggcgctttgtcttacataactggtccgtcggcgacaatagaaagaagatggtgctggatctggatttgtttcgggtggataaaggaggggacccagccctcatccgagagacgcaggagaagcgcttcaaggacccgggactagtggaccagctggtgaaggcagacagcgagtggcgacgatgtagatttcgggcagacaacttgaacaagctgaagaacctatgcagcaagacaatcggagagaaaatgaagaaaaaagagccagtgggagatgatgagtctgtcccagagaatgtgctgagtttcgatgaccttactgcagacgctttagctaacctgaaagtctcacaaatcaaaaaagtccgactcctcattgatgaagccatcctgaagtgtgacgcggagcggataaagttggaagcagagcggtttgagaacctccgagagattgggaaccttctgcacccttctgtacccatcagtaacgatgaggatgtggacaacaaagtagagaggatttggggtgattgtacagtcaggaagaagtactctcatgtggacctggtggtgatggtagatggctttgaaggcgaaaagggggccgtggtggctgggagtcgagggtacttcttgaagctcgccgggcgtcctgctgtccttgcccgctctcctcatatccttcgccttggcgtccgcgcc

SEQ ID NO: 433672 - DNA, 2158 bp, Homo sapiens
tggcgaattcggcacgagggagagaagcgcttcaaggacccgggactagtggaccagctggtgaaggcagacagcgagtggcgacgatgtagatttcgggcagacaacttgaacaagctgaagaacctatgcagcaagacaatcggagagaaaatgaagaaaaaagagccagtgggagatgatgagtctgtcccagagaatgtgctgagtttcgatgaccttactgcagacgcttcatcaatgaggagtcggacttttttgattgtgctgcggcgcgatccttgcttccctgagcgttggcccgggaggaaagaagatggtgctggatctggatttgtttcgggtggataaaggaggggacccagccctcatccgagagacgcaggagaagcgcttcaaggacccgggactagtggaccagctggtgaaggcagacagcgagtggcgacgatgtagatttcgggcagacaacttgaacaagctgaagaacctatgcagcaagacaatcggagagaaaatgaagaaaaaagagccagtgggagatgatgagtctgtcccagagaatgtgctgagtttcgatgaccttactgcagacgctttagctaacctgaaagtctcacaaatcaaaaaagtccgactcctcattgatgaagccatcctgaagtgtgacgcggagcggataaagttggaagcagagcggtttgagaacctccgagagattgggaaccttctgcacccttctgtacccatcagtaacgatgaggatgtggacaacaaagtagagaggatttggggtgattgtacagtcaggaagaagtactctcatgtggacctggtggtgatggtagatggctttgaaggcgaaaagggggccgtggtggctgggagtcgagggtacttcttgaagggggtcctggtgttcctggaacaggctctcatccagtatgcccttcgcaccttgggaagtcggggctacattcccatttataccccctttttcatgaggaaggaggtcatgcaggaggtggcacagctcagccagtttgatgaagaactttataaggtgattggcaaaggcagtgaaaagtctgatgacaactcctatgatgagaagtacctgattgccacctcagagcagcccattgctgccctgcaccgggatgagtggctccggccggaggacctgcccatcaagtatgctggcctgtctacctgcttccgtcaggaggtgggctcccatggccgtgacacccgtggcatcttccgagtccatcagtttgagaagattgaacagtttgtgtactcatcaccccatgacaacaagtcatgggagatgtttgaagagatgattaccaccgcagaggagttctaccagtccctggggattccttaccacattgtgaatattgtctcaggttctttgaatcatgctgccagtaagaagcttgacctggaggcctggtttccgggctcaggagccttccgtgagttggtctcctgttctaattgcacggattaccaggctcgccggcttcgaatccgatatgggcaaaccaagaagatgatggacaaggtggagtttgtccatatgctcaatgctaccatgtgcgccactacccgtaccatctgcgccatcctggagaactaccagacagagaagggcatcactgtgcctgagaaattgaaggagttcatgccgccaggactgcaagaactgatcccctttgtgaagcctgcgcccattgagcaggagccatcaaagaagcagaagaagcaacatgagggcagcaaaaagaaagcagcagcaagagacgtcaccctagaaaacaggctgcagaacatggaggtcaccgatgcttgaacattcctgcctccctatttgccaggctttcatttctgtctgctgagatctcagagcctgcccaacagcagggaagccaagcacccattcatccccctgcccccatctgactgcgtagctgagaggggaacagtgccatgtaccacacagatgttcctgtctcctcgcatgggcatagggacccatcattgatgactgatgaaaccatgtaataaagcatctctggggagggcttaggactcttcctcagtcttcttccccgggcttgaaccccgcctctgaggttctccctgatat

SEQ ID NO: 433673 - DNA, 2283 bp, Homo sapiens
tggcgaattcggcacgagggagagaagcgcttcaaggacccgggactagtggaccagctggtgaaggcagacagcgagtggcgacgatgtagatttcgggcagacaacttgaacaagctgaagaacctatgcagcaagacaatcggagagaaaatgaagaaaaaagagccagtgggagatgatgagtctgtcccagagaatgtgctgagtttcgatgaccttactgcagacgcttcatcaatgaggagtcggacttttttgattgtgctgcggcgcgatccttgcttccctgagcgttggcccgggaggaaagaagatggtgctggatctggatttgtttcgggtggataaaggaggggacccagccctcatccgagagacgcaggagaagcgcttcaaggacccgggactagtggaccagctggtgaaggcagacagcgagtggcgacgatgtagatttcgggcagacaacttgaacaagctgaagaacctatgcagcaagacaatcggagagaaaatgaagaaaaaagagccagtgggagatgatgagtctgtcccagagaatgtgctgagtttcgatgaccttactgcagacgctttagctaacctgaaagtctcacaaatcaaaaaagtccgactcctcattgatgaagccatcctgaagtgtgacgcggagcggataaagttggaagcagagcggtttgagaacctccgagagattgggaaccttctgcacccttctgtacccatcagtaacgatgaggatgtggacaacaaagtagagaggatttggggtgattgtacagtcaggaagaagtactctcatgtggacctggtggtgatggtagatggctttgaaggcgaaaagggggccgtggtggctgggagtcgagggtacttcttgaagggggtcctggtgttcctggaacaggctctcatccagtatgcccttcgcaccttgggaagtcggggctacattcccatttataccccctttttcatgaggaaggaggtcatgcaggaggtggcacagctcagccagtttgatgaagaactttataaggtgattggcaaaggcagtgaaaagtctgatgacaactcctatgatgagaagtacctgattgccacctcagagcagcccattgctgccctgcaccgggatgagtggctccggccggaggacctgcccatcaagtatgctggcctgtctacctgcttccgtcaggaggtgggctcccatggccgtgacacccgtggcatcttccgagtccatcagtttgagaagattgaacagtttgtgtactcatcaccccatgacaacaagtcatgggagatgtttgaagagatgattaccaccgcagaggagttctaccagtccctggggattccttaccacattgtgaatattgtctcaggttctttgaatcatgctgccagtaagaagcttgacctggaggcctggtttccgggctcaggagccttccgtgagttggtctcctgttctaattgcacggattaccaggctcgccggcttcgaatccgatatgggcaaaccaagaagatgatggacaaggtggagtttgtccatatgctcaatgctaccatgtgcgccactacccgtaccatctgcgccatcctggagaactaccagacagagaagggcatcactgtgcctgagaaattgaaggagttcatgccgccaggactgcaagaactgatcccctttgtgaagcctgcgcccattgagcaggagccatcaaagaagcagaagaagcaacatgagggcagcaaaaagaaagcagcagcaagagacgtcaccctagaaaacaggctgcagaacatggaggtcaccgatgcttgaacattcctgcctccctatttgccaggctttcatttctgtctgctgagatctcagagcctgcccaacagcagggaagccaagcacccattcatccccctgcccccatctgactgcgtagctgagaggggaacagtgccatgtaccacacagatgttcctgtctcctcgcatgggcatagggacccatcattgatgactgatgaaaccatgtaataaagcatctctgggggagcaaaaaaaaaaaaaaaaaaaaaaaaaacaatgtggtgcggcagcgactaagcgccccctcaagaagaggtttgaaacacccgcgaggggccagcgaggcacaagaaggagcaaggcaacaatgggcaataaggtcaccacagagaaaaacggggcacgaaacaacgcggacgggatcccacccattaaagc

SEQ ID NO: 433674 - DNA, 2182 bp, Homo sapiens
tggcgaattcggcacgagggagagaagcgcttcaaggacccgggactagtggaccagctggtgaaggcagacagcgagtggcgacgatgtagatttcgggcagacaacttgaacaagctgaagaacctatgcagcaagacaatcggagagaaaatgaagaaaaaagagccagtgggagatgatgagtctgtcccagagaatgtgctgagtttcgatgaccttactgcagacgcttcatcaatgaggagtcggacttttttgattgtgctgcggcgcgatccttgcttccctgagcgttggcccgggaggaaagaagatggtgctggatctggatttgtttcgggtggataaaggaggggacccagccctcatccgagagacgcaggagaagcgcttcaaggacccgggactagtggaccagctggtgaaggcagacagcgagtggcgacgatgtagatttcgggcagacaacttgaacaagctgaagaacctatgcagcaagacaatcggagagaaaatgaagaaaaaagagccagtgggagatgatgagtctgtcccagagaatgtgctgagtttcgatgaccttactgcagacgctttagctaacctgaaagtctcacaaatcaaaaaagtccgactcctcattgatgaagccatcctgaagtgtgacgcggagcggataaagttggaagcagagcggtttgagaacctccgagagattgggaaccttctgcacccttctgtacccatcagtaacgatgaggatgtggacaacaaagtagagaggatttggggtgattgtacagtcaggaagaagtactctcatgtggacctggtggtgatggtagatggctttgaaggcgaaaagggggccgtggtggctgggagtcgagggtacttcttgaagggggtcctggtgttcctggaacaggctctcatccagtatgcccttcgcaccttgggaagtcggggctacattcccatttataccccctttttcatgaggaaggaggtcatgcaggaggtggcacagctcagccagtttgatgaagaactttataaggtgattggcaaaggcagtgaaaagtctgatgacaactcctatgatgagaagtacctgattgccacctcagagcagcccattgctgccctgcaccgggatgagtggctccggccggaggacctgcccatcaagtatgctggcctgtctacctgcttccgtcaggaggtgggctcccatggccgtgacacccgtggcatcttccgagtccatcagtttgagaagattgaacagtttgtgtactcatcaccccatgacaacaagtcatgggagatgtttgaagagatgattaccaccgcagaggagttctaccagtccctgggggaacttttcgcgtttttaaacccaacaattggtggaaactacttcggtctcaagcgttctttgaatcatgctgccagtaagaagcttgacctggaggcctggtttccgggctcaggagccttccgtgagttggtctcctgttctaattgcacggattaccaggctcgccggcttcgaatccgatatgggcaaaccaagaagatgatggacaaggtggagtttgtccatatgctcaatgctaccatgtgcgccactacccgtaccatctgcgccatcctggagaactaccagacagagaagggcatcactgtgcctgagaaattgaaggagttcatgccgccaggactgcaagaactgatcccctttgtgaagcctgcgcccattgagcaggagccatcaaagaagcagaagaagcaacatgagggcagcaaaaagaaagcagcagcaagagacgtcaccctagaaaacaggctgcagaacatggaggtcaccgatgcttgaacattcctgcctccctatttgccaggctttcatttctgtctgctgagatctcagagcctgcccaacagcagggaagccaagcacccattcatccccctgcccccatctgactgcgtagctgagaggggaacagtgccatgtaccacacagatgttcctgtctcctcgcatgggcatagggacccatcattgatgactgatgaaaccatgtaataaagcatctctggggagggcttaggactcttcctcagtcttcttccccgggcttgaaccccgcctctgaggttctccctgatat

SEQ ID NO: 433675 - DNA, 2855 bp, Homo sapiens
tggcgaattcggcacgagggagagaagcgcttcaaggacccgggactagtggaccagctggtgaaggcagacagcgagtggcgacgatgtagatttcgggcagacaacttgaacaagctgaagaacctatgcagcaagacaatcggagagaaaatgaagaaaaaagagccagtgggagatgatgagtctgtcccagagaatgtgctgagtttcgatgaccttactgcagacgcttcatcaatgaggagtcggacttttttgattgtgctgcggcgcgatccttgcttccctgagcgttggcccgggaggaaagaagatggtgctggatctggatttgtttcgggtggataaaggaggggacccagccctcatccgagagacgcaggagaagcgcttcaaggacccgggactagtggaccagctggtgaaggcagacagcgagtggcgacgatgtagatttcgggcagacaacttgaacaagctgaagaacctatgcagcaagacaatcggagagaaaatgaagaaaaaagagccagtgggagatgatgagtctgtcccagagaatgtgctgagtttcgatgaccttactgcagacgctttagctaacctgaaagtctcacaaatcaaaaaagtccgactcctcattgatgaagccatcctgaagtgtgacgcggagcggataaagttggaagcagagcggtttgagaacctccgagagattgggaaccttctgcacccttctgtacccatcagtaacgatgaggatgtggacaacaaagtagagaggatttggggtgattgtacagtcaggaagaagtactctcatgtggacctggtggtgatggtagatggctttgaaggcgaaaagggggccgtggtggctgggagtcgagggtacttcttgaagggggtcctggtgttcctggaacaggctctcatccagtatgcccttcgcaccttgggaagtcggggctacattcccatttataccccctttttcatgaggaaggaggtcatgcaggaggtggcacagctcagccagtttgatgaagaactttataaggtgattggcaaaggcagtgaaaagtctgatgacaactcctatgatgagaagtacctgattgccacctcagagcagcccattgctgccctgcaccgggatgagtggctccggccggaggacctgcccatcaagtatgctggcctgtctacctgcttccgtcaggaggtgggctcccatggccgtgacacccgtggcatcttccgagtccatcagtttgagaagattgaacagtttgtgtactcatcaccccatgacaacaagtcatgggagatgtttgaagagatgattaccaccgcagaggagttctaccagtccctggggattccttaccacattgtgaatattgtctcaggttctttgaatcatgctgccagtaagaagcttgacctggaggcctggtttccgggctcaggagccttccgtgagttggtctcctgttctaattgcacggattaccaggctcgccggcttcgaatccgatatgggcaaaccaagaagatgatggacaagggtagatggcccccagggaggtgggaagcagagtcttcagtacacggcccgtccgaattatttctcagcctttggggtgcactggtccccagcatcatgggaaaatctgagcttctcaatctagaccaaaaagggaatctgaaaatgccttctactgagtcaggactgagttcttttagctagaaacctgaatctagctctcttctataaggtaattctagcttttctctttctggctttgtttttcttaactccagagaaagaataatctccatttatctacacagaacaagttggaggcttccctcttctcacccaagaaggtctgggttgtaagctgctctcttcaaacccaattttcaggccctactcttttccaagtcaggagcttgaaaggggtgaaaaggaaaggccacaatagtagtttcttccttccctcaaagggcccaactcctcagaataccagaagctaccacttgtcactcatcgaaacatgagggatctttctgcagttatctaataggcaataaataccaaataattcaaatttagaaaaaagttgctaaggggtagaacccatcattttgatttggacagttgtggttggggaagtctggttgaatggatggttcctggccgtcagtaagacccgatgagagttgagcccgacttcccctctgggaccctgtcttcccaggtggagtttgtccatatgctcaatgctaccatgtgcgccactacccgtaccatctgcgccatcctggagaactaccagacagagaagggcatcactgtgcctgagaaattgaaggagttcatgccgccaggactgcaagaactgatcccctttgtgaagcctgcgcccattgagcaggagccatcaaagaagcagaagaagcaacatgagggcagcaaaaagaaagcagcagcaagagacgtcaccctagaaaacaggctgcagaacatggaggtcaccgatgcttgaacattcctgcctccctatttgccaggctttcatttctgtctgctgagatctcagagcctgcccaacagcagggaagccaagcacccattcatccccctgcccccatctgactgcgtagctgagaggggaacagtgccatgtaccacacagatgttcctgtctcctcgcatgggcatagggacccatcattgatgactgatgaaaccatgtaataaagcatctctggggagggcttaggactcttcctcagtcttcttccccgggcttgaaccccgcctctgaggttctccctgatat

SEQ ID NO: 433676 - DNA, 1905 bp, Homo sapiens
  misc_feature (26)..(26): n is a, c, g, or t
  misc_feature (31)..(31): n is a, c, g, or t
  misc_feature (51)..(51): n is a, c, g, or t
gagacaaacaacacaaataatcggcnaggtngaggccggtgttaatcggcngaggcaaagaagatggtgctggatctggatttgtttcgggtggataaaggaggggacccagccctcatccgagagacgcaggagaagcgcttcaaggacccgggactagtggaccagctggtgaaggcagacagcgagtggcgacgatgtagatttcgggcagacaacttgaacaagctgaagaacctatgcagcaagacaatcggagagaaaatgaagaaaaaagagccagtgggagatgatgagtctgtcccagagaatgtgctgagtttcgatgaccttactgcagacgctttagctaacctgaaagtctcacaaatcaaaaaagtccgactcctcattgatgaagccatcctgaagtgtgacgcggagcggataaagttggaagcagagcggtttgagaacctccgagagattgggaaccttctgcacccttctgtacccatcagtaacgatgaggatgtggacaacaaagtagagaggatttggggtgattgtacagtcaggaagaagtactctcatgtggacctggtggtgatggtagatggctttgaaggcgaaaagggggccgtggtggctgggagtcgagggtacttcttgaagggggtcctggtgttcctggaacaggctctcatccagtatgcccttcgcaccttgggaagtcggggctacattcccatttataccccctttttcatgaggaaggaggtcatgcaggaggtggcacagctcagccagtttgatgaagaactttataaggtgattggcaaaggcagtgaaaagtctgatgacaactcctatgatgagaagtacctgattgccacctcagagcagcccattgctgccctgcaccgggatgagtggctccggccggaggacctgcccatcaagtatgctggcctgtctacctgcttccgtcaggaggtgggctcccatggccgtgacacccgtggcatcttccgagtccatcagtttgagaagattgaacagtttgtgtactcatcaccccatgacaacaagtcatgggagatgtttgaagagatgattaccaccgcagaggagttctaccagtccctggggattccttaccacattgtgaatattgtctcaggttctttgaatcatgctgccagtaagaagcttgacctggaggcctggtttccgggctcaggagccttccgtgagttggtctcctgttctaattgcacggattaccaggctcgccggcttcgaatccgatatgggcaaaccaagaagatgatggacaaggtggagtttgtccatatgctcaatgctaccatgtgcgccactacccgtaccatctgcgccatcctggagaactaccagacagagaagggcatcactgtgcctgagaaattgaaggagttcatgccgccaggactgcaagaactgatcccctttgtgaagcctgcgcccattgagcaggagccatcaaagaagcagaagaagcaacatgagggcagcaaaaagaaagcagcagcaagagacgtcaccctagaaaacaggctgcagaacatggaggtcaccgatgcttgaacattcctgcctccctatttgccaggctttcatttctgtctgctgagatctcagagcctgcccaacagcagggaagccaagcacccattcatccccctgcccccatctgactgcgtagctgagaggggaacagtgccatgtaccacacagatgttcctgtctcctcgcatgggcatagggacccatcattgatgactgatgaaaccatgtaataaagcatctctggggagggcttaggactcttcctcagtcttcttccccgggcttgaaccccgcctctgaggttctccctgatat

SEQ ID NO: 433677 - DNA, 2224 bp, Homo sapiens
tggcgaattcggcacgagggagagaagcgcttcaaggacccgggactagtggaccagctggtgaaggcagacagcgagtggcgacgatgtagatttcgggcagacaacttgaacaagctgaagaacctatgcagcaagacaatcggagagaaaatgaagaaaaaagagccagtgggagatgatgagtctgtcccagagaatgtgctgagtttcgatgaccttactgcagacgcttcatcaatgaggagtcggacttttttgattgtgctgcggcgcgatccttgcttccctgagcgttggcccgggaggaaagaagatggtgctggatctggatttgtttcgggtggataaaggaggggacccagccctcatccgagagacgcaggagaagcgcttcaaggacccgggactagtggaccagctggtgaaggcagacagcgagtggcgacgatgtagatttcgggcagacaacttgaacaagctgaagaacctatgcagcaagacaatcggagagaaaatgaagaaaaaagagccagtgggagatgatgagtctgtcccagagaatgtgctgagtttcgatgaccttactgcagacgctttagctaacctgaaagtctcacaaatcaaaaaagtccgactcctcattgatgaagccatcctgaagtgtgacgcggagcggataaagttggaagcagagcggtttgagaacctccgagagattgggaaccttctgcacccttctgtacccatcagtaacgatgaggatgtggacaacaaagtagagaggatttggggtgattgtacagtcaggaagaagtactctcatgtggacctggtggtgatggtagatggctttgaaggcgaaaagggggccgtggtggctgggagtcgagggtacttcttgaagggggtcctggtgttcctggaacaggctctcatccagtatgcccttcgcaccttgggaagtcggggctacattcccatttataccccctttttcatgaggaaggaggtcatgcaggaggtggcacagctcagccagtttgatgaagaactttataaggtgattggcaaaggcagtgaaaagtctgatgacaactcctatgatgagaagtacctgattgccacctcagagcagcccattgctgccctgcaccgggatgagtggctccggccggaggacctgcccatcaagtatgctggcctgtctacctgcttccgtcaggaggtgggctcccatggccgtgacacccgtggcatcttccgagtccatcagtttgagaagattgaacagtttgtgtactcatcaccccatgacaacaagtcatgggagatgtttgaagagatgattaccaccgcagaggagttctaccagtccctggggattccttaccacattgtgaatattgtctcaggttctttgaatcatgctgccagtaagaagcttgacctggaggcctggtttccgggctcaggagccttccgtgagttggtctcctgttctaattgcacggattaccaggctcgccggcttcgaatccgatatgggcaaaccaagaagatgatggacaagagaaagaataatctccatttatctacacagaacaagttggaggcttccctcttctcacccaagaaggtggagtttgtccatatgctcaatgctaccatgtgcgccactacccgtaccatctgcgccatcctggagaactaccagacagagaagggcatcactgtgcctgagaaattgaaggagttcatgccgccaggactgcaagaactgatcccctttgtgaagcctgcgcccattgagcaggagccatcaaagaagcagaagaagcaacatgagggcagcaaaaagaaagcagcagcaagagacgtcaccctagaaaacaggctgcagaacatggaggtcaccgatgcttgaacattcctgcctccctatttgccaggctttcatttctgtctgctgagatctcagagcctgcccaacagcagggaagccaagcacccattcatccccctgcccccatctgactgcgtagctgagaggggaacagtgccatgtaccacacagatgttcctgtctcctcgcatgggcatagggacccatcattgatgactgatgaaaccatgtaataaagcatctctggggagggcttaggactcttcctcagtcttcttccccgggcttgaaccccgcctctgaggttctccctgatat

SEQ ID NO: 433678 - DNA, 2262 bp, Homo sapiens
tggcgaattcggcacgagggagagaagcgcttcaaggacccgggactagtggaccagctggtgaaggcagacagcgagtggcgacgatgtagatttcgggcagacaacttgaacaagctgaagaacctatgcagcaagacaatcggagagaaaatgaagaaaaaagagccagtgggagatgatgagtctgtcccagagaatgtgctgagtttcgatgaccttactgcagacgcttcatcaatgaggagtcggacttttttgattgtgctgcggcgcgatccttgcttccctgagcgttggcccgggaggaaagaagatggtgctggatctggatttgtttcgggtggataaaggaggggacccagccctcatccgagagacgcaggagaagcgcttcaaggacccgggactagtggaccagctggtgaaggcagacagcgagtggcgacgatgtagatttcgggcagacaacttgaacaagctgaagaacctatgcagcaagacaatcggagagaaaatgaagaaaaaagagccagtgggagatgatgagtctgtcccagagaatgtgctgagtttcgatgaccttactgcagacgctttagctaacctgaaagtctcacaaatcaaaaaagtccgactcctcattgatgaagccatcctgaagtgtgacgcggagcggataaagttggaagcagagcggtttgagaacctccgagagattgggaaccttctgcacccttctgtacccatcagtaacgatgaggatgtggacaacaaagtagagaggatttggggtgattgtacagtcaggaagaagtactctcatgtggacctggtggtgatggtagatggctttgaaggcgaaaagggggccgtggtggctgggagtcgagggtacttcttgaagggggtcctggtgttcctggaacaggctctcatccagtatgcccttcgcaccttgggaagtcggggctacattcccatttataccccctttttcatgaggaaggaggtcatgcaggaggtggcacagctcagccagtttgatgaagaactttataaggtgattggcaaaggcagtgaaaagtctgatgacaactcctatgatgagaagtacctgattgccacctcagagcagcccattgctgccctgcaccgggatgagtggctccggccggaggacctgcccatcaagtatgctggcctgtctacctgcttccgtcaggaggtgggctcccatggccgtgacacccgtggcatcttccgagtccatcagtttgagaagattgaacagtttgtgtactcatcaccccatgacaacaagtcatgggagatgtttgaagagatgattaccaccgcagaggagttctaccagtccctggggattccttaccacattgtgaatattgtctcaggttctttgaatcatgctgccagtaagaagcttgacctggaggcctggtttccgggctcaggagccttccgtgagttggtctcctgttctaattgcacggattaccaggctcgccggcttcgaatccgatatgggcaaaccaagaagatgatggacaaggtggagtttgtccatatgctcaatgctaccatgtgcgccactacccgtaccatctgcgccatcctggagaactaccagacagagaagggcatcactgtgcctgagaaattgaaggagttcatgccgccaggactgcaagaactgatcccctttgtgaagcctgcgcccattgagcaggagccatcaaagaagcagaagaagcaacatgagggcagcaaaaagaaagcagcagcaagagacgtcaccctagaaaacaggctgcagaacatggaggtcaccgatgcttgaacattcctgcctccctatttgccaggctttcatttctgtctgctgagaagttaaaggtgtaggtagtaagggtgcagtgttctaagatgaggaacaatggtagcttggaatagtataacagttttagaagtttcaatagcatgggggttggaagctgtctgtggcccacttgggcacccacgcttctgtccacttctggttgccaggagacagcaagcaaagccagcaggacatgaagttgctattgaaacttctaaaactaggcatagcacctattatatatgaataaacttaaatgaaagggttttagtatctaaaggcctcaaataatttagtgacagaaatagtgctagtgcacttctaaaacccagggggaccctatagaccctaccttacctgac

SEQ ID NO: 433679 - DNA, 2309 bp, Homo sapiens
tggcgaattcggcacgagggagagaagcgcttcaaggacccgggactagtggaccagctggtgaaggcagacagcgagtggcgacgatgtagatttcgggcagacaacttgaacaagctgaagaacctatgcagcaagacaatcggagagaaaatgaagaaaaaagagccagtgggagatgatgagtctgtcccagagaatgtgctgagtttcgatgaccttactgcagacgcttcatcaatgaggagtcggacttttttgattgtgctgcggcgcgatccttgcttccctgagcgttggcccgggaggaaagaagatggtgctggatctggatttgtttcgggtggataaaggaggggacccagccctcatccgagagacgcaggagaagcgcttcaaggacccgggactagtggaccagctggtgaaggcagacagcgagtggcgacgatgtagatttcgggcagacaacttgaacaagctgaagaacctatgcagcaagacaatcggagagaaaatgaagaaaaaagagccagtgggagatgatgagtctgtcccagagaatgtgctgagtttcgatgaccttactgcagacgctttagctaacctgaaagtctcacaaatcaaaaaagtccgactcctcattgatgaagccatcctgaagtgtgacgcggagcggataaagttggaagcagagcggtttgagaacctccgagagattgggaaccttctgcacccttctgtacccatcagtaacgatgaggatgtggacaacaaagtagagaggatttggggtgattgtacagtcaggaagaagtactctcatgtggacctggtggtgatggtagatggctttgaaggcgaaaagggggccgtggtggctgggagtcgagggtacttcttgaagggggtcctggtgttcctggaacaggctctcatccagtatgcccttcgcaccttgggaagtcggggctacattcccatttataccccctttttcatgaggaaggaggtcatgcaggaggtggcacagctcagccagtttgatgaagaactttataaggtgattggcaaaggcagtgaaaagtctgatgacaactcctatgatgagaagtacctgattgccacctcagagcagcccattgctgccctgcaccgggatgagtggctccggccggaggacctgcccatcaagtatgctggcctgtctacctgcttccgtcaggaggtgggctcccatggccgtgacacccgtggcatcttccgagtccatcagtttgagaagattgaacagtttgtgtactcatcaccccatgacaacaagtcatgggagatgtttgaagagatgattaccaccgcagaggagttctaccagtccctggggattccttaccacattgtgaatattgtctcaggttctttgaatcatgctgccagtaagaagcttgacctggaggcctggtttccgggctcaggagccttccgtgagttggtctcctgttctaattgcacggattaccaggctcgccggcttcgaatccgatatgggcaaaccaagaagatgatggacaaggtggagtttgtccatatgctcaatgctaccatgtgcgccactacccgtaccatctgcgccatcctggagaactaccagacagagaagggcatcactgtgcctgagaaattgaaggagttcatgccgccaggactgcaagaactgatcccctttgtgaagcctgcgcccattgagcaggagccatcaaagaagcagaagaagcaacatgagggcagcaaaaagaaagcagcagcaagagacgtcaccctagaaaacaggctgcagaacatggaggtcaccgatgcttgaacattccagggagctttatgaataaaacacttcaataaggtcttcaaataagactgccaagctttgctacctcatcatgatgtctaaaaagcaccccatttgggaacatttcattcataaagctccctggaccatggcagctctcggtgcctactcactgggtgcagcacaactctcagggcaagaagggactgccttcctgccgcatgcctgaccggcaactgaagcctccccatggggcaaggctcgggacctgcagcccaccatgccggagcctcccccaaatgccgtgggctccagcacagcccaagcctcccacaacgagcaccgccccctgctccgcggcgcccaatcccattgactacccaagggctcaggagtgcgggcgcacagcgcgggactggcagcagctccgcctgcggccccggtgcggataataggtgaagac

SEQ ID NO: 433680 - DNA, 2106 bp, Homo sapiens
tggcgaattcggcacgagggagagaagcgcttcaaggacccgggactagtggaccagctggtgaaggcagacagcgagtggcgacgatgtagatttcgggcagacaacttgaacaagctgaagaacctatgcagcaagacaatcggagagaaaatgaagaaaaaagagccagtgggagatgatgagtctgtcccagagaatgtgctgagtttcgatgaccttactgcagacgcttcatcaatgaggagtcggacttttttgattgtgctgcggcgcgatccttgcttccctgagcgttggcccgggaggaaagaagatggtgctggatctggatttgtttcgggtggataaaggaggggacccagccctcatccgagagacgcaggagaagcgcttcaaggacccgggactagtggaccagctggtgaaggcagacagcgagtggcgacgatgtagatttcgggcagacaacttgaacaagctgaagaacctatgcagcaagacaatcggagagaaaatgaagaaaaaagagccagtgggagatgatgagtctgtcccagagaatgtgctgagtttcgatgaccttactgcagacgctttagctaacctgaaagtctcacaaatcaaaaaagtccgactcctcattgatgaagccatcctgaagtgtgacgcggagcggataaagttggaagcagagcggtttgagaacctccgagagattgggaaccttctgcacccttctgtacccatcagtaacgatgaggatgtggacaacaaagtagagaggatttggggtgattgtacagtcaggaagaagtactctcatgtggacctggtggtgatggtagatggctttgaaggcgaaaagggggccgtggtggctgggagtcgagggtacttcttgaagggggtcctggtgttcctggaacaggctctcatccagtatgcccttcgcaccttgggaagtcggggctacattcccatttataccccctttttcatgaggaaggaggtcatgcaggaggtggcacagctcagccagtttgatgaagaactttataaggtgattagcctgggtcagagcagcccattgctgccctgcaccgggatgagtggctccggccggaggacctgcccatcaagtatgctggcctgtctacctgcttccgtcaggaggtgggctcccatggccgtgacacccgtggcatcttccgagtccatcagtttgagaagattgaacagtttgtgtactcatcaccccatgacaacaagtcatgggagatgtttgaagagatgattaccaccgcagaggagttctaccagtccctggggattccttaccacattgtgaatattgtctcaggttctttgaatcatgctgccagtaagaagcttgacctggaggcctggtttccgggctcaggagccttccgtgagttggtctcctgttctaattgcacggattaccaggctcgccggcttcgaatccgatatgggcaaaccaagaagatgatggacaaggtggagtttgtccatatgctcaatgctaccatgtgcgccactacccgtaccatctgcgccatcctggagaactaccagacagagaagggcatcactgtgcctgagaaattgaaggagttcatgccgccaggactgcaagaactgatcccctttgtgaagcctgcgcccattgagcaggagccatcaaagaagcagaagaagcaacatgagggcagcaaaaagaaagcagcagcaagagacgtcaccctagaaaacaggctgcagaacatggaggtcaccgatgcttgaacattcctgcctccctatttgccaggctttcatttctgtctgctgagatctcagagcctgcccaacagcagggaagccaagcacccattcatccccctgcccccatctgactgcgtagctgagaggggaacagtgccatgtaccacacagatgttcctgtctcctcgcatgggcatagggacccatcattgatgactgatgaaaccatgtaataaagcatctctggggagggcttaggactcttcctcagtcttcttccccgggcttgaaccccgcctctgaggttctccctgatat

SEQ ID NO: 433681 - DNA, 1847 bp, Homo sapiens
tggcgaattcggcacgagggagagaagcgcttcaaggacccgggactagtggaccagctggtgaaggcagacagcgagtggcgacgatgtagatttcgggcagacaacttgaacaagctgaagaacctatgcagcaagacaatcggagagaaaatgaagaaaaaagagccagtgggagatgatgagtctgtcccagagaatgtgctgagtttcgatgaccttactgcagacgcttcatcaatgaggagtcggacttttttgattgtgctgcggcgcgatccttgcttccctgagcgttggcccgggaggaaagaagatggtgctggatctggatttgtttcgggtggataaaggaggggacccagccctcatccgagagacgcaggagaagcgcttcaaggacccgggactagtggaccagctggtgaaggcagacagcgagtggcgacgatgtagatttcgggcagacaacttgaacaagctgaagaacctatgcagcaagacaatcggagagaaaatgaagaaaaaagagccagtgggagatgatgagtctgtcccagagaatgtgctgagtttcgatgaccttactgcagacgctttagctaacctgaaagtctcacaaatcaaaaaagtccgactcctcattgatgaagccatcctgaagtgtgacgcggagcggataaagttggaagcagagcggtttgagaacctccgagagattgggaaccttctgcacccttctgtacccatcagtaacgatgaggatgtggacaacaaagtagagaggatttggggtgattgtacagtcaggaagaagtactctcatgtggacctggtggtgatggtagatggctttgaaggcgaaaagggggccgtggtggctgggagtcgagggtacttcttgaagggggtcctggtgttcctggaacaggctctcatccagtatgcccttcgcaccttgggaagtcggggctacattcccatttataccccctttttcatgaggaaggaggtcatgcaggaggtggcacagctcagccagtttgatgaagaactttataaggtgattggcaaaggcagtgaaaagtctgatgacaactcctatgatgagaagtacctgattgccacctcagagcagcccattgctgccctgcaccgggatgagtggctccggccggaggacctgcccatcaagtatgctggcctgtctacctgcttccgtcaggaggtgggctcccatggccgtgacacccgtggcatcttccgagtccatcagtttgagaagattgaacagtttgtgtactcatcaccccatgacaacaagtcatgggagatgtttgaagagatgattaccaccgcagaggagttctaccagtccctggggattccttaccacattgtgaatattgtctcaggttctttgaatcatgctgccagtaagaagcttgacctggaggcctggtttccgggctcaggagccttccgtgagttggtctcctgttctaattgcacggattaccaggctcgccggcttcgaatccgatatgggcaaaccaagaagatgatggacaaggtggagtttgtccatatgctcaatgctaccatgtgcgccactacccgtaccatctgcgccatcctggagaactaccagacagagaagggcatcactgtgcctgagaaattgaaggagttcatgccgccaggactgccaaggacctggatccccctttgtgaaggcctgggcgcccattgggggcgggggaccatccaaggaggcggaggaggcacacattgggggccggcaaaagggagcgcggcgaccgggacgcgacaccctgagaacacag

SEQ ID NO: 433682 - DNA, 1774 bp, Homo sapiens
tggcgaattcggcacgagggagagaagcgcttcaaggacccgggactagtggaccagctggtgaaggcagacagcgagtggcgacgatgtagatttcgggcagacaacttgaacaagctgaagaacctatgcagcaagacaatcggagagaaaatgaagaaaaaagagccagtgggagatgatgagtctgtcccagagaatgtgctgagtttcgatgaccttactgcagacgcttcatcaatgaggagtcggacttttttgattgtgctgcggcgcgatccttgcttccctgagcgttggcccgggaggaaagaagatggtgctggatctggatttgtttcgggtggataaaggaggggacccagccctcatccgagagacgcaggagaagcgcttcaaggacccgggactagtggaccagctggtgaaggcagacagcgagtggcgacgatgtagatttcgggcagacaacttgaacaagctgaagaacctatgcagcaagacaatcggagagaaaatgaagaaaaaagagccagtgggagatgatgagtctgtcccagagaatgtgctgagtttcgatgaccttactgcagacgctttagctaacctgaaagtctcacaaatcaaaaaagtccgactcctcattgatgaagccatcctgaagtgtgacgcggagcggataaagttggaagcagagcggtttgagaacctccgagagattgggaaccttctgcacccttctgtacccatcagtaacgatgaggatgtggacaacaaagtagagaggatttggggtgattgtacagtcaggaagaagtactctcatgtggacctggtggtgatggtagatggctttgaaggcgaaaagggggccgtggtggctgggagtcgagggtacttcttgaagggggtcctggtgttcctggaacaggctctcatccagtatgcccttcgcaccttgggaagtcggggctacattcccatttataccccctttttcatgaggaaggaggtcatgcaggaggtggcacagctcagccagtttgatgaagaactttataaggtgattggcaaaggcagtgaaaagtctgatgacaactcctatgatgagaagtacctgattgccacctcagagcagcccattgctgccctgcaccgggatgagtggctccggccggaggacctgcccatcaagtatgctggcctgtctacctgcttccgtcaggaggtgggctcccatggccgtgacacccgtggcatcttccgagtccatcagtttgagaagattgaacagtttgtgtactcatcaccccatgacaacaagtcatgggagatgtttgaagagatgattaccaccgcagaggagttctaccagtccctggggattccttaccacattgtgaatattgtctcaggttctttgaatcatgctgccagtaagaagcttgacctggaggcctggtttccgggctcaggagccttccgtgagttggtctcctgttctaattgcacggattaccaggctcgccggcttcgaatccgatatgggcaaaccaagaagatgatggacaaggtggagtttgtccatatgctcaatgctaccatgtgcgccactacccgtaccatctgcgccatcctggagaactaccagacagagaagggcatcactgtgcctgagaaattgaaggagttcatgccgccaggactgcaagaactaatccccggtggaccagtcattgggagatgtttgaagagatgattaccacctgcagat

SEQ ID NO: 433683 - DNA, 2179 bp, Homo sapiens
tggcgaattcggcacgagggagagaagcgcttcaaggacccgggactagtggaccagctggtgaaggcagacagcgagtggcgacgatgtagatttcgggcagacaacttgaacaagctgaagaacctatgcagcaagacaatcggagagaaaatgaagaaaaaagagccagtgggagatgatgagtctgtcccagagaatgtgctgagtttcgatgaccttactgcagacgcttcatcaatgaggagtcggacttttttgattgtgctgcggcgcgatccttgcttccctgagcgttggcccgggaggaaagaagatggtgctggatctggatttgtttcgggtggataaaggaggggacccagccctcatccgagagacgcaggagaagcgcttcaaggacccgggactagtggaccagctggtgaaggcagacagcgagtggcgacgattcttggattctttattcctaggtagatttcgggcagacaacttgaacaagctgaagaacctatgcagcaagacaatcggagagaaaatgaagaaaaaagagccagtgggagatgatgagtctgtcccagagaatgtgctgagtttcgatgaccttactgcagacgctttagctaacctgaaagtctcacaaatcaaaaaagtccgactcctcattgatgaagccatcctgaagtgtgacgcggagcggataaagttggaagcagagcggtttgagaacctccgagagattgggaaccttctgcacccttctgtacccatcagtaacgatgaggatgtggacaacaaagtagagaggatttggggtgattgtacagtcaggaagaagtactctcatgtggacctggtggtgatggtagatggctttgaaggcgaaaagggggccgtggtggctgggagtcgagggtacttcttgaagggggtcctggtgttcctggaacaggctctcatccagtatgcccttcgcaccttgggaagtcggggctacattcccatttataccccctttttcatgaggaaggaggtcatgcaggaggtggcacagctcagccagtttgatgaagaactttataaggtgattggcaaaggcagtgaaaagtctgatgacaactcctatgatgagaagtacctgattgccacctcagagcagcccattgctgccctgcaccgggatgagtggctccggccggaggacctgcccatcaagtatgctggcctgtctacctgcttccgtcaggaggtgggctcccatggccgtgacacccgtggcatcttccgagtccatcagtttgagaagattgaacagtttgtgtactcatcaccccatgacaacaagtcatgggagatgtttgaagagatgattaccaccgcagaggagttctaccagtccctggggattccttaccacattgtgaatattgtctcaggttctttgaatcatgctgccagtaagaagcttgacctggaggcctggtttccgggctcaggagccttccgtgagttggtctcctgttctaattgcacggattaccaggctcgccggcttcgaatccgatatgggcaaaccaagaagatgatggacaaggtggagtttgtccatatgctcaatgctaccatgtgcgccactacccgtaccatctgcgccatcctggagaactaccagacagagaagggcatcactgtgcctgagaaattgaaggagttcatgccgccaggactgcaagaactgatcccctttgtgaagcctgcgcccattgagcaggagccatcaaagaagcagaagaagcaacatgagggcagcaaaaagaaagcagcagcaagagacgtcaccctagaaaacaggctgcagaacatggaggtcaccgatgcttgaacattcctgcctccctatttgccaggctttcatttctgtctgctgagatctcagagcctgcccaacagcagggaagccaagcacccattcatccccctgcccccatctgactgcgtagctgagaggggaacagtgccatgtaccacacagatgttcctgtctcctcgcatgggcatagggacccatcattgatgactgatgaaaccatgtaataaagcatctctggggagggcttaggactcttcctcagtcttcttccccgggcttgaaccccgcctctgaggttctccctgatat

SEQ ID NO: 433684 - DNA, 2275 bp, Homo sapiens
tggcgaattcggcacgagggagagaagcgcttcaaggacccgggactagtggaccagctggtgaaggcagacagcgagtggcgacgatgtagatttcgggcagacaacttgaacaagctgaagaacctatgcagcaagacaatcggagagaaaatgaagaaaaaagagccagtgggagatgatgagtctgtcccagagaatgtgctgagtttcgatgaccttactgcagacgcttcatcaatgaggagtcggacttttttgattgtgctgcggcgcgatccttgcttccctgagcgttggcccgggaggaaagaagatggtgctggatctggatttgtttcgggtggataaaggaggggacccagccctcatccgagagacgcaggagaagcgcttcaaggacccgggactagtggaccagctggtgaaggcagacagcgagtggcgacgatagtctcattctgttaccaggctggaatgcagtggcgtgacctcagctcactgcaacctccacctcccaggttcaagcgattctcctgcctcagcctcctgagtagctgggactacaggtagatttcgggcagacaacttgaacaagctgaagaacctatgcagcaagacaatcggagagaaaatgaagaaaaaagagccagtgggagatgatgagtctgtcccagagaatgtgctgagtttcgatgaccttactgcagacgctttagctaacctgaaagtctcacaaatcaaaaaagtccgactcctcattgatgaagccatcctgaagtgtgacgcggagcggataaagttggaagcagagcggtttgagaacctccgagagattgggaaccttctgcacccttctgtacccatcagtaacgatgaggatgtggacaacaaagtagagaggatttggggtgattgtacagtcaggaagaagtactctcatgtggacctggtggtgatggtagatggctttgaaggcgaaaagggggccgtggtggctgggagtcgagggtacttcttgaagggggtcctggtgttcctggaacaggctctcatccagtatgcccttcgcaccttgggaagtcggggctacattcccatttataccccctttttcatgaggaaggaggtcatgcaggaggtggcacagctcagccagtttgatgaagaactttataaggtgattggcaaaggcagtgaaaagtctgatgacaactcctatgatgagaagtacctgattgccacctcagagcagcccattgctgccctgcaccgggatgagtggctccggccggaggacctgcccatcaagtatgctggcctgtctacctgcttccgtcaggaggtgggctcccatggccgtgacacccgtggcatcttccgagtccatcagtttgagaagattgaacagtttgtgtactcatcaccccatgacaacaagtcatgggagatgtttgaagagatgattaccaccgcagaggagttctaccagtccctggggattccttaccacattgtgaatattgtctcaggttctttgaatcatgctgccagtaagaagcttgacctggaggcctggtttccgggctcaggagccttccgtgagttggtctcctgttctaattgcacggattaccaggctcgccggcttcgaatccgatatgggcaaaccaagaagatgatggacaaggtggagtttgtccatatgctcaatgctaccatgtgcgccactacccgtaccatctgcgccatcctggagaactaccagacagagaagggcatcactgtgcctgagaaattgaaggagttcatgccgccaggactgcaagaactgatcccctttgtgaagcctgcgcccattgagcaggagccatcaaagaagcagaagaagcaacatgagggcagcaaaaagaaagcagcagcaagagacgtcaccctagaaaacaggctgcagaacatggaggtcaccgatgcttgaacattcctgcctccctatttgccaggctttcatttctgtctgctgagatctcagagcctgcccaacagcagggaagccaagcacccattcatccccctgcccccatctgactgcgtagctgagaggggaacagtgccatgtaccacacagatgttcctgtctcctcgcatgggcatagggacccatcattgatgactgatgaaaccatgtaataaagcatctctggggagggcttaggactcttcctcagtcttcttccccgggcttgaaccccgcctctgaggttctccctgatat

SEQ ID NO: 433685 - DNA, 2171 bp, Homo sapiens
  misc_feature (1519)..(1519): n is a, c, g, or t
  misc_feature (1525)..(1525): n is a, c, g, or t
  misc_feature (1530)..(1530): n is a, c, g, or t
  misc_feature (1537)..(1537): n is a, c, g, or t
  misc_feature (1555)..(1555): n is a, c, g, or t
  misc_feature (1560)..(1560): n is a, c, g, or t
  misc_feature (1563)..(1563): n is a, c, g, or t
  misc_feature (1573)..(1573): n is a, c, g, or t
  misc_feature (1577)..(1577): n is a, c, g, or t
  misc_feature (1579)..(1579): n is a, c, g, or t
  misc_feature (1582)..(1582): n is a, c, g, or t
  misc_feature (1594)..(1594): n is a, c, g, or t
  misc_feature (1599)..(1599): n is a, c, g, or t
  misc_feature (1608)..(1608): n is a, c, g, or t
  misc_feature (1628)..(1629): n is a, c, g, or t
  misc_feature (1638)..(1638): n is a, c, g, or t
  misc_feature (1647)..(1647): n is a, c, g, or t
  misc_feature (1653)..(1653): n is a, c, g, or t
  misc_feature (1667)..(1667): n is a, c, g, or t
  misc_feature (1673)..(1673): n is a, c, g, or t
  misc_feature (1679)..(1679): n is a, c, g, or t
  misc_feature (1683)..(1683): n is a, c, g, or t
  misc_feature (1691)..(1691): n is a, c, g, or t
  misc_feature (1694)..(1694): n is a, c, g, or t
  misc_feature (1728)..(1728): n is a, c, g, or t
  misc_feature (1749)..(1749): n is a, c, g, or t
  misc_feature (1755)..(1755): n is a, c, g, or t
  misc_feature (1763)..(1763): n is a, c, g, or t
  misc_feature (1769)..(1769): n is a, c, g, or t
tggcgaattcggcacgagggagagaagcgcttcaaggacccgggactagtggaccagctggtgaaggcagacagcgagtggcgacgatgtagatttcgggcagacaacttgaacaagctgaagaacctatgcagcaagacaatcggagagaaaatgaagaaaaaagagccagtgggagatgatgagtctgtcccagagaatgtgctgagtttcgatgaccttactgcagacgcttcatcaatgaggagtcggacttttttgattgtgctgcggcgcgatccttgcttccctgagcgttggcccgggaggaaagaagatggtgctggatctggatttgtttcgggtggataaaggaggggacccagccctcatccgagagacgcaggagaagcgcttcaaggacccgggactagtggaccagctggtgaaggcagacagcgagtggcgacgatgtagatttcgggcagacaacttgaacaagctgaagaacctatgcagcaagacaatcggagagaaaatgaagaaaaaagagccagtgggagatgatgagtctgtcccagagaatgtgctgagtttcgatgaccttactgcagacgctttagctaacctgaaagtctcacaaatcaaaaaagtccgactcctcattgatgaagccatcctgaagtgtgacgcggagcggataaagttggaagcagagcggtttgagaacctccgagagattgggaaccttctgcacccttctgtacccatcagtaacgatgaggatgtggacaacaaagtagagaggatttggggtgattgtacagtcaggaagaagtactctcatgtggacctggtggtgatggtagatggctttgaaggcgaaaagggggccgtggtggctgggagtcgagggtacttcttgaagggggtcctggtgttcctggaacaggctctcatccagtatgcccttcgcaccttgggaagtcggggctacattcccatttataccccctttttcatgaggaaggaggtcatgcaggaggtggcacagctcagccagtttgatgaagaactttataaggtgattggcaaaggcagtgaaaagtctgatgacaactcctatgatgagaagtacctgattgccacctcagagcagcccattgctgccctgcaccgggatgagtggctccggccggaggacctgcccatcaagtatgctggcctgtctacctgcttccgtcaggaggtgggctcccatggccgtgacacccgtggcatcttccgagtccatcagtttgagaagattgaacagtttgtgtactcatcaccccatgacaacaagtcatgggagatgtttgaagagatgattaccaccgcagaggagttctaccagtccctggggattccttaccacattgtgaatattgtctcagtctttgaatcatgctgccagtaagaagcttgacaaaaagaatgataacaaaaaaaggaacaaacaataaaaaaaaaacataaaaaaaaaaaacagattaaaaanatacancgaanaaaaaanaaatatggaaaaaaaaanaaaanaangaaaaagganaagnanaanaataaaataaangctanaataaacanaaaaaccaagtaccatactnngccaaactnaaaaaatanaaaaanaaaaaagagaaaanaataancatganaaanaaaaaganaancaaacacaaaaaaaaaaaaaaaaaaaaaaccaantaaaaaaacaagcaacccaanaaaaanaaacaaanaaaaanaaaaagaagcagaagaagcaacatgagggcagcaaaaagaaagcagcagcaagagacgtcaccctagaaaacaggctgcagaacatggaggtcaccgatgcttgaacattcctgcctccctatttgccaggctttcatttctgtctgctgagatctcagagcctgcccaacagcagggaagccaagcacccattcatccccctgcccccatctgactgcgtagctgagaggggaacagtgccatgtaccacacagatgttcctgtctcctcgcatgggcatagggacccatcattgatgactgatgaaaccatgtaataaagcatctctggggagggcttaggactcttcctcagtcttcttccccgggcttgaaccccgcctctgaggttctccctgatat

SEQ ID NO: 433686 - DNA, 2180 bp, Homo sapiens
tggcgaattcggcacgagggagagaagcgcttcaaggacccgggactagtggaccagctggtgaaggcagacagcgagtggcgacgatgtagatttcgggcagacaacttgaacaagctgaagaacctatgcagcaagacaatcggagagaaaatgaagaaaaaagagccagtgggagatgatgagtctgtcccagagaatgtgctgagtttcgatgaccttactgcagacgcttcatcaatgaggagtcggacttttttgattgtgctgcggcgcgatccttgcttccctgagcgttggcccgggaggaaagaagatggtgctggatctggatttgtttcgggtggataaaggaggggacccagccctcatccgagagacgcaggagaagcgcttcaaggacccgggactagtggaccagctggtgaaggcagacagcgagtggcgacgatgtagatttcgggcagacaacttgaacaagctgaagaacctatgcagcaagacaatcggagagaaaatgaagaaaaaagagccagtgggagatgatgagtctgtcccagagaatgtgctgagtttcgatgaccttactgcagacgctttagctggcctggcctgttcatctgcagaacctgaaagtctcacaaatcaaaaaagtccgactcctcattgatgaagccatcctgaagtgtgacgcggagcggataaagttggaagcagagcggtttgagaacctccgagagattgggaaccttctgcacccttctgtacccatcagtaacgatgaggatgtggacaacaaagtagagaggatttggggtgattgtacagtcaggaagaagtactctcatgtggacctggtggtgatggtagatggctttgaaggcgaaaagggggccgtggtggctgggagtcgagggtacttcttgaagggggtcctggtgttcctggaacaggctctcatccagtatgcccttcgcaccttgggaagtcggggctacattcccatttataccccctttttcatgaggaaggaggtcatgcaggaggtggcacagctcagccagtttgatgaagaactttataaggtgattggcaaaggcagtgaaaagtctgatgacaactcctatgatgagaagtacctgattgccacctcagagcagcccattgctgccctgcaccgggatgagtggctccggccggaggacctgcccatcaagtatgctggcctgtctacctgcttccgtcaggaggtgggctcccatggccgtgacacccgtggcatcttccgagtccatcagtttgagaagattgaacagtttgtgtactcatcaccccatgacaacaagtcatgggagatgtttgaagagatgattaccaccgcagaggagttctaccagtccctggggattccttaccacattgtgaatattgtctcaggttctttgaatcatgctgccagtaagaagcttgacctggaggcctggtttccgggctcaggagccttccgtgagttggtctcctgttctaattgcacggattaccaggctcgccggcttcgaatccgatatgggcaaaccaagaagatgatggacaaggtggagtttgtccatatgctcaatgctaccatgtgcgccactacccgtaccatctgcgccatcctggagaactaccagacagagaagggcatcactgtgcctgagaaattgaaggagttcatgccgccaggactgcaagaactgatcccctttgtgaagcctgcgcccattgagcaggagccatcaaagaagcagaagaagcaacatgagggcagcaaaaagaaagcagcagcaagagacgtcaccctagaaaacaggctgcagaacatggaggtcaccgatgcttgaacattcctgcctccctatttgccaggctttcatttctgtctgctgagatctcagagcctgcccaacagcagggaagccaagcacccattcatccccctgcccccatctgactgcgtagctgagaggggaacagtgccatgtaccacacagatgttcctgtctcctcgcatgggcatagggacccatcattgatgactgatgaaaccatgtaataaagcatctctggggagggcttaggactcttcctcagtcttcttccccgggcttgaaccccgcctctgaggttctccctgatat

SEQ ID NO: 433687 - DNA, 1473 bp, Homo sapiens
tggcgaattcggcacgagggagagaagcgcttcaaggacccgggactagtggaccagctggtgaaggcagacagcgagtggcgacgatgtagatttcgggcagacaacttgaacaagctgaagaacctatgcagcaagacaatcggagagaaaatgaagaaaaaagagccagtgggagatgatgagtctgtcccagagaatgtgctgagtttcgatgaccttactgcagacgcttcatcaatgaggagtcggacttttttgattgtgctgcggcgcgatccttgcttccctgagcgttggcccgggaggaaagaagatggtgctggatctggatttgtttcgggtggataaaggaggggacccagccctcatccgagagacgcaggagaagcgcttcaaggacccgggactagtggaccagctggtgaaggcagacagcgagtggcgacgatgtagatttcgggcagacaacttgaacaagctgaagaacctatgcagcaagacaatcggagagaaaatgaagaaaaaagagccagtgggagatgatgagtctgtcccagagaatgtgctgagtttcgatgaccttactgcagacgctttagctaacctgaaagtctcacaaatcaaaaaagtccgactcctcattgatgaagccatcctgaagtgtgacgcggagcggataaagttggaagcagagcggtttgagaacctccgagagattgggaaccttctgcacccttctgtacccatcagtaacgatgaggatgtggacaacaaagtagagaggatttggggtgattgtacagtcaggaagaagtactctcatgtggacctggtggtgatggtagatggctttgaaggcgaaaagggggccgtggtggctgggagtcgagggtacttcttgaagggggtcctggtgttcctggaacaggctctcatccagtatgcccttcgcaccttgggaagtcggggctacattcccatttataccccctttttcatgaggaaggaggtcatgcaggaggtggcacagctcagccagtttgatgaagaactttataaggtgattggcaaaggcagtgaaaagtctgatgacaactcctatgatgagaagtacctgattgccacctcagagcagcccattgctgccctgcaccgggatgagtggctccggccggaggacctgcccatcaagtatgctggcctgtctacctgcttccgtcaggaggtgggctcccatggccgtgacacccgtggcatcttccgagtccatcagtttgagaagattgaacagtttgtgtactcatcaccccatgacaacaagtcatgggagatgtttgaagagatgattaccaccgcagaggagttctaccagtccctggggattccttaccacattgtgaatattgtctcaggtatgggacccagcctcttctcagcctccctttcctgtaatcccagacgccaccctta

SEQ ID NO: 433688 - DNA, 1659 bp, Homo sapiens
tggcgaattcggcacgagggagagaagcgcttcaaggacccgggactagtggaccagctggtgaaggcagacagcgagtggcgacgatgtagatttcgggcagacaacttgaacaagctgaagaacctatgcagcaagacaatcggagagaaaatgaagaaaaaagagccagtgggagatgatgagtctgtcccagagaatgtgctgagtttcgatgaccttactgcagacgcttcatcaatgaggagtcggacttttttgattgtgctgcggcgcgatccttgcttccctgagcgttggcccgggaggaaagaagatggtgctggatctggatttgtttcgggtggataaaggaggggacccagccctcatccgagagacgcaggagaagcgcttcaaggacccgggactagtggaccagctggtgaaggcagacagcgagtggcgacgatgtagatttcgggcagacaacttgaacaagctgaagaacctatgcagcaagacaatcggagagaaaatgaagaaaaaagagccagtgggagatgatgagtctgtcccagagaatgtgctgagtttcgatgaccttactgcagacgctttagctaacctgaaagtctcacaaatcaaaaaagtccgactcctcattgatgaagccatcctgaagtgtgacgcggagcggataaagttggaagcagagcggtttgagaacctccgagagattgggaaccttctgcacccttctgtacccatcagtaacgatgaggatgtggacaacaaagtagagaggatttggggtgattgtacagtcaggaagaagtactctcatgtggacctggtggtgatggtagatggctttgaaggcgaaaagggggccgtggtggctgggagtcgagggtacttcttgaagggggtcctggtgttcctggaacaggctctcatccagtatgcccttcgcaccttgggaagtcggggctacattcccatttataccccctttttcatgaggaaggaggtcatgcaggaggtggcacagctcagccagtttgatgaagaactttataaggtgattggcaaaggcagtgaaaagtctgatgacaactcctatgatgagaagtacctgattgccacctcagagcagcccattgctgccctgcaccgggatgagtggctccggccggaggacctgcccatcaagtatgctggcctgtctacctgcttccgtcaggaggtgggctcccatggccgtgacacccgtggcatcttccgagtccatcagtttgagaagattgaacagtttgtgtactcatcaccccatgacaacaagtcatgggagatgtttgaagagatgattaccaccgcagaggagacggtcgcatagtgctgacgattcaggtggctttgctgagtgagtacctgccacctgcacacagtaagcctgtgttatctaactttattccaactaccaccctagctggctgtgtccattcggcatcatttcctgtcacacagagtcacactggtcacccacttccatcatcttagttgctggcagcagtgctccatacccacccccaagtcagccctccatctgttttcctgtaagtcaggcctggtaggctggttcctgcatctctgaggaatgatgcggccgtctggtcg

SEQ ID NO: 433689 - DNA, 2097 bp, Homo sapiens
tggcgaattcggcacgagggagagaagcgcttcaaggacccgggactagtggaccagctggtgaaggcagacagcgagtggcgacgatgtagatttcgggcagacaacttgaacaagctgaagaacctatgcagcaagacaatcggagagaaaatgaagaaaaaagagccagtgggagatgatgagtctgtcccagagaatgtgctgagtttcgatgaccttactgcagacgcttcatcaatgaggagtcggacttttttgattgtgctgcggcgcgatccttgcttccctgagcgttggcccgggaggaaagaagatggtgctggatctggatttgtttcgggtggataaaggaggggacccagccctcatccgagagacgcaggagaagcgcttcaaggacccgggactagtggaccagctggtgaaggcagacagcgagtggcgacgatgtagatttcgggcagacaacttgaacaagctgaagaacctatgcagcaagacaatcggagagaaaatgaagaaaaaagagccagtgggagatgatgagtctgtcccagagaatgtgctgagtttcgatgaccttactgcagacgctttagctgtaagttatagttcttttagttggaagcagagcggtttgagaacctccgagagattgggaaccttctgcacccttctgtacccatcagtaacgatgaggatgtggacaacaaagtagagaggatttggggtgattgtacagtcaggaagaagtactctcatgtggacctggtggtgatggtagatggctttgaaggcgaaaagggggccgtggtggctgggagtcgagggtacttcttgaagggggtcctggtgttcctggaacaggctctcatccagtatgcccttcgcaccttgggaagtcggggctacattcccatttataccccctttttcatgaggaaggaggtcatgcaggaggtggcacagctcagccagtttgatgaagaactttataaggtgattggcaaaggcagtgaaaagtctgatgacaactcctatgatgagaagtacctgattgccacctcagagcagcccattgctgccctgcaccgggatgagtggctccggccggaggacctgcccatcaagtatgctggcctgtctacctgcttccgtcaggaggtgggctcccatggccgtgacacccgtggcatcttccgagtccatcagtttgagaagattgaacagtttgtgtactcatcaccccatgacaacaagtcatgggagatgtttgaagagatgattaccaccgcagaggagttctaccagtccctggggattccttaccacattgtgaatattgtctcaggttctttgaatcatgctgccagtaagaagcttgacctggaggcctggtttccgggctcaggagccttccgtgagttggtctcctgttctaattgcacggattaccaggctcgccggcttcgaatccgatatgggcaaaccaagaagatgatggacaaggtggagtttgtccatatgctcaatgctaccatgtgcgccactacccgtaccatctgcgccatcctggagaactaccagacagagaagggcatcactgtgcctgagaaattgaaggagttcatgccgccaggactgcaagaactgatcccctttgtgaagcctgcgcccattgagcaggagccatcaaagaagcagaagaagcaacatgagggcagcaaaaagaaagcagcagcaagagacgtcaccctagaaaacaggctgcagaacatggaggtcaccgatgcttgaacattcctgcctccctatttgccaggctttcatttctgtctgctgagatctcagagcctgcccaacagcagggaagccaagcacccattcatccccctgcccccatctgactgcgtagctgagaggggaacagtgccatgtaccacacagatgttcctgtctcctcgcatgggcatagggacccatcattgatgactgatgaaaccatgtaataaagcatctctggggagggcttaggactcttcctcagtcttcttccccgggcttgaaccccgcctctgaggttctccctgatat

SEQ ID NO: 433690 - DNA, 1847 bp, Homo sapiens
  misc_feature (416)..(416): n is a, c, g, or t
  misc_feature (424)..(426): n is a, c, g, or t
gaaaaggcatgatgtcccaaatcaaggacagagaggagacacatttgtttctcaacagccaactgaattacaactttaaaacattcttacagatgtcagataagaccttgtcttgggctgaccaatatcatcttatattatcaaaatgcttatagtcagctgtcaccagtgcctggattggtttcacatacttttatagacacagttagaaactttctgataacattttagtaaactcttgagtaactttggagagagaatcatcatgcttcaattcattatatgcagatcaataaagagaagtaggaatagcacaaaatatagtcctagtatagtctaccctgctgttaagtaaagctgctttctttttttcattgcccaaatgtatggcttgcatccaactagtcactgatggnagcaagannncatcttctcccatcagtaacgatgaggatgtggacaacaaagtagagaggatttggggtgattgtacagtcaggaagaagtactctcatgtggacctggtggtgatggtagatggctttgaaggcgaaaagggggccgtggtggctgggagtcgagggtacttcttgaagggggtcctggtgttcctggaacaggctctcatccagtatgcccttcgcaccttgggaagtcggggctacattcccatttataccccctttttcatgaggaaggaggtcatgcaggaggtggcacagctcagccagtttgatgaagaactttataaggtgattggcaaaggcagtgaaaagtctgatgacaactcctatgatgagaagtacctgattgccacctcagagcagcccattgctgccctgcaccgggatgagtggctccggccggaggacctgcccatcaagtatgctggcctgtctacctgcttccgtcaggaggtgggctcccatggccgtgacacccgtggcatcttccgagtccatcagtttgagaagattgaacagtttgtgtactcatcaccccatgacaacaagtcatgggagatgtttgaagagatgattaccaccgcagaggagttctaccagtccctggggattccttaccacattgtgaatattgtctcaggttctttgaatcatgctgccagtaagaagcttgacctggaggcctggtttccgggctcaggagccttccgtgagttggtctcctgttctaattgcacggattaccaggctcgccggcttcgaatccgatatgggcaaaccaagaagatgatggacaaggtggagtttgtccatatgctcaatgctaccatgtgcgccactacccgtaccatctgcgccatcctggagaactaccagacagagaagggcatcactgtgcctgagaaattgaaggagttcatgccgccaggactgcaagaactgatcccctttgtgaagcctgcgcccattgagcaggagccatcaaagaagcagaagaagcaacatgagggcagcaaaaagaaagcagcagcaagagacgtcaccctagaaaacaggctgcagaacatggaggtcaccgatgcttgaacattcctgcctccctatttgccaggctttcatttctgtctgctgagatctcagagcctgcccaacagcagggaagccaagcacccattcatccccctgcccccatctgactgcgtagctgagaggggaacagtgccatgtaccacacagatgttcctgtctcctcgcatgggcatagggacccatcattgatgactgatgaaaccatgtaataaagcatctctggggagggcttaggactcttcctcagtcttcttccccgggcttgaaccccgcctctgaggttctccctgatat

SEQ ID NO: 433691 - DNA, 1535 bp, Homo sapiens
  misc_feature (104)..(104): n is a, c, g, or t
  misc_feature (112)..(114): n is a, c, g, or t
cgtcctatcagcaaaaggtgtgcggctttataagcgggcgctacgccacctcgagtcgtggtgcgtcagagagacaaataccgatactttgcttgtctgatggnagcaagannncatcttctcccatcagtaacgatgaggatgtggacaacaaagtagagaggatttggggtgattgtacagtcaggaagaagtactctcatgtggacctggtggtgatggtagatggctttgaaggcgaaaagggggccgtggtggctgggagtcgagggtacttcttgaagggggtcctggtgttcctggaacaggctctcatccagtatgcccttcgcaccttgggaagtcggggctacattcccatttataccccctttttcatgaggaaggaggtcatgcaggaggtggcacagctcagccagtttgatgaagaactttataaggtgattggcaaaggcagtgaaaagtctgatgacaactcctatgatgagaagtacctgattgccacctcagagcagcccattgctgccctgcaccgggatgagtggctccggccggaggacctgcccatcaagtatgctggcctgtctacctgcttccgtcaggaggtgggctcccatggccgtgacacccgtggcatcttccgagtccatcagtttgagaagattgaacagtttgtgtactcatcaccccatgacaacaagtcatgggagatgtttgaagagatgattaccaccgcagaggagttctaccagtccctggggattccttaccacattgtgaatattgtctcaggttctttgaatcatgctgccagtaagaagcttgacctggaggcctggtttccgggctcaggagccttccgtgagttggtctcctgttctaattgcacggattaccaggctcgccggcttcgaatccgatatgggcaaaccaagaagatgatggacaaggtggagtttgtccatatgctcaatgctaccatgtgcgccactacccgtaccatctgcgccatcctggagaactaccagacagagaagggcatcactgtgcctgagaaattgaaggagttcatgccgccaggactgcaagaactgatcccctttgtgaagcctgcgcccattgagcaggagccatcaaagaagcagaagaagcaacatgagggcagcaaaaagaaagcagcagcaagagacgtcaccctagaaaacaggctgcagaacatggaggtcaccgatgcttgaacattcctgcctccctatttgccaggctttcatttctgtctgctgagatctcagagcctgcccaacagcagggaagccaagcacccattcatccccctgcccccatctgactgcgtagctgagaggggaacagtgccatgtaccacacagatgttcctgtctcctcgcatgggcatagggacccatcattgatgactgatgaaaccatgtaataaagcatctctggggagggcttaggactcttcctcagtcttcttccccgggcttgaaccccgcctctgaggttctccctgatat

SEQ ID NO: 433692 - DNA, 2014 bp, Homo sapiens
tggcgaattcggcacgagggagagaagcgcttcaaggacccgggactagtggaccagctggtgaaggcagacagcgagtggcgacgatgtagatttcgggcagacaacttgaacaagctgaagaacctatgcagcaagacaatcggagagaaaatgaagaaaaaagagccagtgggagatgatgagtctgtcccagagaatgtgctgagtttcgatgaccttactgcagacgcttcatcaatgaggagtcggacttttttgattgtgctgcggcgcgatccttgcttccctgagcgttggcccgggaggaaagaagatggtgctggatctggatttgtttcgggtggataaaggaggggacccagccctcatccgagagacgcaggagaagcgcttcaaggacccgggactagtggaccagctggtgaaggcagacagcgagtggcgacgatgtagatttcgggcagacaacttgaacaagctgaagaacctatgcagcaagacaatcggagagaaaatgaagaaaaaagagccagtgggagatgatgagtctgtcccagagaatgtgctgagtttcgatgaccttactgcagacgctttagctaacctgaaagtctcacaaatcaaaaaagtccgactcctcattgatgaagccatcctgaagtgtgacgcggagcggataaagttggaagcagagcggtttgagaacctccgagagattgggaaccttctgcacccttctgtacccatcagtaacgatgagggggtcctggtgttcctggaacaggctctcatccagtatgcccttcgcaccttgggaagtcggggctacattcccatttataccccctttttcatgaggaaggaggtcatgcaggaggtggcacagctcagccagtttgatgaagaactttataaggtgattggcaaaggcagtgaaaagtctgatgacaactcctatgatgagaagtacctgattgccacctcagagcagcccattgctgccctgcaccgggatgagtggctccggccggaggacctgcccatcaagtatgctggcctgtctacctgcttccgtcaggaggtgggctcccatggccgtgacacccgtggcatcttccgagtccatcagtttgagaagattgaacagtttgtgtactcatcaccccatgacaacaagtcatgggagatgtttgaagagatgattaccaccgcagaggagttctaccagtccctggggattccttaccacattgtgaatattgtctcaggttctttgaatcatgctgccagtaagaagcttgacctggaggcctggtttccgggctcaggagccttccgtgagttggtctcctgttctaattgcacggattaccaggctcgccggcttcgaatccgatatgggcaaaccaagaagatgatggacaaggtggagtttgtccatatgctcaatgctaccatgtgcgccactacccgtaccatctgcgccatcctggagaactaccagacagagaagggcatcactgtgcctgagaaattgaaggagttcatgccgccaggactgcaagaactgatcccctttgtgaagcctgcgcccattgagcaggagccatcaaagaagcagaagaagcaacatgagggcagcaaaaagaaagcagcagcaagagacgtcaccctagaaaacaggctgcagaacatggaggtcaccgatgcttgaacattcctgcctccctatttgccaggctttcatttctgtctgctgagatctcagagcctgcccaacagcagggaagccaagcacccattcatccccctgcccccatctgactgcgtagctgagaggggaacagtgccatgtaccacacagatgttcctgtctcctcgcatgggcatagggacccatcattgatgactgatgaaaccatgtaataaagcatctctggggagggcttaggactcttcctcagtcttcttccccgggcttgaaccccgcctctgaggttctccctgatat

SEQ ID NO: 433693 - DNA, 1858 bp, Homo sapiens
tggcgaattcggcacgagggagagaagcgcttcaaggacccgggactagtggaccagctggtgaaggcagacagcgagtggcgacgatgtagatttcgggcagacaacttgaacaagctgaagaacctatgcagcaagacaatcggagagaaaatgaagaaaaaagagccagtgggagatgatgagtctgtcccagagaatgtgctgagtttcgatgaccttactgcagacgcttcatcaatgaggagtcggacttttttgattgtgctgcggcgcgatccttgcttccctgagcgttggcccgggaggaaagaagatggtgctggatctggatttgtttcgggtggataaaggaggggacccagccctcatccgagagacgcaggagaagcgcttcaaggacccgggactagtggaccagctggtgaaggcagacagcgagtggcgacgatgtagatttcgggcagacaacttgaacaagctgaagaacctatgcagcaagacaatcggagagaaaatgaagaaaaaagagccagtgggagatgatgagtctgtcccagagaatgtgctgagtttcgatgaccttactgcagacgctttagctaacctgaaagtctcacaaatcaaaaaagtccgactcctcattgatgaagccatcctgaagtgtgacgcggagcggataaagttggaagcagagcggtttgagaacctccgagagattgggaaccttctgcacccttctgtacccatcagtaacgatgaggtgattggcaaaggcagtgaaaagtctgatgacaactcctatgatgagaagtacctgattgccacctcagagcagcccattgctgccctgcaccgggatgagtggctccggccggaggacctgcccatcaagtatgctggcctgtctacctgcttccgtcaggaggtgggctcccatggccgtgacacccgtggcatcttccgagtccatcagtttgagaagattgaacagtttgtgtactcatcaccccatgacaacaagtcatgggagatgtttgaagagatgattaccaccgcagaggagttctaccagtccctggggattccttaccacattgtgaatattgtctcaggttctttgaatcatgctgccagtaagaagcttgacctggaggcctggtttccgggctcaggagccttccgtgagttggtctcctgttctaattgcacggattaccaggctcgccggcttcgaatccgatatgggcaaaccaagaagatgatggacaaggtggagtttgtccatatgctcaatgctaccatgtgcgccactacccgtaccatctgcgccatcctggagaactaccagacagagaagggcatcactgtgcctgagaaattgaaggagttcatgccgccaggactgcaagaactgatcccctttgtgaagcctgcgcccattgagcaggagccatcaaagaagcagaagaagcaacatgagggcagcaaaaagaaagcagcagcaagagacgtcaccctagaaaacaggctgcagaacatggaggtcaccgatgcttgaacattcctgcctccctatttgccaggctttcatttctgtctgctgagatctcagagcctgcccaacagcagggaagccaagcacccattcatccccctgcccccatctgactgcgtagctgagaggggaacagtgccatgtaccacacagatgttcctgtctcctcgcatgggcatagggacccatcattgatgactgatgaaaccatgtaataaagcatctctggggagggcttaggactcttcctcagtcttcttccccgggcttgaaccccgcctctgaggttctccctgatat

SEQ ID NO: 433694 - DNA, 1131 bp, Homo sapiens
tggcgaattcggcacgagggagagaagcgcttcaaggacccgggactagtggaccagctggtgaaggcagacagcgagtggcgacgatgtagatttcgggcagacaacttgaacaagctgaagaacctatgcagcaagacaatcggagagaaaatgaagaaaaaagagccagtgggagatgatgagtctgtcccagagaatgtgctgagtttcgatgaccttactgcagacgcttcatcaatgaggagtcggacttttttgattgtgctgcggcgcgatccttgcttccctgagcgttggcccgggaggaaagaagatggtgctggatctggatttgtttcgggtggataaaggaggggacccagccctcatccgagagacgcaggagaagcgcttcaaggacccgggactagtggaccagctggtgaaggcagacagcgagtggcgacgatgtagatttcgggcagacaacttgaacaagctgaagaacctatgcagcaagacaatcggagagaaaatgaagaaaaaagagccagtgggagatgatgagtctgtcccagagaatgtgctgagtttcgatgaccttactgcagacgctttagctaacctgaaagtctcacaaatcaaaaaagtccgactcctcattgatgaagccatcctgaagtgtgacgcggagcggataaagttggaagcagagcggtttgagaacctccgagagattgggaaccttctgcacccttctgtacccatcagtaacgatgaggatgtggacaacaaagtagagaggatttggggtgattgtacagtcaggaagaagtactctcatgtggacctggtggtgatggtagatggctttgaaggcgaaaagggggccgtgggtgcgcttgccgccgtccggacggcgtcctctcttgcacagggcggtcctggctgttcctggaccaggctctgcatgcccagtactgccccctttccgccagccctctgcggcacacggtccgggggctaccattccccatgcttataccccccctatctctccattggacgcggccacgggacggggtcccctcgcccagcgcccgccggtggcgccctccggccttcaggcccctcgatgccgaccttcat

SEQ ID NO: 433695 - DNA, 1243 bp, Homo sapiens
tggcgaattcggcacgagggagagaagcgcttcaaggacccgggactagtggaccagctggtgaaggcagacagcgagtggcgacgatgtagatttcgggcagacaacttgaacaagctgaagaacctatgcagcaagacaatcggagagaaaatgaagaaaaaagagccagtgggagatgatgagtctgtcccagagaatgtgctgagtttcgatgaccttactgcagacgcttcatcaatgaggagtcggacttttttgattgtgctgcggcgcgatccttgcttccctgagcgttggcccgggaggaaagaagatggtgctggatctggatttgtttcgggtggataaaggaggggacccagccctcatccgagagacgcaggagaagcgcttcaaggacccgggactagtggaccagctggtgaaggcagacagcgagtggcgacgatgtagatttcgggcagacaacttgaacaagctgaagaacctatgcagcaagacaatcggagagaaaatgaagaaaaaagagccagtgggagatgatgagtctgtcccagagaatgtgctgagtttcgatgaccttactgcagacgctttagctaacctgaaagtctcacaaatcaaaaaagtccgactcctcattgatgaagccatcctgaagtgtgacgcggagcggataaagttggaagcagagcggtttgagaacctccgagagattgggaaccttctgcacccttctgtacccatcagtaacgatgagaaattgaaggagttcatgccgccaggactgcaagaactgatcccctttgtgaagcctgcgcccattgagcaggagccatcaaagaagcagaagaagcaacatgagggcagcaaaaagaaagcagcagcaagagacgtcaccctagaaaacaggctgcagaacatggaggtcaccgatgcttgaacattcctgcctccctatttgccaggctttcatttctgtctgctgagatctcagagcctgcccaacagcagggaagccaagcacccattcatccccctgcccccatctgactgcgtagctgagaggggaacagtgccatgtaccacacagatgttcctgtctcctcgcatgggcatagggacccatcattgatgactgatgaaaccatgtaataaagcatctctggggagggcttaggactcttcctcagtcttcttccccgggcttgaaccccgcctctgaggttctccctgatat

SEQ ID NO: 433696 - DNA, 1155 bp, Homo sapiens
tggcgaattcggcacgagggagagaagcgcttcaaggacccgggactagtggaccagctggtgaaggcagacagcgagtggcgacgatgtagatttcgggcagacaacttgaacaagctgaagaacctatgcagcaagacaatcggagagaaaatgaagaaaaaagagccagtgggagatgatgagtctgtcccagagaatgtgctgagtttcgatgaccttactgcagacgcttcatcaatgaggagtcggacttttttgattgtgctgcggcgcgatccttgcttccctgagcgttggcccgggaggaaagaagatggtgctggatctggatttgtttcgggtggataaaggaggggacccagccctcatccgagagacgcaggagaagcgcttcaaggacccgggactagtggaccagctggtgaaggcagacagcgagtggcgacgatgtagatttcgggcagacaacttgaacaagctgaagaacctatgcagcaagacaatcggagagaaaatgaaggtaagagaactgaataacaaacagccatgagaacttgagcggagatatttgatcttgctcttagctaatgttcacagaagttctaactcagtgtttaagtctacaagatgttcaatttcttaccaaaggggaaaatattattttaaaaagatagggaggcagggaacttggaggcattttcatatactttaccacaagtccatcttctgtgttcaggtaagattctttgttgtctagctgtttgttgtctattctgttcttatattagaaatataaattccaccagtcatcttttttatggcagatttcagatttgtcgtctcagcgtagttatgctccataatgaaaactacagattcagagttcaaatcttgctacgttatgtgtcttttaggcaagttaatgcctcagcctcagttttctcatttataaaatgacaatactaacactcacctacagaatggaattgttagaacttttttttttttaatttaaacgccaagcaatggttatggatagaactaaatttcttttaaatgtagaaaatttggcacagtgtctagaacatgtagttgttcagcaattgtgagttataatgaatggcaagtaatgttactggccttcatccaaaa

SEQ ID NO: 433697 - DNA, 1063 bp, Homo sapiens
cctaaagtcagtctaactaaagggtggaacgaggtgggacaaggtccggaattgctgctcagtgatgtgtgtgtgcctgccgctggtggagctgagactgctcatctcagaaggatggggatgcttgatttcctggccaggttgtcccagcacagtggggattggccctgttgtatgacgaagacagcacatggtggcagagatagatactaacccatggactttccaagggagggaataggtctttggagggtatgcaagacaaaggtagacactggataaagaacccggtagtgcccaggtattaccccatctgggccattactcccacactcaggaaccagacgttgtgggtgaggacatgctgtccctcctgccaagtaataacttccttcccagccaggatcctgccccaagtaggaatatagctctgcatttacagcagctcctgctcagaccttgtcaaaaccaccctgcagcttaggattaaggagcatggtcacaggaaggtggggtttcagggcatcccctcaggaactgcccatctccccagaattccaaaatgaaggtccatatgcttgtaggtgtgctggtcatggtgggcttcacagtaggaaagggtaagtggggcccaggggcagggagggaggaaggggtaactgagtccaggaagggggtggagcgtggccatggataatcgggcttcctactggcccagggtatttgagagtgacccagtgcctccatccctccttctgcctccccagttcctgttcccgacatccggacgtgccacttctgcctcgtagaagacccttctgtaggatgcatttcaggctcagagaagtgtaccatcagcagctcatccctgtgcatggtgatcaccatctattatgatgtcaaggttcgcttcatcgttcgaggctgtggacagtacatttcctaccgctgccaagaaaaacgcaacacctactttgcagagtactggtatcaggcccagtgctgtcagtacgagttgttcaacgtcatggacaccccgtgtcgggagtcgtatgagtaccat

SEQ ID NO: 433698 - DNA, 277 bp, Homo sapiens
tggtctcgaactcctgacctcgtaatctgccctcctcgacctcccaaagtgccgggattacaggtgtgagccactgtgcctggctgagctctggtgctgttcttccccctagaaaagaatctctagtgtggattctgcccagacaggctgacctgagaaaggcacagtggttcctccattccttccccatcatctgagtgttccagtatcccccatctatcgcaataccatatttaaacgttctggggtttcctacagagaccagtatgaccatgac

SEQ ID NO: 433699 - DNA, 1828 bp, Homo sapiens
cctaaagtcagtctaactaaagggtggaacgaggtgggacaaggtccggaattgctgctcagtgatgtgtgtgtgcctgccgctggtggagctgagactgctcatctcagaaggatggggatgcttgatttcctggccaggttgtcccagcacagtggggattggccctgttgtatgacgaagacagcacatggtggcagagatagatactaacccatggactttccaagggagggaataggtctttggagggtatgcaagacaaaggtagacactggataaagaacccggtagtgcccaggtattaccccatctgggccattactcccacactcaggaaccagacgttgtgggtgaggacatgctgtccctcctgccaagtaataacttccttcccagccaggatcctgccccaagtaggaatatagctctgcatttacagcagctcctgctcagaccttgtcaaaaccaccctgcagcttaggattaaggagcatggtcacaggaaggtggggtttcagggcatcccctcaggaactgcccatctccccagaattccaaaatgaaggtccatatgcttgtaggtgtgctggtcatggtgggcttcacagtaggaaagggtaagtggggcccaggggcagggagggaggaaggggtaactgagtccaggaagggggtggagcgtggccatggataatcgggcttcctactggcccagggtatttgagagtgacccagtgcctccatccctccttctgcctccccagttcctgttcccgacatccggacgtgccacttctgcctcgtagaagacccttctgtaggatgcatttcaggctcagagaagtgtaccatcagcagctcatccctgtgcatggtgatcaccatctattatgatgtcaaggttcgcttcatcgttcgaggctgtggacagtacatttcctaccgctgccaagaaaaacgcaacacctactttgcagagtactggtatcaggcccagtgctgtcagtacgattattgcaactcctggtcaagcccccaactccagagctctctgccggagccccatgacaggcccctggccctgcctctgtctgactcccagattcagtggttctaccaggccctgaacctctccctgcccctccccaatttccatgctgggacggagcctgatggcctggaccccatggtcacactgtccctgaacctgggcttgtcttttgctgagctgcgccgcatgtacttgttcctcaatagttcaggacttttggttcttccccaggctggactcttgacacctcacccttcctgaattccacagtgcaaatatctttctgtaacaccctcagcatcctgcactgccctctctgaaaacacccacattctttggtcactgtgatttcttaggcctccgtctgttgtaccactagcatctatatgacttttgtgtaattttctctcttgaactctggtgctgtttttttgtttgtttgagacaaagtctcgctctgcactccagcctgggtgacacagtgagactccgtctccaaaaaaaaggatgaggaatagaattctgtgcagatgtcctgacttggcaattttgtgtccctgcctcactgtctccaccaacccccgcctgtcctagtgttgttctgcctcctgtcctctcttgctctcttgtcagtctctggcttcctcggccccatttcacttcactgagtcctgacacccatctccctaggggcctgtgagaggagagggaagggtctgttctgctcagctccatgtcccccattttcctccacaataaactgggactgggcta

SEQ ID NO: 433700 - DNA, 1786 bp, Homo sapiens
cctaaagtcagtctaactaaagggtggaacgaggtgggacaaggtccggaattgctgctcagtgatgtgtgtgtgcctgccgctggtggagctgagactgctcatctcagaaggatggggatgcttgatttcctggccaggttgtcccagcacagtggggattggccctgttgtatgacgaagacagcacatggtggcagagatagatactaacccatggactttccaagggagggaataggtctttggagggtatgcaagacaaaggtagacactggataaagaacccggtagtgcccaggtattaccccatctgggccattactcccacactcaggaaccagacgttgtgggtgaggacatgctgtccctcctgccaagtaataacttccttcccagccaggatcctgccccaagtaggaatatagctctgcatttacagcagctcctgctcagaccttgtcaaaaccaccctgcagcttaggattaaggagcatggtcacaggaaggtggggtttcagggcatcccctcaggaactgcccatctccccagaattccaaaatgaaggtccatatgcttgtaggtgtgctggtcatggtgggcttcacagtaggaaagggtaagtggggcccaggggcagggagggaggaaggggtaactgagtccaggaagggggtggagcgtggccatggataatcgggcttcctactggcccagggtatttgagagtgacccagtgcctccatccctccttctgcctccccagttcctgttcccgacatccggacgtgccacttctgcctcgtagaagacccttctgtaggatgcatttcaggctcagagaagtgtaccatcagcagctcatccctgtgcatggtgatcaccatctattatgatgtcaaggttcgcttcatcgttcgaggctgtggacagtacatttcctaccgctgccaagaaaaacgcaacacctactttgcagagtactggtatcaggcccagtgctgtcagtacgattattgcaactcctggtcaagcccccaactccagagctctctgccggagccccatgacaggcccctggccctgcctctgtctgactcccagattcagtggttctaccaggccctgaacctctccctgcccctccccaatttccatgctgggacggagcctgatggcctggaccccatggtcacactgtccctgaacctgggcttgtcttttgctgagctgcgccgcatgtacttgttcctcaatagttcaggacttttggttcttccccaggctggactcttgacacctcacccttcctgaattccacagtgcaaatatctttctgtaacaccctcagcatcctgcactgccctctctgaaaacacccacattctttggtcactgtgatttcttaggcctccgtctgttgtaccactagcatctatatgacttttgtgtaattttctctcttgaactctggtgctgtttttttgtttgtttgagactccgtctccaaaaaaaaggatgaggaatagaattctgtgcagatgtcctgacttggcaattttgtgtccctgcctcactgtctccaccaacccccgcctgtcctagtgttgttctgcctcctgtcctctcttgctctcttgtcagtctctggcttcctcggccccatttcacttcactgagtcctgacacccatctccctaggggcctgtgagaggagagggaagggtctgttctgctcagctccatgtcccccattttcctccacaataaactgggactgggcta

SEQ ID NO: 433701 - DNA, 1677 bp, Homo sapiens
cctaaagtcagtctaactaaagggtggaacgaggtgggacaaggtccggaattgctgctcagtgatgtgtgtgtgcctgccgctggtggagctgagactgctcatctcagaaggatggggatgcttgatttcctggccaggttgtcccagcacagtggggattggccctgttgtatgacgaagacagcacatggtggcagagatagatactaacccatggactttccaagggagggaataggtctttggagggtatgcaagacaaaggtagacactggataaagaacccggtagtgcccaggtattaccccatctgggccattactcccacactcaggaaccagacgttgtgggtgaggacatgctgtccctcctgccaagtaataacttccttcccagccaggatcctgccccaagtaggaatatagctctgcatttacagcagctcctgctcagaccttgtcaaaaccaccctgcagcttaggattaaggagcatggtcacaggaaggtggggtttcagggcatcccctcaggaactgcccatctccccagaattccaaaatgaaggtccatatgcttgtaggtgtgctggtcatggtgggcttcacagtaggaaagggtaagtggggcccaggggcagggagggaggaaggggtaactgagtccaggaagggggtggagcgtggccatggataatcgggcttcctactggcccagggtatttgagagtgacccagtgcctccatccctccttctgcctccccagttcctgttcccgacatccggacgtgccacttctgcctcgtagaagacccttctgtaggatgcatttcaggctcagagaagtgtaccatcagcagctcatccctgtgcatggtgatcaccatctattatgatgtcaaggttcgcttcatcgttcgaggctgtggacagtacatttcctaccgctgccaagaaaaacgcaacacctactttgcagagtactggtatcaggcccagtgctgtcagtacgattattgcaactcctggtcaagcccccaactccagagctctctgccggagccccatgacaggcccctggccctgcctctgtctgactcccagattcagtggttctaccaggccctgaacctctccctgcccctccccaatttccatgctgggacggagcctgatggcctggaccccatggtcacactgtccctgaacctgggcttgtcttttgctgagctgcgccgcatgtacttgttcctcaatagttcaggacttttggttcttccccaggctggactcttgacacctcacccttcctgaattccacagtgcaaatatctttctgtaacaccctcagcatcctgcatgcactccagcctgggtgacacagtgagactccgtctccaaaaaaaaggatgaggaatagaattctgtgcagatgtcctgacttggcaattttgtgtccctgcctcactgtctccaccaacccccgcctgtcctagtgttgttctgcctcctgtcctctcttgctctcttgtcagtctctggcttcctcggccccatttcacttcactgagtcctgacacccatctccctaggggcctgtgagaggagagggaagggtctgttctgctcagctccatgtcccccattttcctccacaataaactgggactgggcta

SEQ ID NO: 433702 - DNA, 885 bp, Homo sapiens
tggtctcgaactcctgacctcgtaatctgccctcctcgacctcccaaagtgccgggattacaggtgtgagccactgtgcctggctgagctctggtgctgttcttccccctagaaaagaatctctagtgtggattctgcccagacaggctgacctgagaaaggcacagtggttcctccattccttccccatcatctgagtgttccagtatcccccatccctctcaatccagtcacctgcctattgacatctagctctgtttcccctgtcttgtccatgtctctaagacccagtaccagactgaactagcagcaagaaggacgaggaggccgggcatggtggctcacgccggtaatcccagcactttgggaggccgaggtgggcggatcacttgagattgggagtttgagaccagcctggccaacatggtaaaacccgctctctattaaaaatagaaaaatcagctgggtgtggtggcacacctctgtaatcccagctactcaggaggctgagacaggagaatcacttgaacccgggaggcagaggttgcagtgagccgagatcgcgccactgcactccagcctgggtgacacagtgagactccgtctccaaaaaaaaggatgaggaatagaattctgtgcagatgtcctgacttggcaattttgtgtccctgcctcactgtctccaccaacccccgcctgtcctagtgttgttctgcctcctgtcctctcttgctctcttgtcagtctctggcttcctcggccccatttcacttcactgagtcctgacacccatctccctaggggcctgtgagaggagagggaagggtctgttctgctcagctccatgtcccccattttcctccacaataaactgggactgggcta

SEQ ID NO: 433703 - DNA, 780 bp, Homo sapiens
  misc_feature (5)..(5): n is a, c, g, or t
  misc_feature (29)..(29): n is a, c, g, or t
  misc_feature (37)..(37): n is a, c, g, or t
  misc_feature (46)..(46): n is a, c, g, or t
aggcnggggttggtggagacagtgaggcngggacacnaaattgccnagtcaggacatctgcacagaattctattcctcatcctttttttttggagagggagtctcactgtgtcaagagtccagcctgatggcctggaccccatggtcacactgtccctgaacctgggcttgtcttttgctgagctgcgccgcatgtacttgttcctcaatagttcaggacttttggttcttccccaggctggactcttgacacctcacccttcctgaattccacagtgcaaatatctttctgtaacaccctcagcatcctgcactgccctctctgaaaacacccacattctttggtcactgtgatttcttaggcctccgtctgttgtaccactagcatctatatgacttttgtgtaattttctctcttgaactctggtgctgtttttttgtttgtttgagacaaagtctcgctctgcactccagcctgggtgacacagtgagactccgtctccaaaaaaaaggatgaggaatagaattctgtgcagatgtcctgacttggcaattttgtgtccctgcctcactgtctccaccaacccccgcctgtcctagtgttgttctgcctcctgtcctctcttgctctcttgtcagtctctggcttcctcggccccatttcacttcactgagtcctgacacccatctccctaggggcctgtgagaggagagggaagggtctgttctgctcagctccatgtcccccattttcctccacaataaactgggactgggcta

SEQ ID NO: 433704 - DNA, 319 bp, Homo sapiens
gcgtgagccaccgcgcccggccttgacttcttaactagctacttacattgtccagtaactatatgaagttattaattcaaaaatttattttgcctgcatgatttctgttaactgtttcaagcaggctgcctaagggtctttaccttgctttgcggtttttgccgatgtgggtgtttcctctgggttctttcctgtttgtatgtctttccttttcggttaattcacattttgggtgggggtgggtagatgggaagaggactagttgactgtttcgcaagttgaatagaatactgaaaaacgcaagcatcagagaatattt

SEQ ID NO: 433705 - DNA, 682 bp, Homo sapiens
ggctgccagggcagcgtgggacgctacggcggatatggctgcagagcggccggctgggatcttagataggaggggtggatttgcaaggcctagaatagctggggagtggtttccccgcggaatcggcctccctgccgctcctgctttgtactgtgacgctcagcctgtgatgactggtgtggaatccgctgagccaccttggcctaaggagactttaccactctgagattgtaaatctgtaaaatagagatgtaggattagcccatacggtagttgtggtaaatactgtgagacaataaggggcctgggacacagcattcaaatgggaataatgaaggtcaagactgtgattcctgtatctttgacgctctcggtataagcaccgtcgtgggcacagggcagtggcctttatgcaggagtttaagagggaatgaaggaatgaatgggcaaactctggagttcccaagtattctctccaggagctgtttccattcttttcgtttccagcagggggaagccaacaccatgtatgaagtttaaccaccctgagatggccacgtcctgaagaagcccagtctagccatgcggagagactacatgcataagaggtaccccactaagcctctagatgctccaaccatcccagccgaggtaccagacaaatgaatgaagaaatcttcag

SEQ ID NO: 433706 - DNA, 1991 bp, Homo sapiens
ggctgccagggcagcgtgggacgctacggcggatatggctgcagagcggccggctgggatcttagataggaggggtggatttgcaaggcctagaatagctggggagtggtttccccgcggaatcggcctccctgccgctcctgctttgtactgtgacgctcagcctgtgatgactggtgtggaatccgctgagccaccttggcctaaggagactttaccactctgagattgtaaatctgtaaaatagagatgtaggattagcccatacggtagttgtggtaaatactgtgagacaataaggggcctgggacacagcattcaaatgggaataatgaaggtcaagactgtgattcctgtatctttgacgctctcggtataagcaccgtcgtgggcacagggcagtggcctttatgcaggagtttaagagggaatgaaggaatgaatgggcaaactctggagttcccaagtattctctccaggagctgtttccattcttttcgtttccagcaggttggtaaattcattaatttattcattgatctaattaaaatatactaagtgcccctcacctgtgctaggccaatgtgatacaatgagcagaacagtcatgggccctccctgggaagccctcactagcccaaggactccttgtagacatttaagtgtccacaggctctggagttccaaccttgagtgcaatttagcagctgtggaccttgggcaagtcattacatctaagcctgttttctcttctgcaaaatggttaaggattcaataagataaaactgtaggcaatgaaaaccgtacctggtaacagtaggtgctgaagaagtgttagctattaatttttgcttaatttttctctctctgctctatgtgatgaaaagattcaagaggcaattgttggaatgtaaaaagagcacgggacttggagtcaaatacttaagtctaccatcaagtagttgttaagaattaaacaacaatttttgtgtacccagttaaatgtgggctgcttaggaatgatgactgtgtcttaatgatctctgtattcttagtgacatgtagaatcattgtgcctgacacatagtatgtactcaggaaagaaatggaaaatgtggttttagcattgaaggccgggagagagggtctaacagactacaagccctgccaggagcagagtaagggaaacagaggagaaaagtgtttttagtctgtgcctgaatgtatttacatctgtttgtagcccaaaagccaaaagcatacatacgcttggcttttctgtagctatgtttatggctttacagcagattttatggagctgcaattactttgatcatgagggactgatgctagtggatttacttcaccgagtagttaagagtgcaggctctgatttagtgatcagagtctgcattgtcaggaatgggacaaagtgaagttatgtggcacttgataggatgccctgagaagattgcaacatcacccctgtgatattcctgctgaagatccataacctggatgtaatcatgaggatatatcagacaaacccacgtaaagagacatgctgtatacaaaactgtaatcttagaaagtgccaaggtcatgaaaatcaaagatagaccctggaactgttccaaactggaggggaccaaagaggcatgacaactaaacacaacacatgattctgaactggatctttttgcttgaaaggaagttacagggacagttggaaaagtttaaatggggcctacaatgccgtggtaatgatgtgtccgtgttaatttcctgattttcatggttgcctgttaagttacatcagaggatgttcttgtttgctggaaagtaaatcaatgtatttggcaggggataaggcatcaaatggtcaccttaatttcaaattattacagggaaaatgtttctctctgtacttaataacttttttgcaatttcttaaaatgaaagctctggagtaaaaacttcaaggatccaaa

SEQ ID NO: 433707 - DNA, 1614 bp, Homo sapiens
ggctgccagggcagcgtgggacgctacggcggatatggctgcagagcggccggctgggatcttagataggaggggtggatttgcaaggcctagaatagctggggagtggtttccccgcggaatcggcctccctgccgctcctgctttgtactgtgacgctcagcctgtgatgactggtgtggaatccgctgagccaccttggcctaaggagactttaccactctgagattgtaaatctgtaaaatagagatgtaggattagcccatacggtagttgtggtaaatactgtgagacaataaggggcctgggacacagcattcaaatgggaataatgaaggtcaagactgtgattcctgtatctttgacgctctcggtataagcaccgtcgtgggcacagggcagtggcctttatgcaggagtttaagagggaatgaaggaatgaatgggcaaactctggagttcccaagtattctctccaggagctgtttccattcttttcgtttccagcagattcaagaggcaattgttggaatgtaaaaagagcacgggacttggagtcaaatacttaagtctaccatcaagtagttgttaagaattaaacaacaatttttgtgtacccagttaaatgtgggctgcttaggaatgatgactgtgtcttaatgatctctgtattcttagtgacatgtagaatcattgtgcctgacacatagtatgtactcaggaaagaaatggaaaatgtggttttagcattgaaggccgggagagagggtctaacagactacaagccctgccaggagcagagtaagggaaacagaggagaaaagtgtttttagtctgtgcctgaatgtatttacatctgtttgtagcccaaaagccaaaagcatacatacgcttggcttttctgtagctatgtttatggctttacagcagattttatggagctgcaattactttgatcatgagggactgatgctagtggatttacttcaccgagtagttaagagtgcaggctctgatttagtgatcagagtctgcattgtcaggaatgggacaaagtgaagttatgtggcacttgataggatgccctgagaagattgcaacatcacccctgtgatattcctgctgaagatccataacctggatgtaatcatgaggatatatcagacaaacccacgtaaagagacatgctgtatacaaaactgtaatcttagaaagtgccaaggtcatgaaaatcaaagatagaccctggaactgttccaaactggaggggaccaaagaggcatgacaactaaacacaacacatgattctgaactggatctttttgcttgaaaggaagttacagggacagttggaaaagtttaaatggggcctacaatgccgtggtaatgatgtgtccgtgttaatttcctgattttcatggttgcctgttaagttacatcagaggatgttcttgtttgctggaaagtaaatcaatgtatttggcaggggataaggcatcaaatggtcaccttaatttcaaattattacagggaaaatgtttctctctgtacttaataacttttttgcaatttcttaaaatgaaagctctggagtaaaaacttcaaggatccaaa

SEQ ID NO: 433708 - DNA, 167 bp, Homo sapiens
aatggaactcactttgtggcttctgaagaagggacctttgtggactgtcatggagtagttaagagtgcaggctctgatttagtgatcagagtctgcattgtcaggaatgggacaaagtgaagttatgtggcacttgataggatgccctgagaagattgcaacatcac

SEQ ID NO: 433709 - DNA, 2681 bp, Homo sapiens
tgtttaggggaggtgctgggatgctccacatggctggagagacgaagtagttaaaaattattactagggagggggccggaacctcgggacgtgggtatataagacggtgcctgagcgcagagcggctgctgctgctgtgatccaggaccaggcgcaccggctcagcctctcacttgtcagaggccggggaagagaagcaaagcgcaacggtgtggtccaagccggggcttctgcttcgcctctaggacatacacgggaccccctaacttcagtcccccaaacgcgcaccctcgaagtcttgaactccagccccgcacatccacgcgcggcacaggcgcggcaggcggcaggtcccggccgaaggcgatgcgcgcagggggtcgggcagctgggctcgggcggcgggagtagggcccggcagggaggcagggaggctgcagagtcagagtcgcgggctgcgccctgggcagaggccgccctcgctccacgcaacacctgctgctgccaccgcgccgcgatgagccgcgtggtctcgctgctgctgggcgccgcgctgctctgcggccacggagccttctgccgccgcgtggtcagcggccaaaaggtgtgttttgctgacttcaagcatccctgctacaaaatggcctacttccatgaactgtccagccgagtgagctttcaggaggcacgcctggcttgtgagagtgagggaggagtcctcctcagccttgagaatgaagcagaacagaagttaatagagagcatgttgcaaaacctgacaaaacccgggacagggatttctgatggtgatttctggatagggctttggaggaatggagatgggcaaacatctggtgcctgcccagatctctaccagtggtctgatggaagcaattcccagtaccgaaactggtacacagatgaaccttcctgcggaagtgaaaagtgtgttgtgatgtatcaccaaccaactgccaatcctggccttgggggtccctacctttaccagtggaatgatgacaggtgtaacatgaagcacaattatatttgcaagtatgaaccagagattaatccaacagcccctgtagaaaagccttatcttacaaatcaaccaggagacacccatcagaatgtggttgttactgaagcaggtataattcccaatctaatttatgttgttataccaacaatacccctgctcttactgatactggttgcttttggaacctgttgtttccagatgctgcataaaagtaaaggaagaacaaaaactagtccaaaccagtctacactgtggatttcaaagagtaccagaaaagaaagtggcatggaagtataataactcattgacttggttccagaattttgtaattctggatctgtataaggaatggcatcagaacaatagcttggaatggcttgaaatcacaaaggatctgcaagatgaactgtaagctcccccttgaggcaaatattaaagtaatttttatatgtctattatttcatttaaagaatatgctgtgctaataatggagtgagacatgcttattttgctaaaggatgcacccaaacttcaaacttcaagcaaatgaaatggacaatgcagataaagttgttatcaacacgtcgggagtatgtgtgttagaagcaattccttttatttctttcacctttcataagttgttatctagtcaatgtaatgtatattgtattgaaatttacagtgtgcaaaagtattttacctttgcataagtgtttgataaaaatgaactgttctaatatttatttttatggcatctcatttttcaatacatgctcttttgattaaagaaacttattactgttgtcaactgaattcacacacacacaaatatagtaccatagaaaaagtttgttttctcgaaataattcatctttcagcttctctgcttttggtcaatgtctaggaaatctcttcagaaataagaagctatttcattaagtgtgatataaacctcctcaaacattttacttagaggcaaggattgtctaatttcaattgtgcaagacatgtgccttataattatttttagcttaaaattaaacagattttgtaataatgtaactttgttaataggtgcataaacactaatgcagtcaatttgaacaaaagaagtgacatacacaatataaatcatatgtcttcacacgttgcctatataatgagaagcagctctctgagggttctgaaatcaatgtggtccctctcttgcccactaaacaaagatggttgttcggggtttgggattgacactggaggcagatagttgcaaagttagtctaaggtttccctagctgtatttagcctctgactatattagtatacaaagaggtcatgtggttgagaccaggtgaatagtcactatcagtgtggagacaagcacagcacacagacattttaggaaggaaaggaactacgaaatcgtgtgaaaatgggttggaacccatcagtgatcgcatattcattgatgagggtttgcttgagatagaaaatggtggctcctttctgtcttatctcctagtttcttcaatgcttacgccttgttcttctcaagagaaagttgtaactctctggtcttcatatgtccctgtgctccttttaaccaaataaagagttcttgtttctgaagaatgaaaaaaaa

SEQ ID NO: 433710 - DNA, 1780 bp, Homo sapiens
tgtttaggggaggtgctgggatgctccacatggctggagagacgaagtagttaaaaattattactagggagggggccggaacctcgggacgtgggtatataagacggtgcctgagcgcagagcggctgctgctgctgtgatccaggaccaggcgcaccggctcagcctctcacttgtcagaggccggggaagagaagcaaagcgcaacggtgtggtccaagccggggcttctgcttcgcctctaggacatacacgggaccccctaacttcagtcccccaaacgcgcaccctcgaagtcttgaactccagccccgcacatccacgcgcggcacaggcgcggcaggcggcaggtcccggccgaaggcgatgcgcgcagggggtcgggcagctgggctcgggcggcgggagtagggcccggcagggaggcagggaggctgcagagtcagagtcgcgggctgcgccctgggcagaggccgccctcgctccacgcaacacctgctgctgccaccgcgccgcgatgagccgcgtggtctcgctgctgctgggcgccgcgctgctctgcggccacggagccttctgccgccgcgtggtcagcggccaaaaggtgtgttttgctgacttcaagcatccctgctacaaaatggcctacttccatgaactgtccagccgagtgagctttcaggaggcacgcctggcttgtgagagtgagggaggagtcctcctcagccttgagaatgaagcagaacagaagttaatagagagcatgttgcaaaacctgacaaaacccgggacagggatttctgatggtgatttctggatagggctttggaggaatggagatgggcaaacatctggtgcctgcccagatctctaccagtggtctgatggaagcaattcccagtaccgaaactggtacacagatgaaccttcctgcggaagtgaaaagtgtgttgtgatgtatcaccaaccaactgccaatcctggccttgggggtccctacctttaccagtggaatgatgacaggtgtaacatgaagcacaattatatttgcaagtatgaaccagagattaatccaacagcccctgtagaaaagccttatcttacaaatcaaccaggagacacccatcagaatgtggttgttactgaagcaggtataattcccaatctaatttatgttgttataccaacaatacccctgctcttactgatactggttgcttttggaacctgttgtttccagatgctgcataaaagtaaaggaagaacaaaaactagtccaaaccagtctacactgtggatttcaaagagtaccagaaaagaaagtggcatggaagtataataactcattgacttggttccagaattttgtaattctggatctgtataaggaatggcatcagaacaatagcttggaatggcttgaaatcacaaaggatctgcaagatgaactgtaagctcccccttgaggcaaatattaaagtaatttttatatgtctattatttcatttaaagaatatgctgtgctaataatggagtgagacatgcttattttgctaaaggatgcacccaaacttcaaacttcaagcaaatgaaatggacaatgcagataaagttgttatcaacacgtcgggagtatgtgtgttagaagcaattccttttatttctttcacctttcataagttgttatctagtcaatgtaatgtatattgtattgaaatttacagtgtgcaaaagtattttacctttgcataagtgtttgataaaaatgaactgttctaat

SEQ ID NO: 433711 - DNA, 2428 bp, Homo sapiens
ctgtggtgtttttcccccgctcctctggctgccttcctgatggatctctgtggtcccaggcaggaatggcctgcttggggacccagcgagctcccaaggcctttcctgctgcttcctctatccctgtgttttgcttggctctctaaattgactcagctccaggacatcaggaccccaggttctctggtcttgggactctgagacttgcaccaggaatcctgcccaggctctcaggcctttggactcagactgagctacttcactggctttcctggttctccagcttgaagatggcagatcgtgggacttctcagcctccataattgagtgagccaattccctggccaaaaggtgtgttttgctgacttcaagcatccctgctacaaaatggcctacttccatgaactgtccagccgagtgagctttcaggaggcacgcctggcttgtgagagtgagggaggagtcctcctcagccttgagaatgaagcagaacagaagttaatagagagcatgttgcaaaacctgacaaaacccgggacagggatttctgatggtgatttctggatagggctttggaggaatggagatgggcaaacatctggtgcctgcccagatctctaccagtggtctgatggaagcaattcccagtaccgaaactggtacacagatgaaccttcctgcggaagtgaaaagtgtgttgtgatgtatcaccaaccaactgccaatcctggccttgggggtccctacctttaccagtggaatgatgacaggtgtaacatgaagcacaattatatttgcaagtatgaaccagagattaatccaacagcccctgtagaaaagccttatcttacaaatcaaccaggagacacccatcagaatgtggttgttactgaagcaggtataattcccaatctaatttatgttgttataccaacaatacccctgctcttactgatactggttgcttttggaacctgttgtttccagatgctgcataaaagtaaaggaagaacaaaaactagtccaaaccagtctacactgtggatttcaaagagtaccagaaaagaaagtggcatggaagtataataactcattgacttggttccagaattttgtaattctggatctgtataaggaatggcatcagaacaatagcttggaatggcttgaaatcacaaaggatctgcaagatgaactgtaagctcccccttgaggcaaatattaaagtaatttttatatgtctattatttcatttaaagaatatgctgtgctaataatggagtgagacatgcttattttgctaaaggatgcacccaaacttcaaacttcaagcaaatgaaatggacaatgcagataaagttgttatcaacacgtcgggagtatgtgtgttagaagcaattccttttatttctttcacctttcataagttgttatctagtcaatgtaatgtatattgtattgaaatttacagtgtgcaaaagtattttacctttgcataagtgtttgataaaaatgaactgttctaatatttatttttatggcatctcatttttcaatacatgctcttttgattaaagaaacttattactgttgtcaactgaattcacacacacacaaatatagtaccatagaaaaagtttgttttctcgaaataattcatctttcagcttctctgcttttggtcaatgtctaggaaatctcttcagaaataagaagctatttcattaagtgtgatataaacctcctcaaacattttacttagaggcaaggattgtctaatttcaattgtgcaagacatgtgccttataattatttttagcttaaaattaaacagattttgtaataatgtaactttgttaataggtgcataaacactaatgcagtcaatttgaacaaaagaagtgacatacacaatataaatcatatgtcttcacacgttgcctatataatgagaagcagctctctgagggttctgaaatcaatgtggtccctctcttgcccactaaacaaagatggttgttcggggtttgggattgacactggaggcagatagttgcaaagttagtctaaggtttccctagctgtatttagcctctgactatattagtatacaaagaggtcatgtggttgagaccaggtgaatagtcactatcagtgtggagacaagcacagcacacagacattttaggaaggaaaggaactacgaaatcgtgtgaaaatgggttggaacccatcagtgatcgcatattcattgatgagggtttgcttgagatagaaaatggtggctcctttctgtcttatctcctagtttcttcaatgcttacgccttgttcttctcaagagaaagttgtaactctctggtcttcatatgtccctgtgctccttttaaccaaataaagagttcttgtttctgaagaatgaaaaaaaa

SEQ ID NO: 433712 - DNA, 2098 bp, Homo sapiens
ccctgccccgccccgcccccttcttccggaggagctgcggtgggggcgctccaccgggtcctaggaaaggggctctctctggccccgtccccggcggccccgctcccggccccccggcgccgctcagcctcccgcccagcccctccgcgcgtgacctcggccccgcccccgcgagcccctgccccgcccccgctccgggtccctctgtcacttcctgaatcctgcttcctgcttcccagaggccgggatccggagccgcccgaagccggtgccgcagccccctgcgcccccggtgcccccgacatgtccttccgcaaagtggtccggcagagcaaattccggcatgtgttcgggcagccggtcaagaacgaccagtgctatgaggacattcgcgtgtcccgtgttacctgggacagcaccttctgcgccgtcaaccccaagttcctggcggtgattgtggaggccagtggagggggtgcctttctggtgctccccctaagcaagacgggccgcattgacaaggcctacccgacggtgtgtgggcacacgggacctgtcctggacatcgactggtgtcctcacaacgacgaagtcatagccagcggctcggaggactgcacggtcatggtgtggcagatcccagagaacgggctgacctccccgctgacagagccggtggtggtactggaggggcacaccaagcgagtgggcatcatcgcctggcaccccacggcccgaaacgtgctgctcagtgcaggctgcgacaacgtggtactcatctggaatgtgggcacagcggaggagctgtaccgcctggacagcctgcaccctgacctcatctacaatgtcagctggaaccacaatggcagcctgttttgctcagcatgcaaggacaagagcgtgcgcatcatcgacccccgtcggggcaccctggtggcagagcgggagaaggctcatgagggggcccggcccatgcgggccatcttcctggcagatggcaaggtgttcaccacaggcttcagccgaatgagcgagcggcagctggcgctctgggacccagaaaacctcgaggaacccatggccctgcaggaactggactcgagcaacggggccctgctgcccttctacgaccccgacaccagtgtggtctacgtctgcggcaagggtgactccagcatccggtactttgagatcacagaggagcctccctacatccacttcctgaacacgttcaccagcaaggagccgcagcggggtatgggcagcatgcccaagcggggcctggaggtcagcaagtgcgagatcgcccggttctacaaactgcatgagcgcaagtgtgagcccatcgtcatgactgtgccaagaaagtcggacctcttccaggatgatctgtaccccgacacagccgggcccgaggcagccctggaggctgaggagtgggtgagcgggcgggatgccgacccgatcctcatctcactgcgggaggcctacgtgcccagcaagcagcgggacctgaagatcagccggcgcaacgtgttgtctgacagccggcccgccatggccccgggctcctcccacctaggggcccccgcctccaccaccactgctgctgatgccacccccagcggcagcctggccagagccggggaggctgggaagctggaggaggtgatgcaggagctgcgggccctgagggcgctggtcaaggagcagggcgaccgcatctgccgcctggaggagcagctgggccgcatggagaacggggatgcgtagggccacagccacacgccaccttcatctcctccgccgcccccttcccactcagcttctgccagcgggtcgcaccgggctagctggctgcccagagcctctgaggcagcgcaggggtcagttcccacccccacccgtcccaggcccaggccgaagccagcgcccagctttcctcactgttcctgtggaggatgtctacgcccaggcgagctcctcgacctctgagggaccatctccccgaccactgcccagccctctgctccctccccagaggaggcgggagggtgggctctatattttcattccaaataaaattctctttctaaaa

SEQ ID NO: 433713 - DNA, 490 bp, Homo sapiens
  misc_feature (7)..(7): n is a, c, g, or t
aaaaaanccggggaaagtcttgggaaaatttggaaggaaggtttattgaaggaagcttgaggggcccttgagggccattgggttcaaagaaaggtcaaggagcagggcgaccgcatctgccgcctggaggagcagctgggccgcatggagaacggggatgcgtagggccacagccacacgccaccttcatctcctccgccgcccccttcccactcagcttctgccagcgggtcgcaccgggctagctggctgcccagagcctctgaggcagcgcaggggtcagttcccacccccacccgtcccaggcccaggccgaagccagcgcccagctttcctcactgttcctgtggaggatgtctacgcccaggcgagctcctcgacctctgagggaccatctccccgaccactgcccagccctctgctccctccccagaggaggcgggagggtgggctctatattttcattccaaataaaattctctttctaaaa

SEQ ID NO: 433714 - DNA, 282 bp, Homo sapiens
tggcgaccgtcacataggaacagctttatcgcctttataagcgcgatcgctcctggactgttccatagaaaggtgaggccgcccgtccctcggctcacttggccctttctccagcaagcgggccatgcagttgtgaccagggcgaggcctgtgaatggaacatgacctagtatggtttgtgggcagtgagctggacagatgccagcttgcccttgtaccagccagctgttgggctgtgccagtcagggggcaagtggggatgagacagagggtgagcagggg

SEQ ID NO: 433715 - DNA, 2206 bp, Homo sapiens
taagcctgtagtcccagctactggggtgaatttcttgaacctgggagggcggaggttgcagtgggccgagatcgcgccactgcactccagcctgggtgacaaaaactccgtctcaaaaaaaaaaaaaaaaaaaaaaaaagagcattaactttgataacttaaaaagagtcacgtgaacatatccactgtccgtgtagattctacatttatttgttgggggcggtaatggggccccttggaggtgtgcgttccgtcgggggccgggaaggcggggcctcacccaatcctggagactcctgcggatgccattatgaggagcaagaacgcgaaggggcctcgggtccgctaggccgggatccggagccgcccgaagccggtgccgcagccccctgcgcccccggtgcccccgacatgtccttccgcaaagtggtccggcagagcaaattccggcatgtgttcgggcagccggtcaagaacgaccagtgctatgaggacattcgcgtgtcccgtgttacctgggacagcaccttctgcgccgtcaaccccaagttcctggcggtgattgtggaggccagtggagggggtgcctttctggtgctccccctaagcaagacgggccgcattgacaaggcctacccgacggtgtgtgggcacacgggacctgtcctggacatcgactggtgtcctcacaacgacgaagtcatagccagcggctcggaggactgcacggtcatggtgtggcagatcccagagaacgggctgacctccccgctgacagagccggtggtggtactggaggggcacaccaagcgagtgggcatcatcgcctggcaccccacggcccgaaacgtgctgctcagtgcaggctgcgacaacgtggtactcatctggaatgtgggcacagcggaggagctgtaccgcctggacagcctgcaccctgacctcatctacaatgtcagctggaaccacaatggcagcctgttttgctcagcatgcaaggacaagagcgtgcgcatcatcgacccccgtcggggcaccctggtggcagagcgggagaaggctcatgagggggcccggcccatgcgggccatcttcctggcagatggcaaggtgttcaccacaggcttcagccgaatgagcgagcggcagctggcgctctgggacccagaaaacctcgaggaacccatggccctgcaggaactggactcgagcaacggggccctgctgcccttctacgaccccgacaccagtgtggtctacgtctgcggcaagggtgactccagcatccggtactttgagatcacagaggagcctccctacatccacttcctgaacacgttcaccagcaaggagccgcagcggggtatgggcagcatgcccaagcggggcctggaggtcagcaagtgcgagatcgcccggttctacaaactgcatgagcgcaagtgtgagcccatcgtcatgactgtgccaagaaagtcggacctcttccaggatgatctgtaccccgacacagccgggcccgaggcagccctggaggctgaggagtgggtgagcgggcgggatgccgacccgatcctcatctcactgcgggaggcctacgtgcccagcaagcagcgggacctgaagatcagccggcgcaacgtgttgtctgacagccggcccgccatggccccgggctcctcccacctaggggcccccgcctccaccaccactgctgctgatgccacccccagcggcagcctggccagagccggggaggctgggaagctggaggaggtgatgcaggagctgcgggccctgagggcgctggtcaaggagcagggcgaccgcatctgccgcctggaggagcagctgggccgcatggagaacggggatgcgtagggccacagccacacgccaccttcatctcctccgccgcccccttcccactcagcttctgccagcgggtcgcaccgggctagctggctgcccagagcctctgaggcagcgcaggggtcagttcccacccccacccgtcccaggcccaggccgaagccagcgcccagctttcctcactgttcctgtggaggatgtctacgcccaggcgagctcctcgacctctgagggaccatctccccgaccactgcccagccctctgctccctccccagaggaggcgggagggtgggctctatattttcattccaaataaaattctctttctaaaa

SEQ ID NO: 433716 - DNA, 2230 bp, Homo sapiens
ccctgccccgccccgcccccttcttccggaggagctgcggtgggggcgctccaccgggtcctaggaaaggggctctctctggccccgtccccggcggccccgctcccggccccccggcgccgctcagcctcccgcccagcccctccgcgcgtgacctcggccccgcccccgcgagcccctgccccgcccccgctccgggtccctctgtcacttcctgaatcctgcttcctgcttcccagaggccgggatccggagccgcccgaagccggtgccgcagccccctgcgcccccggtgcccccgacatgtccttccgcaaagtggtccggcagagcaaattccggcatgtgttcgggcagccggtcaagaacgaccagtgctatgaggacattcgcgtgtcccgtgttacctgggacagcaccttctgcgccgtcaaccccaagttcctggcggtgattgtggaggccagtggagggggtgcctttctggtgctccccctaagcaagacgggccgcattgacaaggcctacccgacggtgtgtgggcacacgggacctgtcctggacatcgactggtgtcctcacaacgacgaagtcatagccagcggctcggaggactgcacggtcatggtgtggcagatcccagagaacgggctgacctccccgctgacagagccggtggtggtactggaggggcacaccaagcgagtgggcatcatcgcctggcaccccacggcccgaaacgtgctgctcagtgcaggctgcgacaacgtggtactcatctggaatgtgggcacagcggaggagctgtaccgcctggacagcctgcaccctgacctcatctacaatgtcagctggaaccacaatggcagcctgttttgctcagcatgcaaggacaagagcgtgcgcatcatcgacccccgtcggggcaccctggtggcagagcgggagaaggctcatgagggggcccggcccatgcgggccatcttcctggcagatggcaaggtgttcaccacaggcttcagccgaatgagcgagcggcagctggcgctctgggacccagaaaacctcgaggaacccatggccctgcaggaactggactcgagcaacggggccctgctgcccttctacgaccccgacaccagtgtggtctacgtctgcggcaagggtgactccagcatccggtactttgagatcacagaggagcctccctacatccacttcctgaacacgttcaccagcaaggagccgcagcggggtatgggcagcatgcccaagcggggcctggaggtcagcaagtgcgagatcgcccggttctacaaactgcatgagcgcaagtgtgagcccatcgtcatgactgtgccaagaaagtcggacctcttccaggatgatctgtaccccgacacagccgggcccgaggcagccctggaggctgaggagtgggtgagcgggcgggatgccgacccgatcctcatctcactgcgggaggcctacgtgcccagcaagcagcgggacctgaagatcagccggcgcaacgtgttgtctgacagccggcccgccatggccccgggctcctcccacctaggggcccccgcctccaccaccactgctgctgatgccacccccagcggcagcctggccagagccggggaggctgggaagctggaggaggtgatgcaggagctgcgggccctgagggcgctggtcaaggagcagggcgaccgcatctgccgcctggaggagcagctgggccgcatggagaacggggatgcgtagggccacagccacacgccaccttcatctcctccgccgcccccttcccactcagcttctgccagcgggtcgcaccgggctagctggctgcccagagcctctgaggcagcgcaggggtcagttcccacccccacccgtcccaggcccaggccgaagccagcgcccagctttcctcactgttcctgtggaggatgtctacgcccaggcgagctcctcgacctctgagggaccatctccccgaccactgcccagccctctgctccctccccagaggaggcgggagggtgggctctatattttcattccaaataaaattctctttctaaaaaaacagaagacgaagaagaagaccagcagaaacgcgcgacaccgaaggcagcaaccacgcgacgaagaaccgggcgggaggcaggaacgcaccgaagcaacgagaccagagagggaaagagacacgcggggg

SEQ ID NO: 433717 - DNA, 2479 bp, Homo sapiens
ccctgccccgccccgcccccttcttccggaggagctgcggtgggggcgctccaccgggtcctaggaaaggggctctctctggccccgtccccggcggccccgctcccggccccccggcgccgctcagcctcccgcccagcccctccgcgcgtgacctcggccccgcccccgcgagcccctgccccgcccccgctccgggtccctctgtcacttcctgaatcctgcttcctgcttcccagaggccgggatccggagccgcccgaagccggtgccgcagccccctgcgcccccggtgcccccgacatgtccttccgcaaagtggtccggcagagcaaattccggcatgtgttcgggcagccggtcaagaacgaccagtgctatgaggacattcgcgtgtcccgtgttacctgggacagcaccttctgcgccgtcaaccccaagttcctggcggtgattgtggaggccagtggagggggtgcctttctggtgctccccctaagcaagacgggccgcattgacaaggcctacccgacggtgtgtgggcacacgggacctgtcctggacatcgactggtgtcctcacaacgacgaagtcatagccagcggctcggaggactgcacggtcatggtgtggcagatcccagagaacgggctgacctccccgctgacagagccggtggtggtactggaggggcacaccaagcgagtgggcatcatcgcctggcaccccacggcccgaaacgtgctgctcagtgcaggctgcgacaacgtggtactcatctggaatgtgggcacagcggaggagctgtaccgcctggacagcctgcaccctgacctcatctacaatgtcagctggaaccacaatggcagcctgttttgctcagcatgcaaggacaagagcgtgcgcatcatcgacccccgtcggggcaccctggtggcagagcgggagaaggctcatgagggggcccggcccatgcgggccatcttcctggcagatggcaaggtgttcaccacaggcttcagccgaatgagcgagcggcagctggcgctctgggacccagaaaacctcgaggaacccatggccctgcaggaactggactcgagcaacggggccctgctgcccttctacgaccccgacaccagtgtggtctacgtctgcggcaagggtgactccagcatccggtactttgagatcacagaggagcctccctacatccacttcctgaacacgttcaccagcaaggagccgcagcggggtatgggcagcatgcccaagcggggcctggaggtcagcaagtgcgagatcgcccggttctacaaactgcatgagcgcaagtgtgagcccatcgtcatgactgtgccaagaaagtcggacctcttccaggatgatctgtaccccgacacagccgggcccgaggcagccctggaggctgaggagtgggtgagcgggcgggatgccgacccgatcctcatctcactgcgggaggcctacgtgcccagcaagcagcgggacctgaagatcagccggcgcaacgtgttgtctgacagccggcccgccatggccccgggctcctcccacctaggggcccccgcctccaccaccactgctgctgatgccacccccagcggcagcctggccagagccggggaggctgggaagctggaggaggtgatgcaggagctgcgggccctgagggcgctggtcaaggagcagggcgaccgcatctgccgcctggaggagcagctgggccgcatggagaacggggatgcgtagggccacagccacacgccaccttcatctcctccgccgcccccttcccactcagcttctgccagcgggtcgcaccgggctagctggctgcccagagcctctgaggcagcgcaggggtcagttcccacccccacccgtcccaggcccaggccgaagccagcgcccagctttcctcactgttcctgtggaggatgtctacgcccaggcgagctcctcgacctctgagggaccatctccccgaccactgcccagccctctgctccctccccagaggaggcgggagggtgggctctatattttcattccaaataaaattctctttctaaaaaaaaaaaaaaaagaaaaaaaagaaaaaaaaaaaaaaaaaaaaaaaaaaaaaaaaaaaaaaaaaaaaaaaaaaaaaaaaaaaaaaaaaaaaaaaaaaaaaaaaaaaaaaaggggggggtatcaaaataaataaatatcacaagaggaagagagaaaacgaaagaaaaacatgtttaagaaagaaagagagtacataatagcaggagagatataaaaaaaacaggacaggggcgagggagcagatataatcagaacacgacagacgagcaggagaccaaacgcgcaacggatgggcaccacatagtagaagagaaacacatctttggagcaggggcaagataaggaagaaacaatacacaaacagcaacgacagaggacgaca

SEQ ID NO: 433718 - DNA, 1927 bp, Homo sapiens
ccctgccccgccccgcccccttcttccggaggagctgcggtgggggcgctccaccgggtcctaggaaaggggctctctctggccccgtccccggcggccccgctcccggccccccggcgccgctcagcctcccgcccagcccctccgcgcgtgacctcggccccgcccccgcgagcccctgccccgcccccgctccgggtccctctgtcacttcctgaatcctgcttcctgcttcccagaggccgggatccggagccgcccgaagccggtgccgcagccccctgcgcccccggtgcccccgacatgtccttccgcaaagtggtccggcagagcaaattccggcatgtgttcgggcagccggtcaagaacgaccagtgctatgaggacattcgcgtgtcccgtgttacctgggacagcaccttctgcgccgtcaaccccaagttcctggcggtgattgtggaggccagtggagggggtgcctttctggtgctccccctaagcaagacgggccgcattgacaaggcctacccgacggtgtgtgggcacacgggacctgtcctggacatcgactggtgtcctcacaacgacgaagtcatagccagcggctcggaggactgcacggtcatggtgtggcagatcccagagaacgggctgacctccccgctgacagagccggtggtggtactggaggggcacaccaagcgagtgggcatcatcgcctggcaccccacggcccgaaacgtgctgctcagtgcaggctgcgacaacgtggtactcatctggaatgtgggcacagcggaggagctgtaccgcctggacagcctgcaccctgacctcatctacaatgtcagctggaaccacaatggcagcctgttttgctcagcatgcaaggacaagagcgtgcgcatcatcgacccccgtcggggcaccctggtggcagagcgggagaaggctcatgagggggcccggcccatgcgggccatcttcctggcagatggcaaggtgttcaccacaggcttcagccgaatgagcgagcggcagctggcgctctgggacccagaaaacctcgaggaacccatggccctgcaggaactggactcgagcaacggggccctgctgcccttctacgaccccgacaccagtgtggtctacgtctgcggcaagggtgactccagcatccggtactttgagatcacagaggagcctccctacatccacttcctgaacacgttcaccagcaaggagccgcagcggggtatgggcagcatgcccaagcggggcctggaggtcagcaagtgcgagatcgcccggttctacaaactgcatgagcgcaagtgtgagcccatcgtcatgactgtgccaagaaagtcggacctcttccaggatgatctgtaccccgacacagccgggcccgaggcagccctggaggctgaggagtgggtgagcgggcgggatgccgacccgatcctcatctcactgcgggaggcctacgtgcccagcaagcagcgggacctgaagatcagccggcgcaacgtgttgtctgacagccggcccgccatggccccgggctcctcccacctaggggcccccgcctccaccaccactgctgctgatgccacccccagcggcagcctggccagagccggggaggctgggaagctggaggaggtgatgcaggagctgcgggccctgagggcgctggtcaaggagcagggcgaccgcatctgccgcctggagcccaggcccaggccgaagccagcgcccagctttcctcactgttcctgtggaggatgtctacgcccaggcgagctcctcgacctctgagggaccatctccccgaccactgcccagccctctgctccctccccagaggaggcgggagggtgggctctatattttcattccaaataaaattctctttctaaaa

SEQ ID NO: 433719 - DNA, 1803 bp, Homo sapiens
ccctgccccgccccgcccccttcttccggaggagctgcggtgggggcgctccaccgggtcctaggaaaggggctctctctggccccgtccccggcggccccgctcccggccccccggcgccgctcagcctcccgcccagcccctccgcgcgtgacctcggccccgcccccgcgagcccctgccccgcccccgctccgggtccctctgtcacttcctgaatcctgcttcctgcttcccagaggccgggatccggagccgcccgaagccggtgccgcagccccctgcgcccccggtgcccccgacatgtccttccgcaaagtggtccggcagagcaaattccggcatgtgttcgggcagccggtcaagaacgaccagtgctatgaggacattcgcgtgtcccgtgttacctgggacagcaccttctgcgccgtcaaccccaagttcctggcggtgattgtggaggccagtggagggggtgcctttctggtgctccccctaagcaagacgggccgcattgacaaggcctacccgacggtgtgtgggcacacgggacctgtcctggacatcgactggtgtcctcacaacgacgaagtcatagccagcggctcggaggactgcacggtcatggtgtggcagatcccagagaacgggctgacctccccgctgacagagccggtggtggtactggaggggcacaccaagcgagtgggcatcatcgcctggcaccccacggcccgaaacgtgctgctcagtgcaggctgcgacaacgtggtactcatctggaatgtgggcacagcggaggagctgtaccgcctggacagcctgcaccctgacctcatctacaatgtcagctggaaccacaatggcagcctgttttgctcagcatgcaaggacaagagcgtgcgcatcatcgacccccgtcggggcaccctggtggcagagcgggagaaggctcatgagggggcccggcccatgcgggccatcttcctggcagatggcaaggtgttcaccacaggcttcagccgaatgagcgagcggcagctggcgctctgggacccagaaaacctcgaggaacccatggccctgcaggaactggactcgagcaacggggccctgctgcccttctacgaccccgacaccagtgtggtctacgtctgcggcaagggtgactccagcatccggtactttgagatcacagaggagcctccctacatccacttcctgaacacgttcaccagcaaggagccgcagcggggtatgggcagcatgcccaagcggggcctggaggtcagcaagtgcgagatcgcccggttctacaaactgcatgagcgcaagtgtgagcccatcgtcatgactgtgccaagaaagtcggacctcttccaggatgatctgtaccccgacacagccgggcccgaggcagccctggaggctgaggagtgggtgagcgggcgggatgccgacccgatcctcatctcactgcgggaggcctacgtgcccagcaagcagcgggacctgaagatcagccggcgcaacgtgttgtctgacagccggcccgccatggccccgggctcctcccacctaggggcccccgcctccaccaccactgctgctgatgccacccccagcggcagcctggccagagccggggaggctgggaagctggaggaggtgatgcaggagctgcgggccctgagggcgctgggaccatctccccgaccactgcccagccctctgctccctccccagaggaggcgggagggtgggctctatattttcattccaaataaaattctctttctaaaa

SEQ ID NO: 433720 - DNA, 1848 bp, Homo sapiens
ccctgccccgccccgcccccttcttccggaggagctgcggtgggggcgctccaccgggtcctaggaaaggggctctctctggccccgtccccggcggccccgctcccggccccccggcgccgctcagcctcccgcccagcccctccgcgcgtgacctcggccccgcccccgcgagcccctgccccgcccccgctccgggtccctctgtcacttcctgaatcctgcttcctgcttcccagaggccgggatccggagccgcccgaagccggtgccgcagccccctgcgcccccggtgcccccgacatgtccttccgcaaagtggtccggcagagcaaattccggcatgtgttcgggcagccggtcaagaacgaccagtgctatgaggacattcgcgtgtcccgtgttacctgggacagcaccttctgcgccgtcaaccccaagttcctggcggtgattgtggaggccagtggagggggtgcctttctggtgctccccctaagcaagacgggccgcattgacaaggcctacccgacggtgtgtgggcacacgggacctgtcctggacatcgactggtgtcctcacaacgacgaagtcatagccagcggctcggaggactgcacggtcatggtgtggcagatcccagagaacgggctgacctccccgctgacagagccggtggtggtactggaggggcacaccaagcgagtgggcatcatcgcctggcaccccacggcccgaaacgtgctgctcagtgcaggctgcgacaacgtggtactcatctggaatgtgggcacagcggaggagctgtaccgcctggacagcctgcaccctgacctcatctacaatgtcagctggaaccacaatggcagcctgttttgctcagcatgcaaggacaagagcgtgcgcatcatcgacccccgtcggggcaccctggtggcagagcgggagaaggctcatgagggggcccggcccatgcgggccatcttcctggcagatggcaaggtgttcaccacaggcttcagccgaatgagcgagcggcagctggcgctctgggacccagaaaacctcgaggaacccatggccctgcaggaactggactcgagcaacggggccctgctgcccttctacgaccccgacaccagtgtggtctacgtctgcggcaagggtgactccagcatccggtactttgagatcacagaggagcctccctacatccacttcctgaacacgttcaccagcaaggagccgcagcggggtatgggcagcatgcccaagcggggcctggaggtcagcaagtgcgagatcgcccggttctacaaactgcatgagcgcaagtgtgagcccatcgtcatgactgtgccaagaaagtcggacctcttccaggatgatctgtaccccgacacagccgggcccgaggcagccctggaggctgaggagtgggtgagcgggcgggatgccgacccgatcctcatctcactgcgggaggcctacgtgcccagcaagcagcgggacctgaagatcagccggcgcaacgtgttgtctgacagccggcccgccatggccccgggctcctcccacctaggggcccccgcctccaccaccactgctgctgatgccacccccagcggcagcctggccagagccggggaggctgggaagctggaggaggtgatgcaggagctgcgggccctgagggcgctgcctgtggaggatgtctacgcccaggcgagctcctcgacctctgagggaccatctccccgaccactgcccagccctctgctccctccccagaggaggcgggagggtgggctctatattttcattccaaataaaattctctttctaaaa

SEQ ID NO: 433721 - DNA, 1862 bp, Homo sapiens
ccctgccccgccccgcccccttcttccggaggagctgcggtgggggcgctccaccgggtcctaggaaaggggctctctctggccccgtccccggcggccccgctcccggccccccggcgccgctcagcctcccgcccagcccctccgcgcgtgacctcggccccgcccccgcgagcccctgccccgcccccgctccgggtccctctgtcacttcctgaatcctgcttcctgcttcccagaggccgggatccggagccgcccgaagccggtgccgcagccccctgcgcccccggtgcccccgacatgtccttccgcaaagtggtccggcagagcaaattccggcatgtgttcgggcagccggtcaagaacgaccagtgctatgaggacattcgcgtgtcccgtgttacctgggacagcaccttctgcgccgtcaaccccaagttcctggcggtgattgtggaggccagtggagggggtgcctttctggtgctccccctaagcaagacgggccgcattgacaaggcctacccgacggtgtgtgggcacacgggacctgtcctggacatcgactggtgtcctcacaacgacgaagtcatagccagcggctcggaggactgcacggtcatggtgtggcagatcccagagaacgggctgacctccccgctgacagagccggtggtggtactggaggggcacaccaagcgagtgggcatcatcgcctggcaccccacggcccgaaacgtgctgctcagtgcaggctgcgacaacgtggtactcatctggaatgtgggcacagcggaggagctgtaccgcctggacagcctgcaccctgacctcatctacaatgtcagctggaaccacaatggcagcctgttttgctcagcatgcaaggacaagagcgtgcgcatcatcgacccccgtcggggcaccctggtggcagagcgggagaaggctcatgagggggcccggcccatgcgggccatcttcctggcagatggcaaggtgttcaccacaggcttcagccgaatgagcgagcggcagctggcgctctgggacccagaaaacctcgaggaacccatggccctgcaggaactggactcgagcaacggggccctgctgcccttctacgaccccgacaccagtgtggtctacgtctgcggcaagggtgactccagcatccggtactttgagatcacagaggagcctccctacatccacttcctgaacacgttcaccagcaaggagccgcagcggggtatgggcagcatgcccaagcggggcctggaggtcagcaagtgcgagatcgcccggttctacaaactgcatgagcgcaagtgtgagcccatcgtcatgactgtgccaagaaagtcggacctcttccaggatgatctgtaccccgacacagccgggcccgaggcagccctggaggctgaggagtgggtgagcgggcgggatgccgacccgatcctcatctcactgcgggaggcctacgtgcccagcaagcagcgggacctgaagatcagccggcgcaacgtgttgtctgacagccggcccgccatggccccgggctcctcccacctaggggcccccgcctccaccaccactgctgtccgccgcccccttcccactcagcttctgccagcgggtcgcaccgggctagctggctgcccagagcctctgaggcagcgcaggggtcagttcccacccccacccgtcctgtggaggatgtctacgcccaggcgagctcctcgacctctgagggaccatctccccgaccactgcccagccctctgctccctccccagaggaggcgggagggtgggctctatattttcattccaaataaaattctctttctaaaa

SEQ ID NO: 433722 - DNA, 1930 bp, Homo sapiens
  misc_feature (68)..(68): n is a, c, g, or t
ctgcaatccggtgatccggaggccgcgctcattgcgtacgtcgacgtctcacatacgcggcctcacgntgttcacctcacatatgcctctatgctatcaatatgagactagcgcattatacgagtagtacacgtgatatgatagcttcgagagcgaatccgagctcaaataagctgaccaagatgctcatggagtgactattacagcggatgtcccgtgttcatccttgggactagctacactgtcatgcgacgcgtctgacgctcgcgaagattcctggcggtgattgtggaggccagtggagggggtgcctttctggtgctccccctaagcaagacgggccgcattgacaaggcctacccgacggtgtgtgggcacacgggacctgtcctggacatcgactggtgtcctcacaacgacgaagtcatagccagcggctcggaggactgcacggtcatggtgtggcagatcccagagaacgggctgacctccccgctgacagagccggtggtggtactggaggggcacaccaagcgagtgggcatcatcgcctggcaccccacggcccgaaacgtgctgctcagtgcaggctgcgacaacgtggtactcatctggaatgtgggcacagcggaggagctgtaccgcctggacagcctgcaccctgacctcatctacaatgtcagctggaaccacaatggcagcctgttttgctcagcatgcaaggacaagagcgtgcgcatcatcgacccccgtcggggcaccctggtggcagagcgggagaaggctcatgagggggcccggcccatgcgggccatcttcctggcagatggcaaggtgttcaccacaggcttcagccgaatgagcgagcggcagctggcgctctgggacccagaaaacctcgaggaacccatggccctgcaggaactggactcgagcaacggggccctgctgcccttctacgaccccgacaccagtgtggtctacgtctgcggcaagggtgactccagcatccggtactttgagatcacagaggagcctccctacatccacttcctgaacacgttcaccagcaaggagccgcagcggggtatgggcagcatgcccaagcggggcctggaggtcagcaagtgcgagatcgcccggttctacaaactgcatgagcgcaagtgtgagcccatcgtcatgactgtgccaagaaagtcggacctcttccaggatgatctgtaccccgacacagccgggcccgaggcagccctggaggctgaggagtgggtgagcgggcgggatgccgacccgatcctcatctcactgcgggaggcctacgtgcccagcaagcagcgggacctgaagatcagccggcgcaacgtgttgtctgacagccggcccgccatggccccgggctcctcccacctaggggcccccgcctccaccaccactgctgctgatgccacccccagcggcagcctggccagagccggggaggctgggaagctggaggaggtgatgcaggagctgcgggccctgagggcgctggtcaaggagcagggcgaccgcatctgccgcctggaggagcagctgggccgcatggagaacggggatgcgtagggccacagccacacgccaccttcatctcctccgccgcccccttcccactcagcttctgccagcgggtcgcaccgggctagctggctgcccagagcctctgaggcagcgcaggggtcagttcccacccccacccgtcccaggcccaggccgaagccagcgcccagctttcctcactgttcctgtggaggatgtctacgcccaggcgagctcctcgacctctgagggaccatctccccgaccactgcccagccctctgctccctccccagaggaggcgggagggtgggctctatattttcattccaaataaaattctctttctaaaa

SEQ ID NO: 433723 - DNA, 2143 bp, Homo sapiens
ccctgccccgccccgcccccttcttccggaggagctgcggtgggggcgctccaccgggtcctaggaaaggggctctctctggccccgtccccggcggccccgctcccggccccccggcgccgctcagcctcccgcccagcccctccgcgcgtgacctcggccccgcccccgcgagcccctgccccgcccccgctccgggtccctctgtcacttcctgaatcctgcttcctgcttcccagaggccgggatccggagccgcccgaagccggtgccgcagccccctgcgcccccggtgcccccgacatgtccttccgcaaagtggtccggcagagcaaattccggcatgtgttcgggcagccggtcaagaacgaccagtgctatgaggacattcgcgtgtcccgtgttacctgggacagcaccttctgcgccgtcaaccccaagttcctggcggtgattgtggaggccagtggagggggtgcctttctggtgctccccctaagcaagacgggccgcattgacaaggcctacccgacggtgtgtgggcacacgggacctgtcctggacatcgactggtgtcctcacaacgacgaagtcatagccagcggctcggaggactgcacggtcatggtgtggcagatcccagagaacgggctgacctccccgctgacagagccggtggtggtactggaggggcacaccaagcgagtgggcatcatcgcctggcaccccacggcccgaaacgtgctgctcagtgcaggctgcgacaacgtggtactcatctggaatgtgggcacagcggaggagctgtaccgcctggacagcctgcaccctgacctcatctacaatgtcagctggaaccacaatggcagcctgttttgctcagcatgcaaggacaagagcgtgcgcatcatcgacccccgtcggggcaccctggtggcagagcgggagaaggctcatgagggggcccggcccatgcgggccatcttcctggcagatggcaaggtgttcaccacaggcttcagccgaatgagcgagcggcagctggcgctctgggacccaggggtgaggaggttctgcttggcctgactgcctgcaatgtgccaggaaaacctcgaggaacccatggccctgcaggaactggactcgagcaacggggccctgctgcccttctacgaccccgacaccagtgtggtctacgtctgcggcaagggtgactccagcatccggtactttgagatcacagaggagcctccctacatccacttcctgaacacgttcaccagcaaggagccgcagcggggtatgggcagcatgcccaagcggggcctggaggtcagcaagtgcgagatcgcccggttctacaaactgcatgagcgcaagtgtgagcccatcgtcatgactgtgccaagaaagtcggacctcttccaggatgatctgtaccccgacacagccgggcccgaggcagccctggaggctgaggagtgggtgagcgggcgggatgccgacccgatcctcatctcactgcgggaggcctacgtgcccagcaagcagcgggacctgaagatcagccggcgcaacgtgttgtctgacagccggcccgccatggccccgggctcctcccacctaggggcccccgcctccaccaccactgctgctgatgccacccccagcggcagcctggccagagccggggaggctgggaagctggaggaggtgatgcaggagctgcgggccctgagggcgctggtcaaggagcagggcgaccgcatctgccgcctggaggagcagctgggccgcatggagaacggggatgcgtagggccacagccacacgccaccttcatctcctccgccgcccccttcccactcagcttctgccagcgggtcgcaccgggctagctggctgcccagagcctctgaggcagcgcaggggtcagttcccacccccacccgtcccaggcccaggccgaagccagcgcccagctttcctcactgttcctgtggaggatgtctacgcccaggcgagctcctcgacctctgagggaccatctccccgaccactgcccagccctctgctccctccccagaggaggcgggagggtgggctctatattttcattccaaataaaattctctttctaaaa

SEQ ID NO: 433724 - DNA, 1391 bp, Homo sapiens
ggccccagccctctctgcttctgcatagtgacctccagggcaccttgagcaggggctggtgccgctggcaccccagctccccacagtgaggtatgtttcagcacttgcttagtggcctgggcatagtcttaaggcctggaggaggctggaaaagagggaccctgggaataaagtgaagccaggagggccaggtgggggtcgtcatgtgggaaaaggcatagagatggcagagggcccacctgcatttagggacagtgctggctggccttagtgaggccagctaaggcccgtcctggtttgggattagggggtgaggaggttctgcttggcctgactgcctgcaatgtgccaggaaaacctcgaggaacccatggccctgcaggaactggactcgagcaacggggccctgctgcccttctacgaccccgacaccagtgtggtctacgtctgcggcaagggtgactccagcatccggtactttgagatcacagaggagcctccctacatccacttcctgaacacgttcaccagcaaggagccgcagcggggtatgggcagcatgcccaagcggggcctggaggtcagcaagtgcgagatcgcccggttctacaaactgcatgagcgcaagtgtgagcccatcgtcatgactgtgccaagaaagtcggacctcttccaggatgatctgtaccccgacacagccgggcccgaggcagccctggaggctgaggagtgggtgagcgggcgggatgccgacccgatcctcatctcactgcgggaggcctacgtgcccagcaagcagcgggacctgaagatcagccggcgcaacgtgttgtctgacagccggcccgccatggccccgggctcctcccacctaggggcccccgcctccaccaccactgctgctgatgccacccccagcggcagcctggccagagccggggaggctgggaagctggaggaggtgatgcaggagctgcgggccctgagggcgctggtcaaggagcagggcgaccgcatctgccgcctggaggagcagctgggccgcatggagaacggggatgcgtagggccacagccacacgccaccttcatctcctccgccgcccccttcccactcagcttctgccagcgggtcgcaccgggctagctggctgcccagagcctctgaggcagcgcaggggtcagttcccacccccacccgtcccaggcccaggccgaagccagcgcccagctttcctcactgttcctgtggaggatgtctacgcccaggcgagctcctcgacctctgagggaccatctccccgaccactgcccagccctctgctccctccccagaggaggcgggagggtgggctctatattttcattccaaataaaattctctttctaaaa

SEQ ID NO: 433725 - DNA, 878 bp, Homo sapiens
tgcgccagggaggcccggcgggccatgagaactgtcacgaggcagcccgtgtgggggtctagccaccttaggggtcggcctgcggaggtcgttctacaaactgcatgagcgcaagtgtgagcccatcgtcatgactgtgccaagaaagtcggacctcttccaggatgatctgtaccccgacacagccgggcccgaggcagccctggaggctgaggagtgggtgagcgggcgggatgccgacccgatcctcatctcactgcgggaggcctacgtgcccagcaagcagcgggacctgaagatcagccggcgcaacgtgttgtctgacagccggcccgccatggccccgggctcctcccacctaggggcccccgcctccaccaccactgctgctgatgccacccccagcggcagcctggccagagccggggaggctgggaagctggaggaggtgatgcaggagctgcgggccctgagggcgctggtcaaggagcagggcgaccgcatctgccgcctggaggagcagctgggccgcatggagaacggggatgcgtagggccacagccacacgccaccttcatctcctccgccgcccccttcccactcagcttctgccagcgggtcgcaccgggctagctggctgcccagagcctctgaggcagcgcaggggtcagttcccacccccacccgtcccaggcccaggccgaagccagcgcccagctttcctcactgttcctgtggaggatgtctacgcccaggcgagctcctcgacctctgagggaccatctccccgaccactgcccagccctctgctccctccccagaggaggcgggagggtgggctctatattttcattccaaataaaattctctttctaaaa

SEQ ID NO: 433726 - DNA, 1052 bp, Homo sapiens
ccctgccccgccccgcccccttcttccggaggagctgcggtgggggcgctccaccgggtcctaggaaaggggctctctctggccccgtccccggcggccccgctcccggccccccggcgccgctcagcctcccgcccagcccctccgcgcgtgacctcggccccgcccccgcgagcccctgccccgcccccgctccgggtccctctgtcacttcctgaatcctgcttcctgcttcccagaggccgggatccggagccgcccgaagccggtgccgcagccccctgcgcccccggtgcccccgacatgtccttccgcaaagtggtccggcagagcaaattccggcatgtgttcgggcagccggtcaagaacgaccagtgctatgaggacattcgcgtgtcccgtgttacctgggacagcaccttctgcgccgtcaaccccaagttcctggcggtgattgtggaggccagtggagggggtgcctttctggtgctccccctaagcaagacgggccgcattgacaaggcctacccgacggtgtgtgggcacacgggacctgtcctggacatcgactggtgtcctcacaacgacgaagtcatagccagcggctcggaggactgcacggtcatggtgtggcagatcccagagaacgggctgacctccccgctgacagagccggtggtggtactggaggggcacaccaagcgagtgggcatcatcgcctggcaccccacggcccgaaacgtgctgctcagtgcaggctgcgacaacgtggtactcatctggaatgtgggcacagcggaggagtagctggctgcccagagcctctgaggcagcgcaggggtcagttcccacccccacccgtcccaggcccaggccgaagccagcgcccagctttcctcactgttcctgtggaggatgtctacgcccaggcgagctcctcgacctctgagggaccatctccccgaccactgcccagccctctgctccctccccagaggaggcgggagggtgggctctatattttcattccaaataaaattctctttctaaaa

SEQ ID NO: 433727 - DNA, 244 bp, Homo sapiens
ctcatctacaatgtcagctggaaccacaatggcagcctgttttgctcagcatgcaaggacaagagcgtgcgcatcatcgacccccgtcggggcaccctggtggcagtacgtggctctggagggcaaggatggctgtggataggcccaggaccttgagcagggcgctgcactgaccagcctgtccccccgacaggagcgggagaaggctcatgagggggcccggcccatgcgggccatcttcctg

SEQ ID NO: 433728 - DNA, 1474 bp, Homo sapiens
caaaatgtgaaaatccctagaaagcaatagccttcgaggtaccttgcactgaatttcccaccccagcccttccacccgatgggaggctgtaacttgggcactggggtgactttttccatgcccttgtcatctccagggtgggaggcaggccccacttcccctcccctatcccccacttcccattgttgttgccccacccctaatctccagactgaacccagatggagatctgagtgccaaaacaattcttgatgtaactttgtacatatcttctactaccgttgggggctcttggggttagaggtgggggcggctctgtgggccattgctcccctccacctctcaaaagaccttacagtatttcacagtatctctacccgcacgcgagtattacagtatctagctggaatatccccctacagccccccaggaccctatgaggaagggaaggagccagggagagtgaagtaaggtctgggactggggaggtgggatctgaatgaactcatttgcatatcatttgcatcctccgcttggcagccgctttctacaaactcattcactggagtctgggtcccaatcagccgggtccaggactcctctcacacagacacatctccggaggctgggcctcctgaaaagtgtttgcttggggtgtctgtgtaacaacccctccctattcatatttcttggggaccccctacccagccagccagggtgatctgaaaggtatactttgctagctcagtgagctagttcactcaccatgttggtgagcagagagccacacctttccccattttaccttgggaaactcactccaccatctttgccatctcttgaaagtcccttctgcaatctgacctcaatcttttgtgctgcagtttgtccagaggggacacagatgtggggtcagggatgaggattattgaaaaacccatcatctctttttttttccccgtctccctattagccaatccgatctcagagtctctgagtggcctccttgcacccttctcttcagcacccagtaggtgcttaataagtgtttgctgcattgaattatctccctattccttctcatttgccctctagcttcccataccttctccaagtgtcttcctccctttctttgtctggctccctatgactttctatttttttttcctccgtgtggttcccattgttttctgtcctgtctctatcttagtctttgtctgtcttcctcctttcctcaaatgtctcaactctctctccccaatttccccatttaaaaaaaaaaaaaagtgccaaacttccttggaactgagccgctctggggggagaggaccttggatagaggggaggaaatgggaccatttctctttgaggaggtccctaagaggcattgcaaaagtgtggacatggagctaaattgggtcccccttccacagccctcccaccctgagtttttcttagaatctttgtaagaaaa

SEQ ID NO: 433729 - DNA, 2068 bp, Homo sapiens
ggcgggtggcggcgctgcgcgctgcgggatgcatctcccggaaaagcgaggcgaggggcgggccacgccggtgcgggaaccctcaggattggccagaaggaggccggcgctgtgactccgtccattcccgccgttgacatccaagtcggagacgctggggattggtttccagcggacacgctaagaagcttggagatagtttcgccctcctcacacgctgcggagagggagctccgctgattggtccgaggagtctgggcgcgcgccgatcggcgctccaggactggctgagggggtgcgcgcgccgccagggagcgttggcggtgattggccagagggcggaggccggctatttgaaggcggcgcgcggactaggtgcgcacttcagttctcggagagaagaggcgggagtggacctggtcagccctaccccactgaccccaccggacccaggcgcggcctccgccacagccacagcccctgcccctgctgcggcgcggcgaggcgaggcgatggccaaggtgtcggtgctgaacgtggcggtcctggagaacccgagccctttccacagccccttccggttcgagatcagcttcgagtgcagtgaagccctggcggacgacctggagtggaagatcatttatgttggctcggctgagagtgaggaatttgatcagatcctagactcggtgctggtgggccctgtgccagcagggagacacatgtttgtctttcaggccgacgcccccaacccatccctcatcccagagactgatgccgtgggtgtgactgtggtcctcatcacctgcacctaccatggacaggagttcatccgagtgggctactacgtcaacaacgagtacctcaaccctgagctgcgtgagaacccgcccatgaagccagatttctcccagctccagcggaacatcttggcctcgaacccccgggtgacccgcttccatatcaactgggacaacaacatggacaggctggaggccatagagacccaggacccctccctgggctgcggcctcccactcaactgcactcctatcaagggcttggggctccctggctgcatccctggcctcctccctgagaactccatggactgcatctaactgcaggaacccagagtgtcccagcacgccgggaggggcaaccaggcctcccagcgagtcctgcagggcccatctagaggactttgggggccatcagctgcaatccaggtctgtcaaactcagcccctaggaaagaacaggccttgggtctcccctagtcctggccagaaggatgatctcgcttttcctctacaggcctataagaagcaggtacttcagttctaaattctgacttgtgttcttttcgtcttcataaattctaactaaggccactgtgccactgtgcacccttgagtaccattgatccaaagctttcccacagacctccctggcccacctagaggctttcttggtcagtgcctgtcaaggctccagtcctgctgagccaaaggctttgtcattcctttctcttcctgtacatctgagcagacccactccagctttctggtgtcacaggcgggaatgttagttagtaggtagacttagatcccatttctgtcctgctcccaggaagattcttaggtcctcttcaatccagcagcccctcccagaggtgtgatcagcaggatgctgaggaaccatgttgcctttcctgtcaatcacagccaccttcctgttatctcctaaatggatctggcttttcctggaggctgccatggttggaagatggtatcagagggcctgcctgggcagtctgtctccgggccagggtcagggaccctctgcctctggcagccttaacctgtcctctgctaggaccagggtgatttcaagccagggaagcaactgggaccctgaaaactgtccctccccagcccgctccccctctctgtgccctggtccccttgctgccatgtggatgctgttgtgattgctgtttgtatattatcaaaatgtttttatattaaaaatgtttggtctgaaaattaaaagcacttcatttagaa

SEQ ID NO: 433730 - DNA, 738 bp, Homo sapiens
cacccagatcctcccagctcagcggaacatctggctcgaacccccgggtgacccgcttccatatcaactgggacaacaacatggacaggctggaggccatagagacccaggacccctccctgggctgcggcctcccactcaactgcactcctatcaagggcttggggctccctggctgcatccctggcctcctccctgagaactccatggactgcatctaactgcaggaacccagagtgtcccagcacgccgggaggggcaaccaggcctcccagcgagtcctgcgccagcagggagacacatgtttgtctttcaggccgacgcccccaacccatccctcatcccagagactgatgccgtgggtgtgactgtggtcctcatcacctgcacctaccatggacaggagttcatccgagtgggctactacgtcaacaacgagtacctcaaccctgagctgcgtgagaacccgcccatgaagccagatttctcccaggtggggcctgtttccacttcctgcttcccacaaggccgttctttatacttggggggagttcagccattcaaattgagagtcaaggtcacttcttaaggttttcaagtaatattcagttcttacagtactgtgttagaagaggagaaaaagacctttgtctctcaaaggcatgtcttagagaattaagattaggccagcctgggcaacatagtgagaccctgtccctaacccccgcaaaaaaaaaa

SEQ ID NO: 433731 - DNA, 2355 bp, Homo sapiens
ggcgggtggcggcgctgcgcgctgcgggatgcatctcccggaaaagcgaggcgaggggcgggccacgccggtgcgggaaccctcaggattggccagaaggaggccggcgctgtgactccgtccattcccgccgttgacatccaagtcggagacgctggggattggtttccagcggacacgctaagaagcttggagatagtttcgccctcctcacacgctgcggagagggagctccgctgattggtccgaggagtctgggcgcgcgccgatcggcgctccaggactggctgagggggtgcgcgcgccgccagggagcgttggcggtgattggccagagggcggaggccggctatttgaaggcggcgcgcggactaggtgcgcacttcagttctcggagagaagaggcgggagtggacctggtcagccctaccccactgaccccaccggacccaggcgcggcctccgccacagccacagcccctgcccctgctgcggcgcggcgaggcgaggcgatggccaaggtgtcggtgctgaacgtggcggtcctggagaacccgagccctttccacagccccttccggttcgagatcagcttcgagtgcagtgaagccctggcggacgacctggagtggaagatcatttatgttggctcggctgagagtgaggaatttgatcagatcctagactcggtgctggtgggccctgtgccagcagggagacacatgtttgtctttcaggccgacgcccccaacccatccctcatcccagagactgatgccgtgggtgtgactgtggtcctcatcacctgcacctaccatggacaggagttcatccgagtgggctactacgtcaacaacgagtacctcaaccctgagctgcgtgagaacccgcccatgaagccagatttctcccagctccagcggaacatcttggcctcgaacccccgggtgacccgcttccatatcaactgggacaacaacatggacaggctggaggccatagagacccaggacccctccctgggctgcggcctcccactcaactgcactcctatcaagggcttggggctccctggctgcatccctggcctcctccctgagaactccatggactgcatctaactgcaggaacccagagtgtcccagcacgccgggaggggcaaccaggcctcccagcgagtcctgcagggcccatctagaggactttgggggccatcagctgcaatccaggtctgtcaaactcagcccctaggaaagaacaggccttgggtctcccctagtcctggccagaaggatgatctcgcttttcctctacaggcctataagaagcaggtacttcagttctaaattctgacttgtgttcttttcgtcttcataaattctaactaaggccactgtgccactgtgcacccttgagtaccattgatccaaagctttcccacagacctccctggcccacctagaggctttcttggtcagtgcctgtcaaggctccagtcctgctgagccaaaggctttgtcattcctttctcttcctgtacatctgagcagacccactccagctttctggtgtcacaggcgggaatgttagttagtaggtagacttagatcccatttctgtcctgctcccaggaagattcttaggtcctcttcaatccagcagcccctcccagaggtgtgatcagcaggatgctgaggaaccatgttgcctttcctgtcaatcacagccaccttcctgttatctcctaaatggatctggcttttcctggaggctgccatggttggaagatggtatcagagggcctgcctgggcagtctgtctccgggccagggtcagggaccctctgcctctggcagccttaacctgtcctctgctaggaccagggtgatttcaagccagggaagcaactgggaccctgaaaactgtccctccccagcccgctccccctctctgtgccctggtccccttgctgccatgtggatgctgttgtgattgctgtttgtatattatcaaaatgtttttatattaaaaatgtttggtctgaaaattaaaagcacttcatttagaaaaaaaaaaaaaaaaaaaaaaaaaaaaaaaaaaaaaaagagaaaaaaaaaaaaaaaaaaggggggggggagaagaaaaatgagggggaccaaataatgagagccacgagccgaaacatgagagaaaataggagacaccaaaaagaacgaaaacacagacaaacgacggagacccaaccaaaagccgtactggagacaacacgcacaacgacactagagagaacacctatagcaggcggcgaaaataagagaaaaacccaagacaaaagacagagcaaaaacaagacca

SEQ ID NO: 433732 - DNA, 1975 bp, Homo sapiens
ggcgggtggcggcgctgcgcgctgcgggatgcatctcccggaaaagcgaggcgaggggcgggccacgccggtgcgggaaccctcaggattggccagaaggaggccggcgctgtgactccgtccattcccgccgttgacatccaagtcggagacgctggggattggtttccagcggacacgctaagaagcttggagatagtttcgccctcctcacacgctgcggagagggagctccgctgattggtccgaggagtctgggcgcgcgccgatcggcgctccaggactggctgagggggtgcgcgcgccgccagggagcgttggcggtgattggccagagggcggaggccggctatttgaaggcggcgcgcggactaggtgcgcacttcagttctcggagagaagaggcgggagtggacctggtcagccctaccccactgaccccaccggacccaggcgcggcctccgccacagccacagcccctgcccctgctgcggcgcggcgaggcgaggcgatggccaaggtgtcggtgctgaacgtggcggtcctggagaacccgagccctttccacagccccttccggttcgagatcagcttcgagtgcagtgaagccctggcggacgacctggagtggaagatcatttatgttggctcggctgagagtgaggaatttgatcagatcctagactcggtgctggtgggccctgtgccagcagggagacacatgtttgtctttcaggccgacgcccccaacccatccctcatcccagagactgatgccgtgggtgtgactgtggtcctcatcacctgcacctaccatggacaggagttcatccgagtgggctactacgtcaacaacgagtacctcaaccctgagctgcgtgagaacccgcccatgaagccagatttctcccagctccagcggaacatcttggcctcgaacccccgggtgacccgcttccatatcaactgggacaacaacatggacaggctggaggccatagagacccaggacccctccctgggctgcggcctcccactcaactgcactcctatcaagggcttggggctccctggctgcatccctggcctcctccctgagaactccatggactgcatctaactgcaggaacccagagtgtcccagcacgccgggaggggcaaccaggcctcccagcgagtcctgcagggcccatctagaggactttgggggccatcagctgcaatccaggtctgtcaaactcagcccctaggaaagaacaggccttgggtctcccctagtcctggccagaaggatgatctcgcttttcctctacaggcctataagaagcaggtacttcagttctaaattctgacttgtgttcttttcgtcttcataaattctaactaaggccactgtgccactgtgcacccttgagtaccattgatccaaagctttcccacagacctccctggcccacctagaggctttcttggtcagtgcctgtcaaggctccagtcctgctgagccaaaggctttgtcattcctttctcttcctgtacatctgagcagacccactccagctttctggtgtcacaggcgggaatgttagttagtaggtagacttagatcccatttctgtcctgctcccaggaagattcttaggtcctcttcaatccagcagcccctcccagaggtgtgatcagcaggatgctgaggaaccatgttgcctttcctgtcaatcacagccaccttcctgttatctcctaaatggatctggcttttcctggaggctgccatggttggaagatggtatcagagggcctgcctgggcagtctgtctccgggccagggtcagggaccctctgcctctggcagccttaaccctggtccccttgctgccatgtggatgctgttgtgattgctgtttgtatattatcaaaatgtttttatattaaaaatgtttggtctgaaaattaaaagcacttcatttagaa

SEQ ID NO: 433733 - DNA, 1647 bp, Homo sapiens
cacccagatcctcccagctcagcggaacatctggctcgaacccccgggtgacccgcttccatatcaactgggacaacaacatggacaggctggaggccatagagacccaggacccctccctgggctgcggcctcccactcaactgcactcctatcaagggcttggggctccctggctgcatccctggcctcctccctgagaactccatggactgcatctaactgcaggaacccagagtgtcccagcacgccgggaggggcaaccaggcctcccagcgagtcctgcgccagcagggagacacatgtttgtctttcaggccgacgcccccaacccatccctcatcccagagactgatgccgtgggtgtgactgtggtcctcatcacctgcacctaccatggacaggagttcatccgagtgggctactacgtcaacaacgagtacctcaaccctgagctgcgtgagaacccgcccatgaagccagatttctcccagctccagcggaacatcttggcctcgaacccccgggtgacccgcttccatatcaactgggacaacaacatggacaggctggaggccatagagacccaggacccctccctgggctgcggcctcccactcaactgcactcctatcaagggcttggggctccctggctgcatccctggcctcctccctgagaactccatggactgcatctaactgcaggaacccagagtgtcccagcacgccgggaggggcaaccaggcctcccagcgagtcctgcagggcccatctagaggactttgggggccatcagctgcaatccaggtctgtcaaactcagcccctaggaaagaacaggccttgggtctcccctagtcctggccagaaggatgatctcgcttttcctctacaggcctataagaagcaggtacttcagttctaaattctgacttgtgttcttttcgtcttcataaattctaactaaggccactgtgccactgtgcacccttgagtaccattgatccaaagctttcccacagacctccctggcccacctagaggctttcttggtcagtgcctgtcaaggctccagtcctgctgagccaaaggctttgtcattcctttctcttcctgtacatctgagcagacccactccagctttctggtgtcacaggcgggaatgttagttagtaggtagacttagatcccatttctgtcctgctcccaggaagattcttaggtcctcttcaatccagcagcccctcccagaggtgtgatcagcaggatgctgaggaaccatgttgcctttcctgtcaatcacagccaccttcctgttatctcctaaatggatctggcttttcctggaggctgccatggttggaagatggtatcagagggcctgcctgggcagtctgtctccgggccagggtcagggaccctctgcctctggcagccttaacctgtcctctgctaggaccagggtgatttcaagccagggaagcaactgggaccctgaaaactgtccctccccagcccgctccccctctctgtgccctggtccccttgctgccatgtggatgctgttgtgattgctgtttgtatattatcaaaatgtttttatattaaaaatgtttggtctgaaaattaaaagcacttcatttagaa

SEQ ID NO: 433734 - DNA, 1891 bp, Homo sapiens
ggcgggtggcggcgctgcgcgctgcgggatgcatctcccggaaaagcgaggcgaggggcgggccacgccggtgcgggaaccctcaggattggccagaaggaggccggcgctgtgactccgtccattcccgccgttgacatccaagtcggagacgctggggattggtttccagcggacacgctaagaagcttggagatagtttcgccctcctcacacgctgcggagagggagctccgctgattggtccgaggagtctgggcgcgcgccgatcggcgctccaggactggctgagggggtgcgcgcgccgccagggagcgttggcggtgattggccagagggcggaggccggctatttgaaggcggcgcgcggactaggtgcgcacttcagttctcggagagaagaggcgggagtggacctggtcagccctaccccactgaccccaccggacccaggcgcggcctccgccacagccacagcccctgcccctgctgcggcgcggcgaggcgaggcgatggccaaggtgtcggtgctgaacgtggcggtcctggagaacccgagccctttccacagccccttccggttcgagatcagcttcgagtgcagtgaagccctggcggacgacctggagtggaagatcatttatgttggctcggctgagagtgaggaatttgatcagatcctagactcggtgctggtgggccctgtgccagcagggagacacatgtttgtctttcagctccagcggaacatcttggcctcgaacccccgggtgacccgcttccatatcaactgggacaacaacatggacaggctggaggccatagagacccaggacccctccctgggctgcggcctcccactcaactgcactcctatcaagggcttggggctccctggctgcatccctggcctcctccctgagaactccatggactgcatctaactgcaggaacccagagtgtcccagcacgccgggaggggcaaccaggcctcccagcgagtcctgcagggcccatctagaggactttgggggccatcagctgcaatccaggtctgtcaaactcagcccctaggaaagaacaggccttgggtctcccctagtcctggccagaaggatgatctcgcttttcctctacaggcctataagaagcaggtacttcagttctaaattctgacttgtgttcttttcgtcttcataaattctaactaaggccactgtgccactgtgcacccttgagtaccattgatccaaagctttcccacagacctccctggcccacctagaggctttcttggtcagtgcctgtcaaggctccagtcctgctgagccaaaggctttgtcattcctttctcttcctgtacatctgagcagacccactccagctttctggtgtcacaggcgggaatgttagttagtaggtagacttagatcccatttctgtcctgctcccaggaagattcttaggtcctcttcaatccagcagcccctcccagaggtgtgatcagcaggatgctgaggaaccatgttgcctttcctgtcaatcacagccaccttcctgttatctcctaaatggatctggcttttcctggaggctgccatggttggaagatggtatcagagggcctgcctgggcagtctgtctccgggccagggtcagggaccctctgcctctggcagccttaacctgtcctctgctaggaccagggtgatttcaagccagggaagcaactgggaccctgaaaactgtccctccccagcccgctccccctctctgtgccctggtccccttgctgccatgtggatgctgttgtgattgctgtttgtatattatcaaaatgtttttatattaaaaatgtttggtctgaaaattaaaagcacttcatttagaa

SEQ ID NO: 433735 - DNA, 2037 bp, Homo sapiens
ggcgggtggcggcgctgcgcgctgcgggatgcatctcccggaaaagcgaggcgaggggcgggccacgccggtgcgggaaccctcaggattggccagaaggaggccggcgctgtgactccgtccattcccgccgttgacatccaagtcggagacgctggggattggtttccagcggacacgctaagaagcttggagatagtttcgccctcctcacacgctgcggagagggagctccgctgattggtccgaggagtctgggcgcgcgccgatcggcgctccaggactggctgagggggtgcgcgcgccgccagggagcgttggcggtgattggccagagggcggaggccggctatttgaaggcggcgcgcggactaggtgcgcacttcagttctcggagagaagaggcgggagtggacctggtcagccctaccccactgaccccaccggacccaggcgcggcctccgccacagccacagcccctgcccctgctgcggcgcggcgaggcgaggcgatggccaaggtgtcggtgctgaacgtggcggtcctggagaacccgagccctttccacagccccttccggttcgagatcagcttcgagtgcagtgaagccctggcggacgacctggagtggaagatcatttatgttggctcggctgagagtgaggaatttgatcagatcctagactcggtgctggtgggccctgtgccagcagggagacacatgtttgtctttcagagactgatgccgtgggtgtgactgtggtcctcatcacctgcacctaccatggacaggagttcatccgagtgggctactacgtcaacaacgagtacctcaaccctgagctgcgtgagaacccgcccatgaagccagatttctcccagctccagcggaacatcttggcctcgaacccccgggtgacccgcttccatatcaactgggacaacaacatggacaggctggaggccatagagacccaggacccctccctgggctgcggcctcccactcaactgcactcctatcaagggcttggggctccctggctgcatccctggcctcctccctgagaactccatggactgcatctaactgcaggaacccagagtgtcccagcacgccgggaggggcaaccaggcctcccagcgagtcctgcagggcccatctagaggactttgggggccatcagctgcaatccaggtctgtcaaactcagcccctaggaaagaacaggccttgggtctcccctagtcctggccagaaggatgatctcgcttttcctctacaggcctataagaagcaggtacttcagttctaaattctgacttgtgttcttttcgtcttcataaattctaactaaggccactgtgccactgtgcacccttgagtaccattgatccaaagctttcccacagacctccctggcccacctagaggctttcttggtcagtgcctgtcaaggctccagtcctgctgagccaaaggctttgtcattcctttctcttcctgtacatctgagcagacccactccagctttctggtgtcacaggcgggaatgttagttagtaggtagacttagatcccatttctgtcctgctcccaggaagattcttaggtcctcttcaatccagcagcccctcccagaggtgtgatcagcaggatgctgaggaaccatgttgcctttcctgtcaatcacagccaccttcctgttatctcctaaatggatctggcttttcctggaggctgccatggttggaagatggtatcagagggcctgcctgggcagtctgtctccgggccagggtcagggaccctctgcctctggcagccttaacctgtcctctgctaggaccagggtgatttcaagccagggaagcaactgggaccctgaaaactgtccctccccagcccgctccccctctctgtgccctggtccccttgctgccatgtggatgctgttgtgattgctgtttgtatattatcaaaatgtttttatattaaaaatgtttggtctgaaaattaaaagcacttcatttagaa

SEQ ID NO: 433736 - DNA, 1037 bp, Homo sapiens
ggcgggtggcggcgctgcgcgctgcgggatgcatctcccggaaaagcgaggcgaggggcgggccacgccggtgcgggaaccctcaggattggccagaaggaggccggcgctgtgactccgtccattcccgccgttgacatccaagtcggagacgctggggattggtttccagcggacacgctaagaagcttggagatagtttcgccctcctcacacgctgcggagagggagctccgctgattggtccgaggagtctgggcgcgcgccgatcggcgctccaggactggctgagggggtgcgcgcgccgccagggagcgttggcggtgattggccagagggcggaggccggctatttgaaggcggcgcgcggactaggtgcgcacttcagttctcggagagaagaggcgggagtggacctggtcagccctaccccactgaccccaccggacccaggcgcggcctccgccacagccacagcccctgcccctgctgcggcgcggcgaggcgaggcgatggccaaggtgtcggtgctgaacgtggcggtcctggagaacccgagccctttccacagccccttccggttcgagatcagcttcgagtgcagtgaagccctggcggacgacctggagtggaagatcatttatgttggctcggctgagagtgaggaatttgatcagatcctagactcggtgctggtgggccctgtgccagcagggagacacatgtttgtctttcaggccgacgcccccaacccatccctcatcccagagactgatgccgtgggtgtgactgtggtcctcatcacctgcacctaccatggacaggagttcatccgagtgggctactacgtcaacaacgagtacctcaaccctgagctgcgtgagaacccgcccatgaagccagatttctcccagtcccagctacacaggaggctgaggcaagagaatcgcttgaacccggaaggcagaggttgcagtgagacgagatcacagcattgcactccagcctgggcaacaaaagcaaaactccgtctcaaa

SEQ ID NO: 433737 - DNA, 498 bp, Homo sapiens
ctttgaggagtttcctcaaagatgcttatcttctgtaccttgtatttgagtcagagttatgatgaagacatttgtgagagaggagatgattagaattctagtaatgtacttttaagatgttacagatacaaagaaatgatgtgggtgtcaggagactaaaggatgttgaaggctacacattcaaccttttgttaggtgtttcctttaagctactcagctgtaccttttaaattagttctttttcaaccagtatatcactaaaagttatatcaaagctttatcagttcaagtttcttgcttttcataatacttttttctgatgcaattttatattttcaaacatggcaagttaaaatataaattcatttaaatatatagttttgtacttttctaccatgtaaatgtgcaatgtatataaaagttataatgtgtatttgtaaataaatgatgagtgaaaaaataaaaaaattttaaaaagccaaaaaaattcaattcctg

SEQ ID NO: 433738 - DNA, 2415 bp, Homo sapiens
gcggccgccctcccacagccccacacactgggagaccgcccaccgcaaaccgcggagacccccgtctagatttaaagcgcggctgcgcccggcttctgacgtccattgaatcgcgcgggcggccggcggcgagcgcggggctgcgccgggatcgctgcgccctccgccgctggcctctgcgacgcgcgccgctcgcccgagccacccgccgccgcgccggctccccgcgccgctgcgctcctcgccccgcgcctgcccccaggatggtccgcgcgaggcaccagccgggtgggctttgcctcctgctgctgctgctctgccagttcatggaggaccgcagtgcccaggctgggaactgctggctccgtcaagcgaagaacggccgctgccaggtcctgtacaagaccgaactgagcaaggaggagtgctgcagcaccggccggctgagcacctcgtggaccgaggaggacgtgaatgacaacacactcttcaagtggatgattttcaacgggggcgcccccaactgcatcccctgtaaagaaacgtgtgagaacgtggactgtggacctgggaaaaaatgccgaatgaacaagaagaacaaaccccgctgcgtctgcgccccggattgttccaacatcacctggaagggtccagtctgcgggctggatgggaaaacctaccgcaatgaatgtgcactcctaaaggcaagatgtaaagagcagccagaactggaagtccagtaccaaggcagatgtaaaaagacttgtcgggatgttttctgtccaggcagctccacatgtgtggtggaccagaccaataatgcctactgtgtgacctgtaatcggatttgcccagagcctgcttcctctgagcaatatctctgtgggaatgatggagtcacctactccagtgcctgccacctgagaaaggctacctgcctgctgggcagatctattggattagcctatgagggaaagtgtatcaaagcaaagtcctgtgaagatatccagtgcactggtgggaaaaaatgtttatgggatttcaaggttgggagaggccggtgttccctctgtgatgagctgtgccctgacagtaagtcggatgagcctgtctgtgccagtgacaatgccacttatgccagcgagtgtgccatgaaggaagctgcctgctcctcaggtgtgctactggaagtaaagcactccggatcttgcaactccatttcggaagacaccgaggaagaggaggaagatgaagaccaggactacagctttcctatatcttctattctagagtggtaaactctctataagtgttcagtgttgacatagcctttgtgcaaaaaaaaaaaaaaaaaaaaagaaaaagaaaaaaagaaaaatatattgtccatactgtaaataagtgtatgcttatttatttggggggaaaactatacattaaaggacctttgtcctaaagctctctcccaggccaccttgttactcattggacacggagaggcattcattgtgaggtctactggatgaggcccatagttgagacttgtagacatttatttatactgtgtcatgttttataatttatacataaaatgtctggttgactgtataccttgtttttgaagaaatttattcgtgaaaggaagagcagttgttatttattgtgaggtctcttgcttgtaaagtaaaagctttttttccttgtaaaccatttaagtccattccttactattcactcactcatctgtctcccttcatttcactgttagactcttttccactttcaacaaacttgcatgtcagtttctgtcatgtttatttattggattctctgctgcctgatctgtacatacatgatccctcgggttttgtttacaaggaaccttgactgaccaaaaggcattataactctgactcaaatacaaggtacagaagataagcatctttgaggaaactcctacttcagttcttttgttatgatgaagacatttgtgagagaggagatgattagaattctagtaatgtacttttaagatgttacagatacaaagaaatgatgtgggtgtcaggagactaaaggatgttgaaggctacacattcaaccttttgttaggtgtttcctttaagctactcagctgtaccttttaaattagttctttttcaaccagtatatcactaaaagttatatcaaagctttatcagttcaagtttcttgcttttcataatacttttttctgatgcaattttatattttcaaacatggcaagttaaaatataaattcatttaaatatatagttttgtacttttctaccatgtaaatgtgcaatgtatataaaagttataatgtgtatttgtaaataaatgatgagtgaaaaaataaaaaaattttaaaaagccaaaaaaattcaattcctg

SEQ ID NO: 433739 - DNA, 2358 bp, Homo sapiens
gcggccgccctcccacagccccacacactgggagaccgcccaccgcaaaccgcggagacccccgtctagatttaaagcgcggctgcgcccggcttctgacgtccattgaatcgcgcgggcggccggcggcgagcgcggggctgcgccgggatcgctgcgccctccgccgctggcctctgcgacgcgcgccgctcgcccgagccacccgccgccgcgccggctccccgcgccgctgcgctcctcgccccgcgcctgcccccaggatggtccgcgcgaggcaccagccgggtgggctttgcctcctgctgctgctgctctgccagttcatggaggaccgcagtgcccaggctgggaactgctggctccgtcaagcgaagaacggccgctgccaggtcctgtacaagaccgaactgagcaaggaggagtgctgcagcaccggccggctgagcacctcgtggaccgaggaggacgtgaatgacaacacactcttcaagtggatgattttcaacgggggcgcccccaactgcatcccctgtaaagaaacgtgtgagaacgtggactgtggacctgggaaaaaatgccgaatgaacaagaagaacaaaccccgctgcgtctgcgccccggattgttccaacatcacctggaagggtccagtctgcgggctggatgggaaaacctaccgcaatgaatgtgcactcctaaaggcaagatgtaaagagcagccagaactggaagtccagtaccaaggcagatgtaaaaagacttgtcgggatgttttctgtccaggcagctccacatgtgtggtggaccagaccaataatgcctactgtgtgacctgtaatcggatttgcccagagcctgcttcctctgagcaatatctctgtgggaatgatggagtcacctactccagtgcctgccacctgagaaaggctacctgcctgctgggcagatctattggattagcctatgagggaaagtgtatcaaagcaaagtcctgtgaagatatccagtgcactggtgggaaaaaatgtttatgggatttcaaggttgggagaggccggtgttccctctgtgatgagctgtgccctgacagtaagtcggatgagcctgtctgtgccagtgacaatgccacttatgccagcgagtgtgccatgaaggaagctgcctgctcctcaggtgtgctactggaagtaaagcactccggatcttgcaactccatttcggaagacaccgaggaagaggaggaagatgaagaccaggactacagctttcctatatcttctattctagagtggtaaactctctataagtgttcagtgttgacatagcctttgtgcaaaaaaaaaaaaaacttatttatttggggggaaaactatacattaaaggacctttgtcctaaagctctctcccaggccaccttgttactcattggacacggagaggcattcattgtgaggtctactggatgaggcccatagttgagacttgtagacatttatttatactgtgtcatgttttataatttatacataaaatgtctggttgactgtataccttgtttttgaagaaatttattcgtgaaaggaagagcagttgttatttattgtgaggtctcttgcttgtaaagtaaaagctttttttccttgtaaaccatttaagtccattccttactattcactcactcatctgtctcccttcatttcactgttagactcttttccactttcaacaaacttgcatgtcagtttctgtcatgtttatttattggattctctgctgcctgatctgtacatacatgatccctcgggttttgtttacaaggaaccttgactgaccaaaaggcattataactctgactcaaatacaaggtacagaagataagcatctttgaggaaactcctacttcagttcttttgttatgatgaagacatttgtgagagaggagatgattagaattctagtaatgtacttttaagatgttacagatacaaagaaatgatgtgggtgtcaggagactaaaggatgttgaaggctacacattcaaccttttgttaggtgtttcctttaagctactcagctgtaccttttaaattagttctttttcaaccagtatatcactaaaagttatatcaaagctttatcagttcaagtttcttgcttttcataatacttttttctgatgcaattttatattttcaaacatggcaagttaaaatataaattcatttaaatatatagttttgtacttttctaccatgtaaatgtgcaatgtatataaaagttataatgtgtatttgtaaataaatgatgagtgaaaaaataaaaaaattttaaaaagccaaaaaaattcaattcctg

SEQ ID NO: 433740 - DNA, 2361 bp, Homo sapiens
gcggccgccctcccacagccccacacactgggagaccgcccaccgcaaaccgcggagacccccgtctagatttaaagcgcggctgcgcccggcttctgacgtccattgaatcgcgcgggcggccggcggcgagcgcggggctgcgccgggatcgctgcgccctccgccgctggcctctgcgacgcgcgccgctcgcccgagccacccgccgccgcgccggctccccgcgccgctgcgctcctcgccccgcgcctgcccccaggatggtccgcgcgaggcaccagccgggtgggctttgcctcctgctgctgctgctctgccagttcatggaggaccgcagtgcccaggctgggaactgctggctccgtcaagcgaagaacggccgctgccaggtcctgtacaagaccgaactgagcaaggaggagtgctgcagcaccggccggctgagcacctcgtggaccgaggaggacgtgaatgacaacacactcttcaagtggatgattttcaacgggggcgcccccaactgcatcccctgtaaagaaacgtgtgagaacgtggactgtggacctgggaaaaaatgccgaatgaacaagaagaacaaaccccgctgcgtctgcgccccggattgttccaacatcacctggaagggtccagtctgcgggctggatgggaaaacctaccgcaatgaatgtgcactcctaaaggcaagatgtaaagagcagccagaactggaagtccagtaccaaggcagatgtaaaaagacttgtcgggatgttttctgtccaggcagctccacatgtgtggtggaccagaccaataatgcctactgtgtgacctgtaatcggatttgcccagagcctgcttcctctgagcaatatctctgtgggaatgatggagtcacctactccagtgcctgccacctgagaaaggctacctgcctgctgggcagatctattggattagcctatgagggaaagtgtatcaaagcaaagtcctgtgaagatatccagtgcactggtgggaaaaaatgtttatgggatttcaaggttgggagaggccggtgttccctctgtgatgagctgtgccctgacagtaagtcggatgagcctgtctgtgccagtgacaatgccacttatgccagcgagtgtgccatgaaggaagctgcctgctcctcaggtgtgctactggaagtaaagcactccggatcttgcaactccatttcggaagacaccgaggaagaggaggaagatgaagaccaggactacagctttcctatatcttctattctagagtggtaaactctctataagtgttcagtgttgacatagcctttgtgcaaaaaaaaaaaaaaaaaaaaagaaaaagaaaaaaagaaaaatatattgtccatactgtaaataagtgtatgcttatttatttggggggaaaactatacattaaaggacctttgtcctaaagctctctcccaggccaccttgttactcattggacacggagaggcattcattgtgaggtctactggatgaggcccatagttgagacttgtagacatttatttatactgtgtcatgttttataatttatacataaaatgtctggttgactgtataccttgtttttgaagaaatttattcgtgaaaggaagagcagttgttatttattgtgaggtctcttgcttgtaaagtaaaagctttttttccttgtaaaccatttaagtccattccttactattcactcactcatctgtctcccttcatttcactgttagactcttttccactttcaacaaacttgcatgtcagtttctgtcatgtttatttattggattctctgctgcctgatctgtacatacatgatccctcgggttttgtttacaaggaaccttgactgaccaagaaactcctacttcagttcttttgttatgatgaagacatttgtgagagaggagatgattagaattctagtaatgtacttttaagatgttacagatacaaagaaatgatgtgggtgtcaggagactaaaggatgttgaaggctacacattcaaccttttgttaggtgtttcctttaagctactcagctgtaccttttaaattagttctttttcaaccagtatatcactaaaagttatatcaaagctttatcagttcaagtttcttgcttttcataatacttttttctgatgcaattttatattttcaaacatggcaagttaaaatataaattcatttaaatatatagttttgtacttttctaccatgtaaatgtgcaatgtatataaaagttataatgtgtatttgtaaataaatgatgagtgaaaaaataaaaaaattttaaaaagccaaaaaaattcaattcctg

SEQ ID NO: 433741 - DNA, 2048 bp, Homo sapiens
  misc_feature (1960)..(1960): n is a, c, g, or t
gcggccgccctcccacagccccacacactgggagaccgcccaccgcaaaccgcggagacccccgtctagatttaaagcgcggctgcgcccggcttctgacgtccattgaatcgcgcgggcggccggcggcgagcgcggggctgcgccgggatcgctgcgccctccgccgctggcctctgcgacgcgcgccgctcgcccgagccacccgccgccgcgccggctccccgcgccgctgcgctcctcgccccgcgcctgcccccaggatggtccgcgcgaggcaccagccgggtgggctttgcctcctgctgctgctgctctgccagttcatggaggaccgcagtgcccaggctgggaactgctggctccgtcaagcgaagaacggccgctgccaggtcctgtacaagaccgaactgagcaaggaggagtgctgcagcaccggccggctgagcacctcgtggaccgaggaggacgtgaatgacaacacactcttcaagtggatgattttcaacgggggcgcccccaactgcatcccctgtaaagaaacgtgtgagaacgtggactgtggacctgggaaaaaatgccgaatgaacaagaagaacaaaccccgctgcgtctgcgccccggattgttccaacatcacctggaagggtccagtctgcgggctggatgggaaaacctaccgcaatgaatgtgcactcctaaaggcaagatgtaaagagcagccagaactggaagtccagtaccaaggcagatgtaaaaagacttgtcgggatgttttctgtccaggcagctccacatgtgtggtggaccagaccaataatgcctactgtgtgacctgtaatcggatttgcccagagcctgcttcctctgagcaatatctctgtgggaatgatggagtcacctactccagtgcctgccacctgagaaaggctacctgcctgctgggcagatctattggattagcctatgagggaaagtgtatcaaagcaaagtcctgtgaagatatccagtgcactggtgggaaaaaatgtttatgggatttcaaggttgggagaggccggtgttccctctgtgatgagctgtgccctgacagtaagtcggatgagcctgtctgtgccagtgacaatgccacttatgccagcgagtgtgccatgaaggaagctgcctgctcctcaggtgtgctactggaagtaaagcactccggatcttgcaactccatttcggaagacaccgaggaagaggaggaagatgaagaccaggactacagctttcctatatcttctattctagagtggtaaactctctataagtgttcagtgttgacatagcctttgtgcaaaaaaaaaaaaaaaaaaaaagaaaaagaaaaaaagaaaaatatattgtccatactgtaaataagtgtatgcttatttatttggggggaaaactatacattaaaggacctttgtcctaaagctctctcccaggccaccttgttactcattggacacggagaggcattcattgtgaggtctactggatgaggcccatagttgagacttgtagacatttatttatactgtgtcatgttttataatttatacataaaatgtctggttgactgtataccttgtttttgaagaaatttattcgtgaaaggaagagcagttgttatttattgtgaggtctcttgcttgtaaagtaaaagctttttttccttgtaaaccatttaagtccattccttactattcactcactcatctgtctcccttcatttcactgttagactcttttccactttcaacaaacttgcatgtcagtttctgtcatgtttatttattggattctctgctgcctgatctgtacatacatgatccctcgggttttgtttacaaggaaccttgactgaccaaaaggcattataactctgactcaaatacaaggtacagaagataagcatctttgagaagaaaacctnccttacttcaatttcttttttggtttttgaatgaaagaaaccatttgtttaggagaaaggaagatttatttagaaaattcttaagtaa
